United States Patent Application Publication US 2018/0126003 A1 - sequence listing, part 26

SEQ ID NO: 42898 - DNA, 10938 bp, Artificial Sequence
  derived and/or modified sequence
gctcgtctgcctggctgcggggtgacacggggcttcgccttgggaaggggtcgagggaagcagttagacggctgccgggcggcggctgccgcgcggcacacaatatttatttaattgcccaactaccactgatgaagatatattggagtgactgctgaaattgcctttttgtttttaaccagaggacagtccatttgtttcacttctttttgctttctttactgctatgagctttactgaacggctgaaaaacttggaaaataaaatggacatgctgtagtcttgaacataatttttttaaggaaaacttaaagtgccagagtgaaagccagaatggcatccagagagaggctctttgaactttggatgctttattgtacaaagaaagatccagattacctgaagctgtggttggacacttttgtttctagctatgaacaatttttagacgttgactttgaaaagctgcctaccagggtagatgatatgcctccaggaatatctctgcttcctgataatattctgcaggttctgaggatccagcttctacagtgtgttcagaaaatggcagatgggttagaggaacaacagcaagccttgtcaattttgcttgtcaagttcttcattattctttgcagaaatctatcaaatgtggaagaaattgggacttgctcgtacattaattatgtcatcaccatgacaacactctatattcagcaattaaaaagcaaaaaaaaagagaaggaaatggcagatcagacatgtattgaagaatttgtgatccacgcattggcattttgtgaaagcttatatgatccatatcggaattggagacatagaatttcaggacgaatccttagtactgtggaaaagagcagacagaaatataaaccagcttctctcacagtggaattcgtccctttcttttatcaatgttttcaggaaagtgaacatctcaaggaaagtcttaaatgttgcttattgcatctctttggagccattgtagccggtgggcagaggaatgctttgcaagcaatttctccagccactatggaagttcttatgcgagtattggcagattgtgattcctgggaggatggagatcctgaagaagtgggtaggaaggcagaactaactctgaagtgccttacagaagtggtacatatccttctcagtagcaactctgatcagcgtcaagtggaaaccagtactattctggagaactattttaaattgctaaattcagatcattcagctttacctaatcaaaggaggtccagacagtgggaaaaccgatttattgctctacagatcaaaatgctgaataccatcacagccatgttagattgtacagatagacctgttcttcaggccatttttcttaacagcaattgctttgaacatctcatacgactgctacagaactgcaaggtgtttcagggacaattggattgtttggccatatcaaccattcaggctttgaccgcagtaatgaacaaatctccagctgctaaggaagtatttaaagaaagaattggttatacacatatgcttgaagtattaaaatccctgggtcagccaccactggaattacttaaagaacttatgaatatggctgtagagggtgaccacacttcagttgggattttgggcattagtaatgtccaacctctcttgcttcttatccagtggcttccagaactacaatcccatgacctgcaaatcttcatctctgattggctgaaaagaatttgttgtattaatagacagagtcgaactacttgtgtcaatgcaaacatggggattagaatcattgaaacccttgacttgcattcttccctccatcaaacttgtgctgagaacttgattgcaatccatggttccttggggagtcagtcagtgagctcagaagaaatccgtcgactactgagattgctgagagtggatgaatctgagtctgttcacccttatgtcactcccgtgactcgagcaatcctgacaatggcccgaaaactaagtctagagagtgccctccagtatttcaatttgtcacatagtatggcaggaatttctgtgcctcccatacagaaatggccagggtctgccttttctttcagtgcttggttttgcttagaccaggatcagttgactcttggcattgctaacaaaggagggaaaaggaaacaattgtacagtttttttacaggaagtggcatgggttttgaagcctttattacccattcaggtatgttggtcgtggcagtgtgcacaaaaagagaatatgcaacggttatgcttcctgaccacagtttctgtgattccctctggcacaacataactgttgtccacatgcctggaaaaaggccttttggtcagagcttcgtctatatctatgacaatggacaacagaaggtttctgcccctctcagatttcctgccatgaatgaaccctttacttcctgttgcattggttcagctgggcaaagaaccaccactcctccaccatcccaaatcccagatccacctttctcttctcccattacccctcatcggacatcatttggtggaattctgtcatcagcctcctggggaggaacaattgaaaaatcaaaattgattaccaaattgatatcagctggaacccaagacagtgaatgggggtgtcccacatctctggagggtcagctaggatctgttatcatcttttatgaaccactacaacctcctcaggtgaaggcattatatttagcaggtccaaattgtttaagcccttggaagtgtcaagagtctgacatggccgacctgcctggtaacatccttctttactacacagcaaaggcctgcaaaaattcaatctgtcttgatttatctactaattgtttgcatggaagattaacaggaaacaaagtagtgaactgggacattaaggatatcataaactgcataggtgggttaaatgtactctttcctttattggaacaaatcagccactttagtgaaggacagattcctgaagaaaagaatgaaagcacagttcctgaatcagtaacacctgttgaaggagattggctcgtatggacttccacaaaggcctcagagtcaagactagagagaaacctagttgcaacatttatcttaattgtgaaacattttattcagagacatcctatcaaccagggcaatcttattcactcccatggagttgcaactcttggtgctttacttcagaaggtgccaagcaccttgatggatgttaatgtgttgatggcagttcagttactaattgaacaagtatcattagagaaaaatatgcagctcctgcaacaaatgtatcaatatttactctttgactttcgtatttggaaccgtggagattttccctttcgaatcggtcacatacagtatctttcaaccatcattaaagacagcaggagagttttccgaaagaagtatggtgtgcagtttctcctagatacacttaggatttattatgggaatggttgtaaatataatgaactatctctagatgatattcgaacaataaggacttctttgtatggactaattaaatattttctgtgcaaaggtggatctcatgaagagatacaaagtattatggggtacatagctgctactaatgaagaagaacagctctttggaattttggacgtgctcttcagtctcctacgtaccagcccaaccagaggtcagcttttcttactgctttttgaaccaggaaatgctgacatactgtacgcattgctcttaaatcagaagtactctgacagactaagagaaatcatttttaagattatggaacaaatgttgaaatgcacgaacgtttatgagcgtagtaaacaacatattcgactcagagaagttggctactcgggactgggactccttcttaatgaagcacttgttaatacttctcttattaaaaacctcacccatcaaatcataaatacagatcctgttattaatttcaaagatctactatctgtggtatatatatctcacagagcacatataaatgttagagtggccatctgcagaaaggttttgcaaattttgcagttccagccagatgcagcacatcaaatatcacagcaagtgggttggcaagacaccttagttaggctttttttaaaagcaaaatttgaaaacggaaatactcttcataagcacagtagagctgttttaatgaaagacaatgataaaaatatgtcaactgaagataccaagaagaactctgatgaaaaaacagatgaggaaaaaatcacctcttttgcctcagctaatgtgtcttcggatcagtggagtttggaggatagacactctttagactcaaacacaccattatttccagaagatagctctgtgggagaattgtctttcaaatcagagaatcaagaggaattctggcatagtaacccttcacatttgagtttagacctcagtggaattgactcatgtgaaatgagtgatagtggaagtcaagtgccagacagtctgcctagcacaccatccccagtagagtctactaaatcgttttctgtgcactctgacagagaaagcagcatcacaaatgatatgggctttagtgatgacttctctttacttgaaagccaagagagatgtgaggaggagcttcttcaattactgacacatattttgaattatgtaatgtgtaagggactagaaaagtctgatgatgatacttggattgaacgaggacaagtgttttcagcactaagtaaaccaggaatatccagtgaactacttcgaccatcagatgaaataaaactaactttgctacaaaagatgttagaatgggcaatctcagaaaacagagaagcaaaaactaatccagtaactgctgaaaacgccttccgactagtgctgatcatacaggactttcttcagtcagagggactagttaattcaaacatgtggaccgagaagcttttagaggatatgatgctgctctttgactgtctgtcagtctgctattctgaaagtccagtatgggtaaaactctctcaaattcagatccagttgcttctaggattcattggaaggggtaatttgcaggtttgtgcaatggcatcagctaagctaaatacccttcttcagaccaaagtgattgaaaatcaggatgaagcatgttacattttagggaagctggaacatgttctaagtcaatcaatcaaggaacagactgaaatctactcatttctgattccccttgttcgtaccctggtttccaaaatttatgagcttctcttcatgaacttgcacctaccttctttaccttttaccaatggtagctcctcattttttgaagattttcaagaatattgtaattcaaatgaatggcaagtttacattgaaaaatatattgtaccttatatgaagcagtatgaagctcatacattttacgatggtcatgagaacatggcactttattggaaggattgttatgaagctttaatggtaaatatgcataaacgagaccgggaaggaggggaaagcaagctcaaatttcaggagctgtttgtggagccatttaatcgaaaagcacgccaagagaacctgaggtataataatatgcttaaacaacttagcagtcaacagttagccactcttagacgctggaaagcaatacagctctatcttacatgtgaaaggggaccttgggctaaaaggaaacagaatccaattcactggaagctagctaatgtagagaattattcccgcatgagacttaagctggtaccgaattataatttcaaaacccatgaggaagctagtgccttgagagataatctgggtatccaacactcacagccttccagtgatacattgcttttggaagtagtgaaacaagtaaaagttagtgatatggtggaggataaattagaccttcctgaagaggatataacagctagagtaaatgttgatgagaaagaagaacaggatcaaaaagaaaaattggtattgatggaagactgtgaactcattacaataattgatgtaattcctggcagattagaaatcactactcaacacatttacttctatgatggcagcattgaaaaagaagatggagtaggctttgatttcaagtggcctcattctcaaattcgagagattcatctccggcgttacaatttaagaagatcagcccttgagatttttcatgttgaccaatccaactactttctcaatttcaaaaaagaggttagaaacaaaatatatagccgactgttgtcacttcattccccaaatagttattatggaagcagatcaccacaggagttattcaaagcatcaggattgacacagaaatgggtaaacagagagatatcaaattttgactacctcattcaaataaatacaatggcaggacgaacctataatgaccttgcacagtatcctgtgtttccctggattttacaagattatacttcggaagagttggaccttaataaccctgctgtatttcgagatctttccaaaccaattggggtagttaatgaaaaaaacgccaaagctatgagagaaaaatatgaaaattttgaggatcctatgggaactattgataagtttcactatggtactcactattcaaattctgcgggggtcatgcactatctcattcgtgtagaaccgttcaccaccctccacatccaacttcagagtggaaggtttgactgtgcagatcgacagttccattctattcctgctacctggcaagctcttatggataatccatatgatgttaaagaacttattcctgaattcttctatttcccagagtttttggaaaatcaaaatcaatttaacttgggtcgtctacagatttccaaagaattagtaaatgatgtcattctcccgaaatgggctaaatcagctgaagatttcatctataaacataggaaagctttggagtctgaatatgtttcagctcatcttcatgaatggatagatctgatctttggctataaacagaggggaccagctgcagtagaggcactcaacgttttctattattgtagttatgaaggagctgtggatctggatgccttaacagatgagaaagaaagaaaagccttagaagggatgattaataattttgggcaaacaccctgtcaattattaaaggaaccacaccctccaagattatcagcagaagaagcagtgcagaagccaaccaaaatagacacttcaaccctaaacctgtttcaacaccttcctgaactcaagtcattttttatagaggggattagtgatggtattccactattaaaggccaccatccccaaaaatcagtatcgttcttttatgtctcaaggcagccctgagttactgataacaataagcatgaattatgttattggaacccatggatggttgccttatgacagaaacatttctaattactttacattcatcaaggatcaaactgtgacaaatccaaaaactcagcgcagtataaatggttcttttgctcccgggctagagatcacttctaagctatttgtagtatcacatgatgcaaagttgctcttcagtgctggatactgggataatagcattcaagtgatgtcacttacaaaaggcaaaattatctcacacatcatccggcatatggatattgtgacttgcttagctacagattactgtggaatacatttgatttctggttccagagatactacatgtatgatatggcaaataacacaacagggaggtgttcctgtgggcttagcatctaaaccttttcagattctttatggacacaccaacgaggtactgagtgtcggcatcagcactgagctagacatggcagtgtcaggatcaagggatggaacggtgattatacataccattcagaaaggtcagtacatgaggactttacgaccaccttgtgagagttctctgttcctgaccattcctaatttggctatatcttgggaaggacatattgttgtctactccagcactgaagaaaagaccaccctcaaggataagaatgcattacatctgttttctataaatggcaagtatctagggtctcaaatcctgaaggaacaagtatcagatatatgtataatcggagaacacattgtcacaggcagcatacaaggattcctgtctataagagatctccacagcttgaatctcagcatcaacccattagccatgcgactgcctatccattgtgtttgtgtcaccaaagaatacagccatattcttgtaggtttagaagatggcaaattgattgtagtgggtgttggcaagcctgctgagatgcgttcaggtcagctttctcgaaaattttggggatcgagcaagcggctcagccagatttcagctggagaaactgaatataatactcaagattccaagtgattgttatttccattttctgttatgattactgaaacctgatttattgctttgtcactttaaccacatctctcaactctctgcaatgttgcaaggcttttatccctgaaaatcatttacagataaccacaatttgctgtggtatataaactaattcttggtctatactaagatgtatttgagaaaatacatttgatttgattttgtggcccattcctaaaggtcattgtatccatttttaaaacaaactaaaatgagaacattaggttcaattttcttattattccaaatgataaaatttaagatttttctaataaaagagtacagataatgggacagttgagagagatggctttaaatacattcttaagtaatcattttcctatttactgaccactgtaatgaaaatatatcaatttatttatggaactcctgattggggataatattttaaaggtatctgttgcacacttggattttcaaaactcggtgaaagttacaagtttgcatggtaagaataaaataagaatattgaaactggtacattagctaattctattactacttagcgtgtttctaatgagaagttactgaaatctattactgtccttaataaaaattgagtagaaaaaagtggaactagagatacattttacagatgtatttccttaataatataattaagcaaaagtgctaattgtgattttgacagttgggccttttaagtagcatttgcagcacaatttgcatttgcaaagttccgaatttcttgactctttcttcactaagcaaatactgttttactctaataattaagagttagtagtacccaaatatgttgaatttttacttaggatatctgtgtgattgatgaatgaattgaaaagatatgtataacttaaaataatcatttatatatagtaatttaaaaatttctatttcatgttttaggattatagctaattttattatatagtgttaaatgttgtggttgattattaagatcttaaagtaaaagtctgatttatttaatttggaattcaaagacattgttaaacttagatttttttgtaagattatcttttgagttaggtcagagagcttttacaactaccagtgttattaatctgagatttcatgtgtttgggagaacttgtgaatccctctgaaattgtgcagagactttgtatgttaaatgcattttcaggaaggaatggttacatggctttctttaaagggatctgtttccagtaatagtattcttttttgttccacaaatcatagatgtccttaaatccaattgtcttctcagttgaatcttagagaaatttttcttttgcaatttcgctttcctgttgaccacagtatccagtgcccttttctttataatcttttgagtgagtaaaaaaattttaagaaataaaggattctgtttagggaaacttttgaatagatttgatttgatgtgagtcagggctaataaaaagctatagaagaattttctttccaataagtaaaaatcctctgttttattaaggaaaaaatagctatgttttaggtaaataactctgaaataaactggtacaacaattgtaaaatagaacatatttaaatgtcaaggtgtcttttcttaagacttcaggaatttgtattgaacaaagtctcaagttaagtagcaataattatgatgcataaatgagactggcatctattcatttattttattcttttttggggtgatgggaggtttcaatccagtgcttcacccgtggtgccaccgtggctatctttttttttatcttacagttttttaggagatttcaagtcggcagaactaacatgattgatttttagtttttaaaatactgatttttttagaaactttttctaaatcaaaacctactaagttttattttgttatttatccagagattttgatgtaaaaatgccttcatttttaagattacttaatactggatttgaaaattattttggatgcttataagttttctaaaacttagataattagaaaaaatgcctaagtttatgatgttttactatgctgctttttagatggaagaaataagcagtttttactttatagtacaaataagttttgttcacaataaaatagatatcctacctggactaatactagatgtacaaggtagtggaattatttcttatattgctttttccaaaaagtaaaaaccaaaaatgtgggccgggtgtggtggctcatgcctgtaatcccagcactttgggaggctgaggcaggcgaatcacaaggtcaggagttcaagaccagcctggccaacacagtgaaaccctttctctactaaaaatacaaaaattagccgggcatggtggcacatgcctatagtcccagctacttgagaggctgagcagcgcaggagaatcacttaaacccgggaggtggaggttgcagtgacctgagatcacgctactgcactccagcttgggcaacagagtgagactttgtctcaaagaaaagaaaaaaaa

SEQ ID NO: 42899 - DNA, 7814 bp, Artificial Sequence
  derived and/or modified sequence
atggcctcccgcgaacgactattcgagctttggatgctatactgcactaagaaggatcctgactatcttaaattgtggcttgacacttttgtgtcctcctacgagcagttcctggacgtcgactttgaaaaactccccacaagggtggacgacatgccacctgggattagtctgttaccagataatattttacaggtgcttcggatccagctgctgcagtgcgtgcagaaaatggccgatgggcttgaggaacagcagcaggccctgtctattctgttggtgaaattctttatcatcttgtgcaggaacttgagtaacgtggaggagatcggaacttgttcttatatcaattacgtcattactatgactaccctgtacatccaacaactcaagtccaagaaaaaagaaaaagagatggccgaccagacatgtattgaggagtttgtgatccatgcactcgcattttgtgagtctctgtatgatccgtatcgcaattggcgtcataggatttccggcaggattctgagtaccgtggagaaaagccgccagaagtataaacctgccagcctcacagtagaattcgtgcctttcttttatcagtgctttcaggagagcgagcacctcaaggaaagcctaaaatgctgtttgctgcaccttttcggagctattgtggcaggcggacaacggaatgcccttcaggcgatcagcccagcaaccatggaagtcttaatgagggtccttgccgattgtgattcctgggaagacggggacccagaagaggtgggccgtaaggccgagctcacgctgaagtgcctcacagaagttgtccacattcttctgtcatccaatagcgatcagaggcaggtcgagacctcaaccattctagagaattatttcaagctgctaaactctgatcactcagccttgcccaaccagcggaggtctagacagtgggagaacagattcattgcgctgcagatcaagatgctgaacacaataaccgctatgctggactgtacagatcggccagttctgcaggcgattttcctgaacagcaattgttttgagcacttaattcgcctgctgcagaactgcaaagtgttccaggggcagctggattgcttggctatctccacaattcaagctctgactgccgtcatgaataaaagccccgctgctaaagaggtgtttaaagagagaatcggatacacacacatgctcgaagtcttgaagagcctgggccagccgcctcttgaactcttgaaagagctgatgaacatggcagtggagggtgatcacacctccgtgggaatcttggggatcagtaatgtacaacctctgctcctgctgatccagtggctgccagagctgcagtctcacgacctgcagatctttatcagcgattggctaaagcgaatctgctgtattaaccgacaatcccgtacaacctgtgtaaatgccaacatgggcatcagaatcatcgaaacattggacctgcattcttctctccaccaaacttgtgccgagaacctcatagctatccacgggtctctaggctctcagagtgtgagctcagaagagatccgcagactgctgcgattgttaagagtagacgaatcagaaagtgtgcacccatacgttacgcccgttacacgcgctatcctaactatggctcggaaactgtcacttgaatctgctctccaatatttcaacctgtcgcatagtatggcgggaatctccgttccaccaatccagaaatggcccggatccgcttttagctttagcgcatggttttgtttagaccaagaccaactaacattgggcatagccaataagggcggaaagcgcaagcagctttattctttcttcaccggaagtggcatggggttcgaagctttcatcacacatagcggtatgttggtggtggcagtgtgtacgaagcgtgagtatgccacggtgatgctccccgatcatagtttctgcgattctctttggcacaacattactgtcgtgcacatgcccggtaaacgaccgtttggacagtcattcgtctatatttacgacaacggtcagcagaaggtgtctgcccctctgaggtttcctgccatgaacgagcccttcacatcatgctgtattggctccgctgggcagaggactacgacccccccacctagccagatacccgaccctccatttagtagtcctatcaccccccaccggaccagctttggaggtattctgtcatctgcatcctggggcggaactatagagaagtcaaaactgatcacgaagcttatctcggccggaactcaggactctgaatggggatgtcctacatcccttgaaggtcagctgggttctgtgatcatcttttatgaacctttacagcccccacaagtgaaggcgctttatctggctgggcctaactgtttatcaccttggaagtgccaggagagtgacatggccgatttacctggaaacattctcctgtactacaccgcgaaagcctgtaagaacagcatctgcctggacctcagcaccaactgcctgcatggaaggctgactggcaacaaggttgtgaattgggacattaaggacattattaattgtattggaggtctcaacgtgctgttcccactcttagagcagatctcacacttcagcgaaggccagatccccgaagagaagaatgagagtaccgttcccgagtctgtgacccccgtggaaggagactggctggtgtggacatccactaaagcctccgagagtagactagaacggaatctggtggcaactttcattctgatcgtgaaacattttatccagagacatcctatcaatcagggaaacctcatccacagccatggcgtggcgaccctcggagctcttttgcaaaaagttcctagcacattaatggacgtgaatgtgctaatggcagtccaattactcattgagcaggtaagcttggaaaaaaatatgcagctgctccaacagatgtaccagtatcttttgttcgactttcggatatggaaccggggagatttcccgtttcggatcggccatattcagtacctgagcaccatcatcaaggactcaaggcgcgtgtttcggaaaaaatacggggttcagtttttgcttgatactctaaggatatattacgggaatggatgcaaatataacgagctgtctttggatgacattaggaccattcggaccagcctgtacggcctcattaagtatttcttgtgtaagggcggtagtcatgaagaaatccagtctatcatgggctacattgccgctacaaatgaagaggaacaattatttggaatacttgatgtgctcttcagcctgctacggaccagcccaacgaggggccagctcttcctcctgctattcgaaccaggaaacgctgacatcctctacgccctactgctgaaccagaagtactccgatagactgcgggagattatctttaagatcatggagcagatgttgaaatgtactaacgtgtatgagcgatcaaagcagcacatacgcttgagggaggttggctatagcggcctgggactattactgaatgaggccctcgtgaatacctccctgatcaagaatttgactcatcaaatcatcaacactgaccccgtgattaattttaaggacctgttatctgttgtctatataagccatagggctcacatcaacgtgagagtggcaatatgccggaaggtactgcaaatcttgcaattccagccagatgctgcccatcaaatctctcagcaggttggctggcaggacactctggttaggctgtttctgaaagcaaagtttgaaaatggtaacaccctgcataagcacagtagggccgtgttgatgaaggacaacgataaaaatatgagcacagaggatacaaaaaagaattccgatgaaaagacggacgaagaaaaaatcacatcttttgcgtccgccaacgtgtcttctgaccagtggagccttgaagatagacattcactggattctaatacgccactgtttcccgaagactccagcgtgggggaacttagcttcaagtcggaaaaccaggaggaattctggcatagtaatccctctcacctgtcccttgatctaagcggaattgactcctgcgagatgagcgattctgggtctcaagttccagatagccttcctagtaccccaagtccggtggaatccacaaagagctttagcgtccactccgacagggaatcctcaatcacaaacgacatgggttttagtgacgacttctcgctactggaatcccaggagaggtgtgaggaagaactcctgcagctcttgacccacatacttaattatgtgatgtgcaaagggctggaaaaatcagatgacgacacatggatcgaacgaggacaggttttctcagccctgtctaaaccgggaatctctagtgaactactgcgccctagcgatgagattaagctcacattgctgcagaaaatgctagagtgggccattagcgaaaaccgggaggccaagaccaaccccgtgaccgctgagaacgcatttcggctcgtgctgattatccaggattttctacagagcgagggtctagtgaacagcaatatgtggactgaaaagctcctggaagacatgatgctcctgttcgactgtctgtctgtctgctattctgaatcccccgtctgggtgaaactgagtcaaatccagattcagctgctcctgggcttcatcggcagaggtaacctgcaggtatgcgccatggccagcgcgaagctgaacaccttgctccagacaaaggtcattgagaatcaggatgaggcctgctatatcctcggcaaactggaacatgtcctgtcacagtcaattaaggagcagacagaaatttacagcttcttaatacccctggtgcgcacactggtatctaaaatctatgagcttctgttcatgaatctccatctgccttccttgcctttcacaaacggaagttcaagcttctttgaagacttccaggagtattgcaattccaacgaatggcaagtctacatcgagaaatacattgtcccttatatgaaacagtatgaggcccacactttttacgatggccacgagaacatggctctttactggaaagattgctatgaggccctgatggttaacatgcataaacgggatagagagggaggggagagcaaactcaaatttcaagagctgttcgtagagcctttcaatcgaaaagctagacaagagaatcttcgatacaacaatatgcttaagcaactatccagccaacagctcgctaccttgagacgctggaaagctattcagctctacctcacctgcgaaaggggtccctgggccaagcgaaaacaaaaccccattcactggaagttggccaacgtggagaactattcaagaatgagattaaagcttgtgcctaactacaacttcaagacacatgaagaggcaagcgctctccgggacaatcttggcattcagcattcccagccgtcttcggatacattgctgttggaagttgtaaagcaggtaaaggtgtcagatatggtggaggataaactggatcttcctgaagaagacattaccgccagggttaacgttgatgaaaaagaagagcaggaccagaaggagaaactggtgcttatggaggattgcgagctgatcacgataatcgacgtcatcccagggaggttggaaattaccactcagcacatctacttctacgatgggtccattgaaaaagaagatggcgtgggatttgacttcaaatggcctcacagtcagatccgagagatccacctgcgaaggtataatctgaggcgaagtgcgcttgaaatctttcatgtagaccaatcaaactattttctgaatttcaagaaggaggttaggaataaaatatactcaaggctgttgagcctgcacagtcccaactcctattacggcagccgcagtccccaagagctttttaaggcctccggcttgacccagaagtgggtgaatcgagagatttccaattttgactaccttattcaaattaacactatggccggtcgaacatataacgatctggcccagtatccagtgttcccctggatcctgcaggactacaccagcgaggagctggatcttaataaccccgcagtgttccgggatttgtctaagccaattggggtggtcaacgagaaaaatgctaaagcaatgagggagaagtatgagaactttgaggatccaatgggaacaatcgataaatttcattatggcactcactattccaatagcgcaggtgtgatgcattacctcatcagggtggagccttttaccaccttgcatatccagctgcagagcgggaggtttgattgcgccgaccgtcagtttcactccatccccgcaacctggcaggcgcttatggataacccctatgacgtcaaggaattgattcctgaattcttttattttcctgagttcctcgagaatcagaatcagttcaacctgggaaggcttcaaatatccaaagaacttgttaatgatgttattctgccgaaatgggccaagtcagccgaggactttatctataagcataggaaagctctggaatccgagtacgtgtctgcccacttgcatgaatggatagacctcatcttcggatataagcaacgtggccctgctgccgtcgaggcactgaatgttttttactactgctcttatgagggtgcagtggacttagatgcactgacagacgaaaaggagcgtaaggctctcgagggaatgatcaacaatttcggccagaccccctgccagctcctgaaaataacaatttccatgaactatgttatcgggactcacggctggctcccctatgacagaaacatttctaactattttacttttataaaagatcagaccgttactaatcctaaaactcagcggtccattaatgggagtttcgctccaggactggagattacaagcaagctctttgtggtgtcacacgatgcaaaattactgttttccgccggttattgggacaatagcatccaggtcatgtccttgacaaagggaaagattatttctcatataatccgtcacatggacatcgttacctgcctcgccacagattactgcggcattcacttaattagcggtagtcgggacaccacttgtatgatctggcagattacccagcaaggcggtgttcccgtgggcctagccagcaagcctttccaaatcctgtatgggcacactaacgaagtgctgagcgtggggatttccacagagcttgatatggctgtgtccgggtctagggatgggactgtaattattcacacgatacccaatctggcaatttcttgggagggccatatcgtggtttattcctcgacagaggagaagactacgctcaaagacaaaaacgcgctccacctgttctcgatcaatggaaagtatctgggttcccagattctcaaagagcaggtaagcgacatatgtatcataggcgagcatattgttacaggatcaatccagggttttctatctatacgcgatctacattctctgaacctttcaataaaccctttggctatgcgcttacctatccattgtgtatgcgtgacaaaagaatacagtcatattctggtggggctggaagacgggaaacttattgttgtgggcgtgggcaagccagcggagatgcgatcagggcaactgtctcggaaattctggggcagcagcaaacggctgagccaaatctccgccggagaaacggagtacaacactcaggactcgaaata

SEQ ID NO: 42900 - DNA, 8084 bp, Artificial Sequence
  derived and/or modified sequence
atggcttcaagagaacggctctttgagttgtggatgctgtactgcaccaagaaggatcccgattatctcaagctgtggctggacacattcgtgtcgtcatacgaacagtttttggatgtggacttcgagaaactgccaacacgtgttgacgatatgccacctggtatctcactgctccccgacaatatcctgcaagtactccgcatccagctgctgcagtgcgtgcaaaaaatggcagacgggctagaagagcagcagcaagcgctgtccatcctcttagtcaagttttttatcattctctgtcgtaacctctcaaacgtggaagaaatcggtacttgcagttatattaactatgtcatcactatgaccaccctgtatatccagcagctcaaatccaagaagaaggaaaaagaaatggctgatcagacatgcattgaggaattcgttatccacgcactggctttttgtgagagcctttatgacccctataggaattggagacatcgcatcagcggacgcatcctgtcaactgtggagaagtcacggcaaaagtataagccagcatctctgaccgtggagtttgtgccgttcttctaccagtgttttcaagagagtgagcacctgaaggaatccctgaagtgctgtcttctccatctgttcggggcaatcgtcgccggaggccagcggaacgcattgcaggctatctcaccggcaactatggaggtcctaatgcgggtgctggccgactgcgatagttgggaagatggggacccagaggaggtgggacggaaagctgaactgaccttaaagtgtctcacggaggtggtgcacattttgctgtcctccaactccgaccagaggcaagtcgaaacttccactatcctagagaactactttaagttgctgaacagtgaccattccgcactgccaaatcagcggcgttcccggcaatgggagaatagattcattgctctacagatcaagatgctgaacaccattaccgcaatgctcgattgtactgatcggccagtactgcaggccatctttctgaactcaaactgttttgaacacctcatcaggttgctgcagaactgtaaggtgtttcagggtcagctggattgcctagccatcagcacgatacaggcgcttactgcggtcatgaacaagtcccccgcagccaaagaagtcttcaaagagcgcatcggatacacccatatgctagaggtcctaaaaagcctgggccaaccacctctggagctgctgaaggagttgatgaatatggctgttgagggggaccatacaagtgtcggaatcctgggcattagcaatgtccaacctttattactcctgattcagtggctaccggaactccaaagccacgatttgcagatctttatctcggactggctgaaacgcatttgctgcattaacagacagtcaagaaccacctgcgtgaatgcaaacatgggtatcaggatcattgaaacattagacctccattccagtttgcaccagacctgcgcggagaacctgatcgccattcatggttccctcggctcgcaatccgtctcctcggaagagatcagaaggctgcttcgccttctgcgggtggacgagagtgaaagcgtgcacccctatgtgacacccgtaacgagggcaatcctgactatggcccgaaagctcagccttgaatcagccctgcagtattttaacctttcccactccatggccggaatctccgtgccgccaatacagaagtggccaggttccgcctttagctttagtgcttggttttgtttggaccaggaccaactaacacttggtatagctaacaagggtggtaagaggaaacagctgtattcattcttcacagggagtgggatgggcttcgaagccttcattacgcatagtggcatgttagtcgtcgcagtctgcacgaagagagaatacgcaaccgtgatgctgcctgatcatagcttctgcgactcactatggcacaacatcacagtggtacacatgcccggaaaacgcccttttgggcaatccttcgtgtatatctatgataacggtcagcagaaagtttccgcccctctaaggttcccagccatgaacgaaccatttaccagctgctgtattggatcggccggacagcggaccacaacacctccaccctctcagattcccgacccaccgttttcatcacccatcactccacacaggacttcatttggcggaatcctgagttccgcatcttggggagggacgatcgaaaagtctaaacttattacaaagctgattagcgccggtacccaggacagtgagtgggggtgtccaaccagcctggaaggtcagttgggctcagtgatcattttttacgagcccttgcagccaccacaggtcaaagctctgtacctagctggtccaaattgcctctctccgtggaaatgccaggaatccgacatggctgatctgccaggcaatattctactatattacacggctaaggcttgcaagaattctatttgtctggacctctcaaccaattgtctgcacggaagactgactggtaataaggtggtgaattgggatatcaaggacataatcaattgcatcggaggcctgaacgttctattccccctgctggagcagatcagtcacttctccgaaggccagatccctgaagaaaagaacgagagtaccgttccggagtcagtaactcccgtggagggggactggctggtttggaccagtacaaaagcctcagagtcgagactcgaacggaatctcgttgcaacttttattctgattgttaaacattttattcaacggcatcccatcaaccaaggcaatttgatacactcccacggggtcgcaaccttgggagctttgctgcagaaggttccctcaacacttatggacgtgaatgtgttaatggccgtgcagttgttgatcgaacaggtctcactcgagaagaatatgcagctgttgcagcaaatgtaccagtatcttctcttcgactttaggatctggaacaggggtgactttccattcaggatcgggcacatccaatacttgtccactattatcaaagactcaagacgggtgttcagaaaaaaatacggtgtccaattcctccttgacacacttagaatttattatggcaacggctgcaaatataacgagctgtctctggacgacataaggacgataagaacgagcttgtacggtctcattaagtacttcttgtgtaagggcggttcccatgaggaaatccaatcaattatgggctacattgcagccactaacgaggaggagcaactgtttggcatactagacgtgctgttctcactcctcagaactagccctactcgcggacagctctttttgctcttgtttgagccaggcaatgcagacatcctgtatgcacttctgcttaatcaaaagtactcagatcggttgcgggagatcatttttaagatcatggaacagatgctcaagtgcacaaatgtgtacgaaagatctaagcaacatatccggctgagagaggttggctactctgggcttggcttacttctgaatgaagcgctggtgaacacaagtctgatcaaaaaccttactcatcagatcatcaacaccgaccccgtgataaacttcaaggacctactgtctgtcgtctacatcagtcatcgcgcacacataaatgtgcgcgtggcaatttgcaggaaagtgttacagatccttcagtttcagccagatgccgctcatcagatttctcagcaagtgggatggcaggacacgttagttagacttttcttgaaggcgaagttcgaaaatggcaacaccctccacaagcatagcagggcagtgctgatgaaagataacgacaaaaatatgtccacagaagatacgaaaaaaaactccgacgaaaaaaccgacgaggaaaagattacctcatttgcctctgctaacgtgagttctgatcaatggtcactggaagataggcatagcctggattctaatacaccgctcttcccggaagatagcagcgtcggagagttatctttcaagtcagaaaaccaagaggaattttggcactccaatccatctcatctgtccctcgatctgtcaggcatcgacagctgcgagatgtcagactcaggcagccaggttcctgactctttgccgtcgacccccagtcccgtggagtccactaagagcttctccgttcacagtgatagagagtcctctatcacaaatgatatgggctttagtgatgatttttccctgcttgagtcacaggaacgatgcgaggaggagctactgcagctgctaacccacatcctgaactatgtgatgtgtaagggactggagaagtcagatgatgatacatggattgagaggggacaggtgttcagcgctctgtctaagcccggaatttcatccgaattgctgcggccatccgacgagatcaagctgaccctgttgcagaagatgctcgaatgggccatttctgaaaatagggaggcaaagaccaaccccgttacggctgaaaatgcctttaggctcgtcttgataatacaagattttctccagagcgagggcctggtaaatagcaacatgtggacggagaaactgctcgaggatatgatgctactgtttgattgcctgagcgtttgctatagtgagtcccctgtttgggtcaagttgtctcagattcagattcagctgcttctgggctttatcggcagaggcaacctgcaagtctgcgcgatggcctccgctaaattaaacacactgctgcagacaaaagttattgaaaaccaggatgaggcctgttatattcttgggaagctggagcatgtcctcagccagagcattaaagaacaaacagaaatttactccttcctcattcctctcgtgaggacattggtgtccaagatatacgaattgctgttcatgaatctgcacctgccttctctcccatttaccaatggcagcagctccttttttgaggatttccaggagtactgcaacagcaatgagtggcaggtctacatcgagaaatacatcgtcccatatatgaagcaatacgaggctcacacgttttatgacggacacgagaatatggccctttattggaaagattgctacgaagccttgatggttaacatgcataagagagatagggaaggcggagaatcaaagctcaaattccaggagctcttcgtggagcccttcaatcgcaaagcgagacaggagaatcttagatacaataatatgctgaagcagctgtcctctcagcagctcgcgacccttaggcgctggaaggctatccaactgtacctgacctgcgagcgtgggccatgggccaaacggaaacaaaaccccattcattggaagcttgccaacgtagaaaactacagccggatgcggctcaaacttgtgcccaattataattttaagacccatgaagaggcctccgcactgcgagacaatctcggtattcagcatagtcagccatcctcggatacactgcttctggaagtcgtgaagcaggtgaaagtcagcgatatggtggaagataagctagacctgcctgaagaggacatcacagctcgagtgaatgtggatgagaaagaggaacaggaccagaaggaaaagctggtgctgatggaggactgtgagctgattaccatcatcgatgtgattcccggacggttggagattacaactcagcatatctatttttacgacggctcgattgagaaggaggatggagtcgggttcgacttcaagtggccacattctcagattagggagatccacctgcgacggtacaaccttaggcggtcagcgctagagatcttccacgttgaccagagtaactactttctgaactttaaaaaggaggtccgaaataagatttatagccgcttgcttagcttgcacagtcctaacagctattatgggtctagatctccacaggagctgttcaaggcatcaggcctaacacagaaatgggtgaatcgggaaatttccaatttcgattatcttatccagattaatactatggccggtcggacttacaacgatctagcacagtaccccgttttcccgtggattctgcaggactacacctctgaagagctcgacctgaataatcctgcagtattcagagatctcagtaagccaattggggtcgttaacgaaaagaatgcaaaggctatgagggaaaagtacgaaaacttcgaagacccgatggggaccattgacaagtttcactatggtactcattatagtaattccgcaggggtaatgcactatctcatcagagtggagccctttaccacacttcatatccagcttcagtcagggagatttgattgtgccgatcggcagttccacagcattcctgctacctggcaggcactgatggataatccctatgatgtgaaggaactaatacccgagtttttttattttccagaatttttagagaatcagaaccaatttaatcttgggcgactgcaaatttccaaagagctagtgaatgacgtgatcctgcctaagtgggccaaaagcgctgaggactttatttataagcatagaaaggcactggaatccgaatatgttagtgcccacctgcacgaatggatagatctcatcttcggctacaagcaaaggggccctgctgccgtggaagcactgaacgtcttctactactgctcttatgagggcgctgtggacctggacgcactcacagacgagaaagagagaaaagccctcgaaggcatgatcaataatttcggccagaccccctgtcagttattaaaggaacctcatccaccccgactttctgcggaggaagcagtccagaaacctaccaaaatcgatacttccacgctgaatttgtttcagcatctccccgagttgaaatcctttttcatagagggcatctcagatggcattccacttctgaaggctacaatcccaaaaaaccagtatcgcagtttcatgtcacagggatcccctgagcttcttatcacgatatcgatgaactacgtaattggaacccacggttggttaccctacgacaggaatattagtaactactttacctttatcaaagaccagacagtgacaaatcccaagacccagcgatccatcaacgggagtttcgctcccggactggagatcacatctaagctcttcgttgtgagccacgacgcgaagctcctgtttagtgctggatactgggacaactcaattcaagtgatgtctctgaccaagggcaagattatctctcacattattaggcacatggacatagttacttgtctggccaccgattactgcggaatccacctgattagtgggagccgtgacaccacctgtatgatttggcagatcactcagcagggtggtgtgcctgtgggcctggcctcaaagccctttcaaatcttgtatggccacacgaacgaagtcttatctgtgggtatttcaaccgaactggatatggcggtgagcgggagtcgagatggtacagttatcattcacaccattcagaagggacagtacatgagaaccttgcgtcccccttgcgagagcagtttattcctcacaatccctaacctcgctataagttgggaagggcacattgtggtgtattcaagcacggaggagaaaactactttgaaagacaaaaatgccttgcatctgttcagtataaacggaaaatatctggggtctcagatcttgaaggaacaagtgtcagatatatgtatcatcggcgagcatatcgtcacaggatctatccaaggattcctgtctatacgtgacctccatagtctgaacctcagcatcaacccattagccatgcggttgccaatccattgcgtatgcgtgacaaaggagtattctcacatactcgtaggcctggaagacgggaagctcattgttgttggcgtaggcaaacccgcagagatgcggtcgggacaactatctagaaagttctgggggagcagtaaacgtctttcccagatttcagctggagaaactgagtacaacacccaggatagtaaata

SEQ ID NO: 42901 - DNA, 7815 bp, Artificial Sequence
  derived and/or modified sequence
atggccagcagagagagactgttcgagctgtggatgctgtactgcaccaagaaggaccccgactacctgaagctgtggctggacaccttcgtgagcagctacgagcagttcctggacgtggacttcgagaagctgcccaccagagtggacgacatgccccccggcatcagcctgctgcccgacaacatcctgcaggtgctgagaatccagctgctgcagtgcgtgcagaagatggccgacggcctggaggagcagcagcaggccctgagcatcctgctggtgaagttcttcatcatcctgtgcagaaacctgagcaacgtggaggagatcggcacctgcagctacatcaactacgtgatcaccatgaccaccctgtacatccagcagctgaagagcaagaagaaggagaaggagatggccgaccagacctgcatcgaggagttcgtgatccacgccctggccttctgcgagagcctgtacgacccctacagaaactggagacacagaatcagcggcagaatcctgagcaccgtggagaagagcagacagaagtacaagcccgccagcctgaccgtggagttcgtgcccttcttctaccagtgcttccaggagagcgagcacctgaaggagagcctgaagtgctgcctgctgcacctgttcggcgccatcgtggccggcggccagagaaacgccctgcaggccatcagccccgccaccatggaggtgctgatgagagtgctggccgactgcgacagctgggaggacggcgaccccgaggaggtgggcagaaaggccgagctgaccctgaagtgcctgaccgaggtggtgcacatcctgctgagcagcaacagcgaccagagacaggtggagaccagcaccatcctggagaactacttcaagctgctgaacagcgaccacagcgccctgcccaaccagagaagaagcagacagtgggagaacagattcatcgccctgcagatcaagatgctgaacaccatcaccgccatgctggactgcaccgacagacccgtgctgcaggccatcttcctgaacagcaactgcttcgagcacctgatcagactgctgcagaactgcaaggtgttccagggccagctggactgcctggccatcagcaccatccaggccctgaccgccgtgatgaacaagagccccgccgccaaggaggtgttcaaggagagaatcggctacacccacatgctggaggtgctgaagagcctgggccagccccccctggagctgctgaaggagctgatgaacatggccgtggagggcgaccacaccagcgtgggcatcctgggcatcagcaacgtgcagcccctgctgctgctgatccagtggctgcccgagctgcagagccacgacctgcagatcttcatcagcgactggctgaagagaatctgctgcatcaacagacagagcagaaccacctgcgtgaacgccaacatgggcatcagaatcatcgagaccctggacctgcacagcagcctgcaccagacctgcgccgagaacctgatcgccatccacggcagcctgggcagccagagcgtgagcagcgaggagatcagaagactgctgagactgctgagagtggacgagagcgagagcgtgcacccctacgtgacccccgtgaccagagccatcctgaccatggccagaaagctgagcctggagagcgccctgcagtacttcaacctgagccacagcatggccggcatcagcgtgccccccatccagaagtggcccggcagcgccttcagcttcagcgcctggttctgcctggaccaggaccagctgaccctgggcatcgccaacaagggcggcaagagaaagcagctgtacagcttcttcaccggcagcggcatgggcttcgaggccttcatcacccacagcggcatgctggtggtggccgtgtgcaccaagagagagtacgccaccgtgatgctgcccgaccacagcttctgcgacagcctgtggcacaacatcaccgtggtgcacatgcccggcaagagacccttcggccagagcttcgtgtacatctacgacaacggccagcagaaggtgagcgcccccctgagattccccgccatgaacgagcccttcaccagctgctgcatcggcagcgccggccagagaaccaccacccccccccccagccagatccccgacccccccttcagcagccccatcaccccccacagaaccagcttcggcggcatcctgagcagcgccagctggggcggcaccatcgagaagagcaagctgatcaccaagctgatcagcgccggcacccaggacagcgagtggggctgccccaccagcctggagggccagctgggcagcgtgatcatcttctacgagcccctgcagcccccccaggtgaaggccctgtacctggccggccccaactgcctgagcccctggaagtgccaggagagcgacatggccgacctgcccggcaacatcctgctgtactacaccgccaaggcctgcaagaacagcatctgcctggacctgagcaccaactgcctgcacggcagactgaccggcaacaaggtggtgaactgggacatcaaggacatcatcaactgcatcggcggcctgaacgtgctgttccccctgctggagcagatcagccacttcagcgagggccagatccccgaggagaagaacgagagcaccgtgcccgagagcgtgacccccgtggagggcgactggctggtgtggaccagcaccaaggccagcgagagcagactggagagaaacctggtggccaccttcatcctgatcgtgaagcacttcatccagagacaccccatcaaccagggcaacctgatccacagccacggcgtggccaccctgggcgccctgctgcagaaggtgcccagcaccctgatggacgtgaacgtgctgatggccgtgcagctgctgatcgagcaggtgagcctggagaagaacatgcagctgctgcagcagatgtaccagtacctgctgttcgacttcagaatctggaacagaggcgacttccccttcagaatcggccacatccagtacctgagcaccatcatcaaggacagcagaagagtgttcagaaagaagtacggcgtgcagttcctgctggacaccctgagaatctactacggcaacggctgcaagtacaacgagctgagcctggacgacatcagaaccatcagaaccagcctgtacggcctgatcaagtacttcctgtgcaagggcggcagccacgaggagatccagagcatcatgggctacatcgccgccaccaacgaggaggagcagctgttcggcatcctggacgtgctgttcagcctgctgagaaccagccccaccagaggccagctgttcctgctgctgttcgagcccggcaacgccgacatcctgtacgccctgctgctgaaccagaagtacagcgacagactgagagagatcatcttcaagatcatggagcagatgctgaagtgcaccaacgtgtacgagagaagcaagcagcacatcagactgagagaggtgggctacagcggcctgggcctgctgctgaacgaggccctggtgaacaccagcctgatcaagaacctgacccaccagatcatcaacaccgaccccgtgatcaacttcaaggacctgctgagcgtggtgtacatcagccacagagcccacatcaacgtgagagtggccatctgcagaaaggtgctgcagatcctgcagttccagcccgacgccgcccaccagatcagccagcaggtgggctggcaggacaccctggtgagactgttcctgaaggccaagttcgagaacggcaacaccctgcacaagcacagcagagccgtgctgatgaaggacaacgacaagaacatgagcaccgaggacaccaagaagaacagcgacgagaagaccgacgaggagaagatcaccagcttcgccagcgccaacgtgagcagcgaccagtggagcctggaggacagacacagcctggacagcaacacccccctgttccccgaggacagcagcgtgggcgagctgagcttcaagagcgagaaccaggaggagttctggcacagcaaccccagccacctgagcctggacctgagcggcatcgacagctgcgagatgagcgacagcggcagccaggtgcccgacagcctgcccagcacccccagccccgtggagagcaccaagagcttcagcgtgcacagcgacagagagagcagcatcaccaacgacatgggcttcagcgacgacttcagcctgctggagagccaggagagatgcgaggaggagctgctgcagctgctgacccacatcctgaactacgtgatgtgcaagggcctggagaagagcgacgacgacacctggatcgagagaggccaggtgttcagcgccctgagcaagcccggcatcagcagcgagctgctgagacccagcgacgagatcaagctgaccctgctgcagaagatgctggagtgggccatcagcgagaacagagaggccaagaccaaccccgtgaccgccgagaacgccttcagactggtgctgatcatccaggacttcctgcagagcgagggcctggtgaacagcaacatgtggaccgagaagctgctggaggacatgatgctgctgttcgactgcctgagcgtgtgctacagcgagagccccgtgtgggtgaagctgagccagatccagatccagctgctgctgggcttcatcggcagaggcaacctgcaggtgtgcgccatggccagcgccaagctgaacaccctgctgcagaccaaggtgatcgagaaccaggacgaggcctgctacatcctgggcaagctggagcacgtgctgagccagagcatcaaggagcagaccgagatctacagcttcctgatccccctggtgagaaccctggtgagcaagatctacgagctgctgttcatgaacctgcacctgcccagcctgcccttcaccaacggcagcagcagcttcttcgaggacttccaggagtactgcaacagcaacgagtggcaggtgtacatcgagaagtacatcgtgccctacatgaagcagtacgaggcccacaccttctacgacggccacgagaacatggccctgtactggaaggactgctacgaggccctgatggtgaacatgcacaagagagacagagagggcggcgagagcaagctgaagttccaggagctgttcgtggagcccttcaacagaaaggccagacaggagaacctgagatacaacaacatgctgaagcagctgagcagccagcagctggccaccctgagaagatggaaggccatccagctgtacctgacctgcgagagaggcccctgggccaagagaaagcagaaccccatccactggaagctggccaacgtggagaactacagcagaatgagactgaagctggtgcccaactacaacttcaagacccacgaggaggccagcgccctgagagacaacctgggcatccagcacagccagcccagcagcgacaccctgctgctggaggtggtgaagcaggtgaaggtgagcgacatggtggaggacaagctggacctgcccgaggaggacatcaccgccagagtgaacgtggacgagaaggaggagcaggaccagaaggagaagctggtgctgatggaggactgcgagctgatcaccatcatcgacgtgatccccggcagactggagatcaccacccagcacatctacttctacgacggcagcatcgagaaggaggacggcgtgggcttcgacttcaagtggccccacagccagatcagagagatccacctgagaagatacaacctgagaagaagcgccctggagatcttccacgtggaccagagcaactacttcctgaacttcaagaaggaggtgagaaacaagatctacagcagactgctgagcctgcacagccccaacagctactacggcagcagaagcccccaggagctgttcaaggccagcggcctgacccagaagtgggtgaacagagagatcagcaacttcgactacctgatccagatcaacaccatggccggcagaacctacaacgacctggcccagtaccccgtgttcccctggatcctgcaggactacaccagcgaggagctggacctgaacaaccccgccgtgttcagagacctgagcaagcccatcggcgtggtgaacgagaagaacgccaaggccatgagagagaagtacgagaacttcgaggaccccatgggcaccatcgacaagttccactacggcacccactacagcaacagcgccggcgtgatgcactacctgatcagagtggagcccttcaccaccctgcacatccagctgcagagcggcagattcgactgcgccgacagacagttccacagcatccccgccacctggcaggccctgatggacaacccctacgacgtgaaggagctgatccccgagttcttctacttccccgagttcctggagaaccagaaccagttcaacctgggcagactgcagatcagcaaggagctggtgaacgacgtgatcctgcccaagtgggccaagagcgccgaggacttcatctacaagcacagaaaggccctggagagcgagtacgtgagcgcccacctgcacgagtggatcgacctgatcttcggctacaagcagagaggccccgccgccgtggaggccctgaacgtgttctactactgcagctacgagggcgccgtggacctggacgccctgaccgacgagaaggagagaaaggccctggagggcatgatcaacaacttcggccagaccccctgccagctgctgaagatcaccatcagcatgaactacgtgatcggcacccacggctggctgccctacgacagaaacatcagcaactacttcaccttcatcaaggaccagaccgtgaccaaccccaagacccagagaagcatcaacggcagcttcgcccccggcctggagatcaccagcaagctgttcgtggtgagccacgacgccaagctgctgttcagcgccggctactgggacaacagcatccaggtgatgagcctgaccaagggcaagatcatcagccacatcatcagacacatggacatcgtgacctgcctggccaccgactactgcggcatccacctgatcagcggcagcagagacaccacctgcatgatctggcagatcacccagcagggcggcgtgcccgtgggcctggccagcaagcccttccagatcctgtacggccacaccaacgaggtgctgagcgtgggcatcagcaccgagctggacatggccgtgagcggcagcagagacggcaccgtgatcatccacaccatccccaacctggccatcagctgggagggccacatcgtggtgtacagcagcaccgaggagaagaccaccctgaaggacaagaacgccctgcacctgttcagcatcaacggcaagtacctgggcagccagatcctgaaggagcaggtgagcgacatctgcatcatcggcgagcacatcgtgaccggcagcatccagggcttcctgagcatcagagacctgcacagcctgaacctgagcatcaaccccctggccatgagactgcccatccactgcgtgtgcgtgaccaaggagtacagccacatcctggtgggcctggaggacggcaagctgatcgtggtgggcgtgggcaagcccgccgagatgagaagcggccagctgagcagaaagttctggggcagcagcaagagactgagccagatcagcgccggcgagaccgagtacaacacccaggacagcaagtag

SEQ ID NO: 42902 - DNA, 8085 bp, Artificial Sequence
  derived and/or modified sequence
atggccagcagagagagactgttcgagctgtggatgctgtactgcaccaagaaggaccccgactacctgaagctgtggctggacaccttcgtgagcagctacgagcagttcctggacgtggacttcgagaagctgcccaccagagtggacgacatgccccccggcatcagcctgctgcccgacaacatcctgcaggtgctgagaatccagctgctgcagtgcgtgcagaagatggccgacggcctggaggagcagcagcaggccctgagcatcctgctggtgaagttcttcatcatcctgtgcagaaacctgagcaacgtggaggagatcggcacctgcagctacatcaactacgtgatcaccatgaccaccctgtacatccagcagctgaagagcaagaagaaggagaaggagatggccgaccagacctgcatcgaggagttcgtgatccacgccctggccttctgcgagagcctgtacgacccctacagaaactggagacacagaatcagcggcagaatcctgagcaccgtggagaagagcagacagaagtacaagcccgccagcctgaccgtggagttcgtgcccttcttctaccagtgcttccaggagagcgagcacctgaaggagagcctgaagtgctgcctgctgcacctgttcggcgccatcgtggccggcggccagagaaacgccctgcaggccatcagccccgccaccatggaggtgctgatgagagtgctggccgactgcgacagctgggaggacggcgaccccgaggaggtgggcagaaaggccgagctgaccctgaagtgcctgaccgaggtggtgcacatcctgctgagcagcaacagcgaccagagacaggtggagaccagcaccatcctggagaactacttcaagctgctgaacagcgaccacagcgccctgcccaaccagagaagaagcagacagtgggagaacagattcatcgccctgcagatcaagatgctgaacaccatcaccgccatgctggactgcaccgacagacccgtgctgcaggccatcttcctgaacagcaactgcttcgagcacctgatcagactgctgcagaactgcaaggtgttccagggccagctggactgcctggccatcagcaccatccaggccctgaccgccgtgatgaacaagagccccgccgccaaggaggtgttcaaggagagaatcggctacacccacatgctggaggtgctgaagagcctgggccagccccccctggagctgctgaaggagctgatgaacatggccgtggagggcgaccacaccagcgtgggcatcctgggcatcagcaacgtgcagcccctgctgctgctgatccagtggctgcccgagctgcagagccacgacctgcagatcttcatcagcgactggctgaagagaatctgctgcatcaacagacagagcagaaccacctgcgtgaacgccaacatgggcatcagaatcatcgagaccctggacctgcacagcagcctgcaccagacctgcgccgagaacctgatcgccatccacggcagcctgggcagccagagcgtgagcagcgaggagatcagaagactgctgagactgctgagagtggacgagagcgagagcgtgcacccctacgtgacccccgtgaccagagccatcctgaccatggccagaaagctgagcctggagagcgccctgcagtacttcaacctgagccacagcatggccggcatcagcgtgccccccatccagaagtggcccggcagcgccttcagcttcagcgcctggttctgcctggaccaggaccagctgaccctgggcatcgccaacaagggcggcaagagaaagcagctgtacagcttcttcaccggcagcggcatgggcttcgaggccttcatcacccacagcggcatgctggtggtggccgtgtgcaccaagagagagtacgccaccgtgatgctgcccgaccacagcttctgcgacagcctgtggcacaacatcaccgtggtgcacatgcccggcaagagacccttcggccagagcttcgtgtacatctacgacaacggccagcagaaggtgagcgcccccctgagattccccgccatgaacgagcccttcaccagctgctgcatcggcagcgccggccagagaaccaccacccccccccccagccagatccccgacccccccttcagcagccccatcaccccccacagaaccagcttcggcggcatcctgagcagcgccagctggggcggcaccatcgagaagagcaagctgatcaccaagctgatcagcgccggcacccaggacagcgagtggggctgccccaccagcctggagggccagctgggcagcgtgatcatcttctacgagcccctgcagcccccccaggtgaaggccctgtacctggccggccccaactgcctgagcccctggaagtgccaggagagcgacatggccgacctgcccggcaacatcctgctgtactacaccgccaaggcctgcaagaacagcatctgcctggacctgagcaccaactgcctgcacggcagactgaccggcaacaaggtggtgaactgggacatcaaggacatcatcaactgcatcggcggcctgaacgtgctgttccccctgctggagcagatcagccacttcagcgagggccagatccccgaggagaagaacgagagcaccgtgcccgagagcgtgacccccgtggagggcgactggctggtgtggaccagcaccaaggccagcgagagcagactggagagaaacctggtggccaccttcatcctgatcgtgaagcacttcatccagagacaccccatcaaccagggcaacctgatccacagccacggcgtggccaccctgggcgccctgctgcagaaggtgcccagcaccctgatggacgtgaacgtgctgatggccgtgcagctgctgatcgagcaggtgagcctggagaagaacatgcagctgctgcagcagatgtaccagtacctgctgttcgacttcagaatctggaacagaggcgacttccccttcagaatcggccacatccagtacctgagcaccatcatcaaggacagcagaagagtgttcagaaagaagtacggcgtgcagttcctgctggacaccctgagaatctactacggcaacggctgcaagtacaacgagctgagcctggacgacatcagaaccatcagaaccagcctgtacggcctgatcaagtacttcctgtgcaagggcggcagccacgaggagatccagagcatcatgggctacatcgccgccaccaacgaggaggagcagctgttcggcatcctggacgtgctgttcagcctgctgagaaccagccccaccagaggccagctgttcctgctgctgttcgagcccggcaacgccgacatcctgtacgccctgctgctgaaccagaagtacagcgacagactgagagagatcatcttcaagatcatggagcagatgctgaagtgcaccaacgtgtacgagagaagcaagcagcacatcagactgagagaggtgggctacagcggcctgggcctgctgctgaacgaggccctggtgaacaccagcctgatcaagaacctgacccaccagatcatcaacaccgaccccgtgatcaacttcaaggacctgctgagcgtggtgtacatcagccacagagcccacatcaacgtgagagtggccatctgcagaaaggtgctgcagatcctgcagttccagcccgacgccgcccaccagatcagccagcaggtgggctggcaggacaccctggtgagactgttcctgaaggccaagttcgagaacggcaacaccctgcacaagcacagcagagccgtgctgatgaaggacaacgacaagaacatgagcaccgaggacaccaagaagaacagcgacgagaagaccgacgaggagaagatcaccagcttcgccagcgccaacgtgagcagcgaccagtggagcctggaggacagacacagcctggacagcaacacccccctgttccccgaggacagcagcgtgggcgagctgagcttcaagagcgagaaccaggaggagttctggcacagcaaccccagccacctgagcctggacctgagcggcatcgacagctgcgagatgagcgacagcggcagccaggtgcccgacagcctgcccagcacccccagccccgtggagagcaccaagagcttcagcgtgcacagcgacagagagagcagcatcaccaacgacatgggcttcagcgacgacttcagcctgctggagagccaggagagatgcgaggaggagctgctgcagctgctgacccacatcctgaactacgtgatgtgcaagggcctggagaagagcgacgacgacacctggatcgagagaggccaggtgttcagcgccctgagcaagcccggcatcagcagcgagctgctgagacccagcgacgagatcaagctgaccctgctgcagaagatgctggagtgggccatcagcgagaacagagaggccaagaccaaccccgtgaccgccgagaacgccttcagactggtgctgatcatccaggacttcctgcagagcgagggcctggtgaacagcaacatgtggaccgagaagctgctggaggacatgatgctgctgttcgactgcctgagcgtgtgctacagcgagagccccgtgtgggtgaagctgagccagatccagatccagctgctgctgggcttcatcggcagaggcaacctgcaggtgtgcgccatggccagcgccaagctgaacaccctgctgcagaccaaggtgatcgagaaccaggacgaggcctgctacatcctgggcaagctggagcacgtgctgagccagagcatcaaggagcagaccgagatctacagcttcctgatccccctggtgagaaccctggtgagcaagatctacgagctgctgttcatgaacctgcacctgcccagcctgcccttcaccaacggcagcagcagcttcttcgaggacttccaggagtactgcaacagcaacgagtggcaggtgtacatcgagaagtacatcgtgccctacatgaagcagtacgaggcccacaccttctacgacggccacgagaacatggccctgtactggaaggactgctacgaggccctgatggtgaacatgcacaagagagacagagagggcggcgagagcaagctgaagttccaggagctgttcgtggagcccttcaacagaaaggccagacaggagaacctgagatacaacaacatgctgaagcagctgagcagccagcagctggccaccctgagaagatggaaggccatccagctgtacctgacctgcgagagaggcccctgggccaagagaaagcagaaccccatccactggaagctggccaacgtggagaactacagcagaatgagactgaagctggtgcccaactacaacttcaagacccacgaggaggccagcgccctgagagacaacctgggcatccagcacagccagcccagcagcgacaccctgctgctggaggtggtgaagcaggtgaaggtgagcgacatggtggaggacaagctggacctgcccgaggaggacatcaccgccagagtgaacgtggacgagaaggaggagcaggaccagaaggagaagctggtgctgatggaggactgcgagctgatcaccatcatcgacgtgatccccggcagactggagatcaccacccagcacatctacttctacgacggcagcatcgagaaggaggacggcgtgggcttcgacttcaagtggccccacagccagatcagagagatccacctgagaagatacaacctgagaagaagcgccctggagatcttccacgtggaccagagcaactacttcctgaacttcaagaaggaggtgagaaacaagatctacagcagactgctgagcctgcacagccccaacagctactacggcagcagaagcccccaggagctgttcaaggccagcggcctgacccagaagtgggtgaacagagagatcagcaacttcgactacctgatccagatcaacaccatggccggcagaacctacaacgacctggcccagtaccccgtgttcccctggatcctgcaggactacaccagcgaggagctggacctgaacaaccccgccgtgttcagagacctgagcaagcccatcggcgtggtgaacgagaagaacgccaaggccatgagagagaagtacgagaacttcgaggaccccatgggcaccatcgacaagttccactacggcacccactacagcaacagcgccggcgtgatgcactacctgatcagagtggagcccttcaccaccctgcacatccagctgcagagcggcagattcgactgcgccgacagacagttccacagcatccccgccacctggcaggccctgatggacaacccctacgacgtgaaggagctgatccccgagttcttctacttccccgagttcctggagaaccagaaccagttcaacctgggcagactgcagatcagcaaggagctggtgaacgacgtgatcctgcccaagtgggccaagagcgccgaggacttcatctacaagcacagaaaggccctggagagcgagtacgtgagcgcccacctgcacgagtggatcgacctgatcttcggctacaagcagagaggccccgccgccgtggaggccctgaacgtgttctactactgcagctacgagggcgccgtggacctggacgccctgaccgacgagaaggagagaaaggccctggagggcatgatcaacaacttcggccagaccccctgccagctgctgaaggagccccacccccccagactgagcgccgaggaggccgtgcagaagcccaccaagatcgacaccagcaccctgaacctgttccagcacctgcccgagctgaagagcttcttcatcgagggcatcagcgacggcatccccctgctgaaggccaccatccccaagaaccagtacagaagcttcatgagccagggcagccccgagctgctgatcaccatcagcatgaactacgtgatcggcacccacggctggctgccctacgacagaaacatcagcaactacttcaccttcatcaaggaccagaccgtgaccaaccccaagacccagagaagcatcaacggcagcttcgcccccggcctggagatcaccagcaagctgttcgtggtgagccacgacgccaagctgctgttcagcgccggctactgggacaacagcatccaggtgatgagcctgaccaagggcaagatcatcagccacatcatcagacacatggacatcgtgacctgcctggccaccgactactgcggcatccacctgatcagcggcagcagagacaccacctgcatgatctggcagatcacccagcagggcggcgtgcccgtgggcctggccagcaagcccttccagatcctgtacggccacaccaacgaggtgctgagcgtgggcatcagcaccgagctggacatggccgtgagcggcagcagagacggcaccgtgatcatccacaccatccagaagggccagtacatgagaaccctgagacccccctgcgagagcagcctgttcctgaccatccccaacctggccatcagctgggagggccacatcgtggtgtacagcagcaccgaggagaagaccaccctgaaggacaagaacgccctgcacctgttcagcatcaacggcaagtacctgggcagccagatcctgaaggagcaggtgagcgacatctgcatcatcggcgagcacatcgtgaccggcagcatccagggcttcctgagcatcagagacctgcacagcctgaacctgagcatcaaccccctggccatgagactgcccatccactgcgtgtgcgtgaccaaggagtacagccacatcctggtgggcctggaggacggcaagctgatcgtggtgggcgtgggcaagcccgccgagatgagaagcggccagctgagcagaaagttctggggcagcagcaagagactgagccagatcagcgccggcgagaccgagtacaacacccaggacagcaagtag

SEQ ID NO: 42903 - protein, 619 aa, Artificial Sequence
  derived and/or modified sequence
MGQALGIKSCDFQAARNNEEHHTKALSSRRLFVRRGQPFTIILYFRAPVRAFLPALKKVALTAQTGEQPSKINRTQATFPISSLGDRKWWSAVVEERDAQSWTISVTTPADAVIGHYSLLLQVSGRKQLLLGQFTLLFNPWNREDAVFLKNEAQRMEYLLNQNGLIYLGTADCIQAESWDFGQFEGDVIDLSLRLLSKDKQVEKWSQPVHVARVLGALLHFLKEQRVLPTPQTQATQEGALLNKRRGSVPILRQWLTGRGRPVYDGQAWVLAAVACTVLRCLGIPARVVTTFASAQGTGGRLLIDEYYNEEGLQNGEGQRGRIWKCCEDGTLELTDSNTKYVGNNISTKGVGSDRCEDITQNYKYPEGSLQEKEVLERVEKEKMEREKDNGIRPPSLETASPLYLLLKAPSSLPLRGDAQISVTLVNHSEQEKAVQLAIGVQAVHYNGVLAAKLWRKKLHLTLSANLEKIITIGLFFSNFERNPPENTFLRLTAMATHSESNLSCFAQEDIAICRPHLAIKMPEKAEQYQPLTASVSLQNSLDAPMEDCVISILGRGLIHRERSYRFRSVWPENTMCAKFQFTPTHVGLQRLTVEVDCNMFQNLTNYKSVTVVAPELSA

SEQ ID NO: 42904 - protein, 691 aa, Artificial Sequence
  derived and/or modified sequence
MGQALGIKSCDFQAARNNEEHHTKALSSRRLFVRRGQPFTIILYFRAPVRAFLPALKKVALTAQTGEQPSKINRTQATFPISSLGDRKWWSAVVEERDAQSWTISVTTPADAVIGHYSLLLQVSGRKQLLLGQFTLLFNPWNREDAVFLKNEAQRMEYLLNQNGLIYLGTADCIQAESWDFGQFEGDVIDLSLRLLSKDKQVEKWSQPVHVARVLGALLHFLKEQRVLPTPQTQATQEGALLNKRRGSVPILRQWLTGRGRPVYDGQAWVLAAVACTVLRCLGIPARVVTTFASAQGTGGRLLIDEYYNEEGLQNGEGQRGRIWIFQTSTECWMTRPALPQGYDGWQILHPSAPNGGGVLGSCDLVPVRAVKEGTLGLTPAVSDLFAAINASCVVWKCCEDGTLELTDSNTKYVGNNISTKGVGSDRCEDITQNYKYPEGSLQEKEVLERVEKEKMEREKDNGIRPPSLETASPLYLLLKAPSSLPLRGDAQISVTLVNHSEQEKAVQLAIGVQAVHYNGVLAAKLWRKKLHLTLSANLEKIITIGLFFSNFERNPPENTFLRLTAMATHSESNLSCFAQEDIAICRPHLAIKMPEKAEQYQPLTASVSLQNSLDAPMEDCVISILGRGLIHRERSYRFRSVWPENTMCAKFQFTPTHVGLQRLTVEVDCNMFQNLTNYKSVTVVAPELSA

SEQ ID NO: 42905 - DNA, 1860 bp, Artificial Sequence
  derived and/or modified sequence
atggggcaggcactagggattaagtcttgtgatttccaggctgcccggaataatgaagaacaccacaccaaagccttaagttctcgtcgtctgtttgtccggagaggccaacccttcaccatcatcctctacttccgggcacccgtaagagccttcttacccgctttgaagaaagtagcactgaccgcccagacaggagagcagccctctaaaatcaacagaacccaggccacatttccgatttcatcattgggggataggaagtggtggtcggccgtggtggaagagagagatgcacaaagctggacaatttccgtgacaacaccagccgatgcagtgatcggacactatagtctgctgctgcaggtgtccggtagaaagcagctgctactggggcaattcacactgctgttcaatccttggaaccgggaagacgccgttttcttgaagaacgaggcgcagcggatggagtatctgctgaatcaaaatggcctgatctacttggggactgccgattgtatccaggccgagtcgtgggatttcggtcagttcgagggtgatgttatcgacctttctttacgcctgctgtccaaggacaagcaggtggagaaatggagtcagcctgtgcatgttgctcgagtgctcggcgcactgctgcacttcctgaaagagcagagagttctgcccaccccccagacccaggctactcaggaaggagcgctcttgaacaagcgaagaggcagcgtgcctatcctgaggcagtggctaactgggcgaggtaggccggtgtacgatggtcaggcttgggtcctggctgcagtggcgtgtactgtccttaggtgccttggcatccccgcccgcgtggttaccactttcgcatctgctcaggggactggcggaaggcttctgatcgatgagtattacaacgaagagggcctccagaatggagagggacaacggggccggatctggaagtgctgcgaagatggcaccttagagctgaccgattctaataccaaatatgttggaaacaacatttccacgaagggtgtcgggagcgataggtgcgaggatatcactcagaactacaagtatccagagggctccctgcaagagaaggaggtgctggaacgtgtggaaaaagagaaaatggaacgcgagaaagataatggaatccggccgccttcactggagacagcctcccctctgtacctgttattgaaagctccatcatctcttccactaagaggggatgcacaaatttccgttacactggttaatcactctgagcaagaaaaggctgtccagcttgcaatcggagtgcaagctgtccactataatggcgtgctagccgcgaaactgtggaggaaaaagcttcacctgacactgtccgctaacctggaaaagattattaccataggcctctttttcagcaacttcgaacgcaatcctccagagaatacgttcctccggctgactgccatggcaacccattcagagtcaaatctctcatgttttgcccaggaagatatcgcaatctgcaggcctcacttagcaattaagatgccagagaaggccgaacagtatcagcccttgaccgcctctgtgtcacttcaaaactctctggatgcaccaatggaagattgcgtcattagcatccttggccggggtctcatccaccgcgaacgcagttacagatttaggtctgtgtggccagaaaacaccatgtgcgctaaattccagttcacacccacccacgtcggcctgcagcggctcaccgttgaagtggactgcaacatgttccaaaacttgacgaactacaaatcggtgaccgtggtggcccctgaattgagcgcctag

SEQ ID NO: 42906 - DNA, 2076 bp, Artificial Sequence
  derived and/or modified sequence
atgggccaggctctgggaatcaaatcatgtgattttcaggcagctcgaaacaacgaagaacaccatactaaggctctgagcagccgcagactctttgtacgccgagggcagccattcactataatcctgtattttcgcgctcctgttagagcttttctccccgctctcaaaaaggttgctctgacggcccaaacaggagagcagcctagcaagatcaatcggacccaggcaacctttcccatttcatccctgggtgataggaagtggtggagcgctgtagtcgaagagagggacgcccagagttggaccattagcgtgaccacccccgctgatgcagtgataggtcactatagcctattactacaggtctctggtcgcaagcagctcctactgggtcaattcacccttttgttcaatccatggaatcgtgaagacgcagtgtttctgaagaacgaggctcagcggatggaatacctcttaaatcaaaacgggttgatctatctggggacggcagactgtatccaggccgaatcttgggattttggacagtttgaaggtgacgtaatagacctgtccctgcgcctgctctcaaaagacaaacaggtggagaaatggagtcagcctgtgcacgtggctagggtgcttggtgctctcctacactttctgaaagaacagagagtgctaccgaccccgcaaacgcaggccacccaggaaggagccctgctgaacaaacgccgagggtcagtcccaattttgagacaatggttaactggcaggggacgcccagtatatgacgggcaggcctgggtgctagccgccgtggcctgtactgttctgcggtgcctgggtatcccagctagagtagtgaccaccttcgcatctgcccagggaaccggtggacgactgcttattgacgagtattacaacgaggaggggctgcagaacggagaaggacagaggggaaggatatggatctttcagacaagtactgaatgttggatgacccgcccggcccttccacagggctacgacggctggcaaatactgcaccccagtgcccccaatggaggtggtgtgctcggatcctgtgacttagttccggtaagagctgtcaaggaaggaacgttgggtctaaccccagctgtatcggacctctttgctgccatcaatgccagttgcgtagtctggaagtgctgcgaagacggcacactagaactaactgattcaaacacgaagtatgtagggaataacattagtactaaaggcgtggggagcgatagatgtgaagacattacccagaactacaagtacccggaaggctcattgcaggagaaggaggtgctggaacgcgtcgagaaggaaaaaatggaaagggagaaggataacggcatcagaccgccctctttggaaacagcctcccctctatacttgctgctcaaggctccaagtagtctgccgctgaggggggacgcgcaaatcagtgtgactctcgtcaaccattctgagcaggagaaagctgttcaactggccattggtgtgcaggccgtacattataatggcgtcctcgccgccaagctgtggcgcaagaaactgcatttaactctgagcgccaatctggaaaagatcatcacgatagggttattcttcagcaacttcgagaggaatccaccagaaaacaccttcttaagactgacggcgatggccacccattccgagtctaatctgtcatgtttcgcacaagaggatattgcaatctgcaggcctcatctcgcaattaagatgccagagaaggccgagcagtatcagcccctgacggcctctgtcagcctccaaaacagcttggacgcaccgatggaagactgcgtgatttcgattctgggccgcggcctgattcaccgtgagaggtcgtataggttcagatctgtatggcccgaaaacactatgtgtgcaaaattccaattcaccccaacccatgtcggcctccaaagattaaccgtcgaggtagattgcaacatgtttcaaaaccttaccaactacaaatccgttacagtcgttgcccctgagctgtccgcttag

SEQ ID NO: 42907 - DNA, 1860 bp, Artificial Sequence
  derived and/or modified sequence
atgggccaggccctgggcatcaagagctgtgacttccaggccgccaggaacaatgaggagcaccacaccaaggccctgagcagcagaagactctttgtgcggcggggccagcccttcaccatcatcctgtacttccgggcccctgtgcgggccttcctgcctgccctgaagaaggtggccctgacagcccagacaggagagcagcccagcaagatcaacagaacccaggccaccttccccatcagcagcctgggggacaggaagtggtggagcgctgtggtggaggagagagatgcccagagctggaccatctctgtgaccaccccagcagatgctgtgattggccactacagcctgctgctgcaggtgtctggcaggaagcagctgctgctgggccagttcaccctgctcttcaacccctggaaccgggaggatgctgtgttcctgaagaatgaggcccagaggatggagtacctgctgaaccagaatggcctcatctacctgggcacagctgactgcatccaggccgagagctgggactttggccagtttgaaggagatgtgattgacctgagcctgcggctgctgagcaaggacaagcaggtggagaagtggagccagcctgtgcacgtggcccgggtgctgggcgccctgctgcacttcctgaaggagcagagggtgctgcccaccccccagacccaggccacccaggagggcgccctgctgaacaagagaagaggctctgtgcccatcctgcggcagtggctgaccggccggggccggcctgtgtatgatggccaggcctgggtgctggccgctgtggcctgcaccgtgctgcgctgcctgggcatcccagcccgggtggtgaccacctttgccagcgcccagggcaccggcggccgcctgctgattgatgagtactacaatgaggagggcctgcagaatggagagggccagaggggccgcatctggaagtgctgtgaagatggcaccctggagctgacagacagcaacaccaagtatgtgggcaacaacatcagcaccaagggcgtgggcagtgacagatgtgaggacatcacccagaactacaagtacccagagggcagcctgcaggagaaggaggtgctggagcgggtggagaaggagaagatggagcgggagaaggacaatggcatccggccccccagcctggagacagccagccccctgtacctgctgctgaaggcccccagcagcctgcccctgcggggagatgcccagatctctgtgaccctggtgaaccacagcgagcaggagaaggctgtgcagctggccatcggcgtgcaggccgtgcactacaatggagtgctggccgccaagctgtggaggaagaagctgcacctgaccctgagcgccaacctggagaagatcatcaccatcggcctcttcttcagcaactttgagaggaaccccccagagaacaccttcctgcggctgacagccatggccacccacagcgagagcaacctgagctgctttgcccaggaggacatcgccatctgccggccccacctggccatcaagatgcctgagaaggccgagcagtaccagcccctgacagcctctgtgtccctgcagaacagcctggatgcccccatggaggactgtgtgatcagcatcctgggccggggcctcatccaccgggagaggagctaccgcttccgctctgtgtggccagagaacaccatgtgtgccaagttccagttcacccccacccacgtgggcctgcagaggctgactgtggaggtggactgcaacatgttccagaacctgaccaactacaagtctgtgacagtggtggcccctgagctgagcgcctag

SEQ ID NO: 42908 - DNA, 2076 bp, Artificial Sequence
  derived and/or modified sequence
atgggccaggccctgggcatcaagagctgtgacttccaggccgccaggaacaatgaggagcaccacaccaaggccctgagcagcagaagactctttgtgcggcggggccagcccttcaccatcatcctgtacttccgggcccctgtgcgggccttcctgcctgccctgaagaaggtggccctgacagcccagacaggagagcagcccagcaagatcaacagaacccaggccaccttccccatcagcagcctgggggacaggaagtggtggagcgctgtggtggaggagagagatgcccagagctggaccatctctgtgaccaccccagcagatgctgtgattggccactacagcctgctgctgcaggtgtctggcaggaagcagctgctgctgggccagttcaccctgctcttcaacccctggaaccgggaggatgctgtgttcctgaagaatgaggcccagaggatggagtacctgctgaaccagaatggcctcatctacctgggcacagctgactgcatccaggccgagagctgggactttggccagtttgaaggagatgtgattgacctgagcctgcggctgctgagcaaggacaagcaggtggagaagtggagccagcctgtgcacgtggcccgggtgctgggcgccctgctgcacttcctgaaggagcagagggtgctgcccaccccccagacccaggccacccaggagggcgccctgctgaacaagagaagaggctctgtgcccatcctgcggcagtggctgaccggccggggccggcctgtgtatgatggccaggcctgggtgctggccgctgtggcctgcaccgtgctgcgctgcctgggcatcccagcccgggtggtgaccacctttgccagcgcccagggcaccggcggccgcctgctgattgatgagtactacaatgaggagggcctgcagaatggagagggccagaggggccgcatctggatcttccagaccagcacagagtgctggatgaccaggcctgccctgccccagggctatgatggctggcagatcctgcaccccagcgccccaaatggaggcggcgtgctgggcagctgtgacctggtgcctgtgcgggctgtgaaggagggcaccctgggcctgaccccagctgtgtctgacctgtttgctgccatcaatgccagctgtgtggtgtggaagtgctgtgaagatggcaccctggagctgacagacagcaacaccaagtatgtgggcaacaacatcagcaccaagggcgtgggcagtgacagatgtgaggacatcacccagaactacaagtacccagagggcagcctgcaggagaaggaggtgctggagcgggtggagaaggagaagatggagcgggagaaggacaatggcatccggccccccagcctggagacagccagccccctgtacctgctgctgaaggcccccagcagcctgcccctgcggggagatgcccagatctctgtgaccctggtgaaccacagcgagcaggagaaggctgtgcagctggccatcggcgtgcaggccgtgcactacaatggagtgctggccgccaagctgtggaggaagaagctgcacctgaccctgagcgccaacctggagaagatcatcaccatcggcctcttcttcagcaactttgagaggaaccccccagagaacaccttcctgcggctgacagccatggccacccacagcgagagcaacctgagctgctttgcccaggaggacatcgccatctgccggccccacctggccatcaagatgcctgagaaggccgagcagtaccagcccctgacagcctctgtgtccctgcagaacagcctggatgcccccatggaggactgtgtgatcagcatcctgggccggggcctcatccaccgggagaggagctaccgcttccgctctgtgtggccagagaacaccatgtgtgccaagttccagttcacccccacccacgtgggcctgcagaggctgactgtggaggtggactgcaacatgttccagaacctgaccaactacaagtctgtgacagtggtggcccctgagctgagcgcctag

SEQ ID NO: 42909 - DNA, 1860 bp, Artificial Sequence
  derived and/or modified sequence
atgggccaggccctgggcatcaagagctgcgacttccaggccgcccgaaataatgaagagcaccacacaaaagccctatcatcaaggcgcctatttgtgcgacgcgggcaaccatttacaatcatcttgtacttcagggcgccggtgagggctttcttaccagctttaaagaaagtagctctcacagctcaaacaggagaacaaccttcaaagatcaatcgaacacaggccacctttccaatttcttccctcggcgatagaaagtggtggtccgccgtcgtggaagagagagatgcccagtcctggaccatctctgtgactacacctgctgatgcggttatcggacactatagtctgctgctccaggtgtctggccgcaagcagctcttgcttggacagttcactctgttatttaacccctggaatagagaggatgctgtattcttaaaaaacgaggctcaaaggatggaatacttgttgaatcaaaacggtctgatttaccttggaacagcagactgcatacaagctgaatcttgggatttcgggcaatttgagggggacgtgatagacctgtctctccgtctactgtcaaaagacaagcaagtggaaaaatggagtcagccagttcacgttgcccgggtgctcggagctctgcttcacttcctcaaggaacaacgcgtgctgccgacaccacagacccaagccactcaggagggagctttgctaaacaagaggcgggggagcgtccccatcctacgtcaatggttaactgggcgaggacgccctgtttatgatggtcaggcttgggtcctggcagctgtggcatgcaccgtgctccgctgcctgggaatcccggccagggtggtgactactttcgcatcagcccagggtacagggggccgcctactgatcgacgagtattacaacgaagagggcttgcaaaacggggaaggtcagaggggaagaatatggaaatgctgtgaagacggtacactggagctgaccgatagtaacacgaaatacgtaggcaataatatctccactaagggtgtggggagtgatcgctgcgaggacatcacacagaactacaagtacccagagggctcattgcaggaaaaagaggtcctcgaacgcgtggagaaggaaaaaatggaacgagaaaaggataatggaatccgtcctccctcactcgagacagcatcccctttgtacctcctccttaaggccccatcctctctacctctgcgaggggatgctcagatatctgtcacgctggtcaatcattccgagcaagagaaggcagtgcagctggctatcggtgtgcaggccgtacactataacggcgtgctggcagcaaagctgtggcgaaaaaagctgcacctaactctttccgccaatctcgaaaagattatcacaatcggactgttcttctctaacttcgagaggaatccgccagaaaatactttccttcgtttgaccgcgatggctacccatagtgagagtaacctgagctgcttcgctcaggaagacatcgcaatctgtcgccctcatctcgccatcaagatgcccgaaaaagccgagcagtaccagcctttgacagcctccgtgtccctgcaaaattcactggacgcgcccatggaagactgcgtgattagcatcttgggtcggggcctgatccatcgcgaaagatcttatagattccgctctgtatggcctgagaacacgatgtgcgccaaatttcagttcacccctacccacgtagggctccagagactcacggtcgaggtcgattgtaacatgtttcagaacctcacaaattacaaatccgtcaccgtggtcgcacccgagctgtcggcctag

SEQ ID NO: 42910 - DNA, 2076 bp, Artificial Sequence
  derived and/or modified sequence
atgggccaggccctgggcatcaagagctgcgacttccaggccgccagaaacaacgaggaacatcacaccaaggccctgagcagtcgccgattgttcgtgcgacggggacagcctttcaccataattctctacttcagagcgcccgtaagagcgttccttcccgccctgaagaaggttgcactcacagcccagactggcgagcagccttccaaaatcaaccgtacacaggccaccttccccatatcatctctgggcgataggaaatggtggtcagccgtggtggaggaaagggatgcccaaagttggaccatctctgtgacaacgcccgccgatgccgtgattggccactactccttgctgctgcaggtgtcagggaggaaacagctgctgctgggccagttcacacttcttttcaacccctggaatcgtgaagatgccgtgtttctgaaaaatgaggctcaacggatggaatacttactgaaccagaatggtcttatctaccttggaaccgccgactgcattcaggctgagtcctgggattttggccagttcgagggtgatgtgattgacttgtcactgcgtcttctttcaaaggacaagcaagtcgagaaatggagtcagcctgtgcatgtggcccgagtccttggggccctgctacacttcctgaaagaacaaagggttctcccaactcctcaaacccaggcaacccaggaaggtgcactcctgaacaaaagacgcggttctgtacctattctgaggcagtggctgacagggcggggccgccccgtctacgatggacaggcatgggtgctggcggctgtggcgtgcaccgtcctgaggtgcctggggatcccggcccgggtggtgaccaccttcgccagcgcccagggaacgggagggcggctattgatcgacgaatattataacgaagagggtttgcagaacggcgaagggcaacgagggcgcatctggattttccaaaccagcacagaatgctggatgacgcgaccggcactaccgcaggggtacgatggctggcagattctgcacccgtctgcccccaacggcggaggagttctgggatcctgcgatttggtcccggtgcgcgctgtcaaggaagggacgctcgggctcacacccgcggtgagtgaccttttcgctgctataaatgcctcctgtgtcgtgtggaagtgctgcgaagatggaacacttgaattgaccgattccaacactaagtacgtcggaaataatatctcgaccaagggagtggggagtgacaggtgcgaggacatcactcagaactacaaatatcctgaaggctctctacaggagaaggaagtcctcgaaagggtagaaaaggagaaaatggagagggagaaggataacggtattagaccaccctctctcgaaaccgctagccccttgtacttgctgctgaaagcaccttcctcgttacctttaagaggtgacgctcagataagcgtgaccctggtgaatcattctgagcaagagaaggccgtccagcttgccattggagtccaggcagtccactataatggcgtgctcgcggcaaaattgtggaggaaaaagctccatctgactctgagcgctaatttggaaaagataatcaccatcggcctattctttagcaacttcgagcgtaatccccctgagaacacctttttacggcttaccgccatggctacccacagcgaatccaacctcagctgctttgcccaggaagacattgccatctgcagaccacaccttgccatcaagatgccagaaaaggcagagcagtatcaacccctgactgcgtctgtcagcctgcaaaatagcctcgatgcacccatggaggattgcgtgatctccatcctcggtcgaggacttattcaccgggagcggtcttatagattcagaagcgtttggcccgaaaacaccatgtgcgcaaagtttcagttcacccctacacacgttgggctccagcggttgacagtggaagtggattgtaatatgttccagaacttgactaactataaatctgtcaccgtggtggcacctgagctgtccgcgtag

SEQ ID NO: 42911 - DNA, 1860 bp, Artificial Sequence
  derived and/or modified sequence
atgggtcaggctttaggcataaagtcttgcgattttcaagctgctagaaacaatgaggagcaccacacaaaagcactgtccagccgacgccttttcgtccggcgtggccagccctttaccattatactctacttccgggcaccggtgagggcgtttcttcctgccctgaaaaaggtggcacttaccgcacaaacaggagagcaaccgtccaaaatcaatcgaacacaagcaacatttcctataagcagtcttggcgaccgtaagtggtggtccgccgtggtggaagagcgagacgcccaatcatggacaatttctgtgacaactcctgctgacgccgtgattggacactattcactcctgctgcaggtgtccggcagaaaacaactgctgctgggtcagtttacactgctgttcaacccatggaaccgggaggatgccgtgtttctgaaaaacgaagcccaacggatggagtacctgctgaaccagaatggtctgatttacttgggcactgctgactgcatccaggcggagtcctgggactttggccagttcgaaggtgacgtaattgacttgtccctgaggctcctgagtaaggataaacaggtggagaaatggtcccagccagtgcatgtggctagagttcttggggctctgcttcacttcctgaaggaacagcgcgttcttcctacgccacagactcaggcgacccaagaaggagcactcctaaacaagcgacggggtagcgtgcccattctgagacagtggcttaccgggagaggaaggcctgtttacgacggacaggcttgggtccttgcagctgtagcctgcacagtcctgaggtgtcttggaatcccagcaagggttgtaacaacattcgccagcgctcagggaactggcggacggctgttaatcgatgagtactataatgaagagggcctgcagaatggggagggtcaacggggaaggatttggaagtgttgcgaggacggaacgctcgaactgactgactccaacactaagtatgttggtaacaacatctctaccaagggcgtcggttcagatcgctgcgaggatatcactcagaattataagtaccctgaaggctcactgcaagaaaaggaagtcttggagagggtcgagaaggagaagatggaaagagaaaaggacaacgggattcgtcctcccagcctggagactgcctccccattgtatctcctgctgaaagccccttctagtctgccattaagaggcgatgcacaaatttccgtgaccttagtgaaccactctgaacaagagaaggccgtccagcttgctatcggtgtgcaagcagtacactacaacggcgtcttggccgctaagttgtggagaaagaagttgcatttaacactgagcgccaatctcgaaaagatcattactattgggctgttctttagcaattttgagcgaaacccccctgagaatactttcctgcgcctcacagccatggcaactcactcggagagtaatctgtcctgctttgctcaggaggacatagccatctgtcgaccccatctggctatcaagatgcctgaaaaagccgagcagtatcagcctcttaccgcctctgtcagtttgcagaacagtctggatgcccctatggaggattgcgtaatctccatcctagggcgaggtctgatccaccgtgagcgttcatacaggttccggagcgtgtggccagaaaacaccatgtgcgcaaaattccagtttacaccaacccacgttggtctgcaaagactgaccgtggaggtggattgtaacatgttccagaacttgacgaattacaagagcgtaactgttgtggcccctgagcttagtgcctag

SEQ ID NO: 42912 - DNA, 2076 bp, Artificial Sequence
  derived and/or modified sequence
atgggacaggccctaggtatcaagagctgcgactttcaggctgccaggaacaatgaggagcaccacacaaaggccttgagctctcgaaggctctttgtgaggcggggtcagcctttcaccatcattctatatttccgagcacctgttcgcgcttttctccctgcgcttaagaaggtggccctcactgctcagaccggcgagcaaccttcaaagataaatcggacccaggccacttttcctatatcctccctgggcgatcgaaaatggtggagcgccgttgtcgaggaacgtgatgcccaatcctggaccatctcagtaaccaccccagccgatgcggtcatcgggcactattcactgcttttacaagtgtccggacgcaagcagctgctcctcgggcaatttaccttactgttcaacccttggaatagagaggacgccgtgttcctaaaaaacgaggcccagagaatggaatatcttcttaatcagaacggccttatctacctcggcaccgcagactgcatccaggctgaatcttgggacttcggtcagttcgaaggggatgtgatagacctgagtttaaggctcctgtctaaggataagcaggtggaaaaatggtctcagccggtccacgtagctcgggtcctgggggctcttctgcactttctcaaggagcagcgtgtcctgcccacccctcaaacacaggccacacaggaaggggcacttctgaacaaacggagaggatctgtgcccatcctgaggcaatggctgacaggtcgcggaagacctgtctacgatggccaggcctgggtgctagctgccgtcgcctgtacagtcctgaggtgtcttggaattcccgctagggtcgtgaccacctttgcaagcgctcagggcaccggtggaagactactgatcgacgagtattacaatgaggagggtttgcagaacggagagggccagcgtgggcgaatctggatatttcagactagtacggagtgctggatgaccagacccgctcttccccaaggttacgacgggtggcagattctgcacccaagtgcacctaatggtggcggagttctcggatcctgcgacctagtcccagttagagcagtaaaagaggggaccctgggactgacccccgcagtatctgacctgttcgcggctattaatgcgagctgtgttgtctggaagtgctgcgaggacggcaccctcgagctgactgactccaataccaaatatgtaggcaacaatatcagcacaaaaggcgtcgggtcggatcgctgcgaggacattacacaaaactacaaataccccgagggtagcctgcaggaaaaggaagtcctggagcgagttgagaaggaaaaaatggaacgtgaaaaggacaatggaattcgcccaccaagcttggagacagcgagtcctctgtacttgctgctgaaggctccttcgagcctgcctttacgaggggatgcgcagataagtgttacccttgttaaccactcagagcaggaaaaggccgtccagctggctataggagtgcaggctgtccactacaacggtgtgctggcagctaagttgtggaggaaaaaacttcaccttacgctgtccgctaatttggaaaaaattatcacaatcggcctctttttctcgaactttgaaagaaaccctccagaaaacacattcctaaggctgacagctatggcaactcacagcgaaagcaacctaagctgttttgcacaggaggatattgcgatatgtaggccgcacttggcgattaaaatgcctgaaaaggcagaacagtatcaacccctcacagcctccgtatctttgcagaatagcctggacgcaccaatggaggactgcgtcatcagtatcctgggcaggggactgattcatagggaacggagctaccgattccggagcgtatggcccgagaatactatgtgtgccaagttccaatttacccctacacacgttggactacagcgtctcaccgtggaggtggactgtaatatgttccaaaatttgactaactacaaaagtgtcacggtcgttgctccagaactcagcgcctag

SEQ ID NO: 42913 - DNA, 1860 bp, Artificial Sequence
  derived and/or modified sequence
atgggccaggccctgggcatcaagagctgcgacttccaggccgccagaaacaacgaggagcaccacaccaaggccctgagcagcagaagactgttcgtgagaagaggccagcccttcaccatcatcctgtacttcagagcccccgtgagagccttcctgcccgccctgaagaaggtggccctgaccgcccagaccggcgagcagcccagcaagatcaacagaacccaggccaccttccccatcagcagcctgggcgacagaaagtggtggagcgccgtggtggaggagagagacgcccagagctggaccatcagcgtgaccacccccgccgacgccgtgatcggccactacagcctgctgctgcaggtgagcggcagaaagcagctgctgctgggccagttcaccctgctgttcaacccctggaacagagaggacgccgtgttcctgaagaacgaggcccagagaatggagtacctgctgaaccagaacggcctgatctacctgggcaccgccgactgcatccaggccgagagctgggacttcggccagttcgagggcgacgtgatcgacctgagcctgagactgctgagcaaggacaagcaggtggagaagtggagccagcccgtgcacgtggccagagtgctgggcgccctgctgcacttcctgaaggagcagagagtgctgcccaccccccagacccaggccacccaggagggcgccctgctgaacaagagaagaggcagcgtgcccatcctgagacagtggctgaccggcagaggcagacccgtgtacgacggccaggcctgggtgctggccgccgtggcctgcaccgtgctgagatgcctgggcatccccgccagagtggtgaccaccttcgccagcgcccagggcaccggcggcagactgctgatcgacgagtactacaacgaggagggcctgcagaacggcgagggccagagaggcagaatctggaagtgctgcgaggacggcaccctggagctgaccgacagcaacaccaagtacgtgggcaacaacatcagcaccaagggcgtgggcagcgacagatgcgaggacatcacccagaactacaagtaccccgagggcagcctgcaggagaaggaggtgctggagagagtggagaaggagaagatggagagagagaaggacaacggcatcagaccccccagcctggagaccgccagccccctgtacctgctgctgaaggcccccagcagcctgcccctgagaggcgacgcccagatcagcgtgaccctggtgaaccacagcgagcaggagaaggccgtgcagctggccatcggcgtgcaggccgtgcactacaacggcgtgctggccgccaagctgtggagaaagaagctgcacctgaccctgagcgccaacctggagaagatcatcaccatcggcctgttcttcagcaacttcgagagaaacccccccgagaacaccttcctgagactgaccgccatggccacccacagcgagagcaacctgagctgcttcgcccaggaggacatcgccatctgcagaccccacctggccatcaagatgcccgagaaggccgagcagtaccagcccctgaccgccagcgtgagcctgcagaacagcctggacgcccccatggaggactgcgtgatcagcatcctgggcagaggcctgatccacagagagagaagctacagattcagaagcgtgtggcccgagaacaccatgtgcgccaagttccagttcacccccacccacgtgggcctgcagagactgaccgtggaggtggactgcaacatgttccagaacctgaccaactacaagagcgtgaccgtggtggcccccgagctgagcgcctag

SEQ ID NO: 42914 - DNA, 2076 bp, Artificial Sequence
  derived and/or modified sequence
atgggccaggccctgggcatcaagagctgcgacttccaggccgccagaaacaacgaggagcaccacaccaaggccctgagcagcagaagactgttcgtgagaagaggccagcccttcaccatcatcctgtacttcagagcccccgtgagagccttcctgcccgccctgaagaaggtggccctgaccgcccagaccggcgagcagcccagcaagatcaacagaacccaggccaccttccccatcagcagcctgggcgacagaaagtggtggagcgccgtggtggaggagagagacgcccagagctggaccatcagcgtgaccacccccgccgacgccgtgatcggccactacagcctgctgctgcaggtgagcggcagaaagcagctgctgctgggccagttcaccctgctgttcaacccctggaacagagaggacgccgtgttcctgaagaacgaggcccagagaatggagtacctgctgaaccagaacggcctgatctacctgggcaccgccgactgcatccaggccgagagctgggacttcggccagttcgagggcgacgtgatcgacctgagcctgagactgctgagcaaggacaagcaggtggagaagtggagccagcccgtgcacgtggccagagtgctgggcgccctgctgcacttcctgaaggagcagagagtgctgcccaccccccagacccaggccacccaggagggcgccctgctgaacaagagaagaggcagcgtgcccatcctgagacagtggctgaccggcagaggcagacccgtgtacgacggccaggcctgggtgctggccgccgtggcctgcaccgtgctgagatgcctgggcatccccgccagagtggtgaccaccttcgccagcgcccagggcaccggcggcagactgctgatcgacgagtactacaacgaggagggcctgcagaacggcgagggccagagaggcagaatctggatcttccagaccagcaccgagtgctggatgaccagacccgccctgccccagggctacgacggctggcagatcctgcaccccagcgcccccaacggcggcggcgtgctgggcagctgcgacctggtgcccgtgagagccgtgaaggagggcaccctgggcctgacccccgccgtgagcgacctgttcgccgccatcaacgccagctgcgtggtgtggaagtgctgcgaggacggcaccctggagctgaccgacagcaacaccaagtacgtgggcaacaacatcagcaccaagggcgtgggcagcgacagatgcgaggacatcacccagaactacaagtaccccgagggcagcctgcaggagaaggaggtgctggagagagtggagaaggagaagatggagagagagaaggacaacggcatcagaccccccagcctggagaccgccagccccctgtacctgctgctgaaggcccccagcagcctgcccctgagaggcgacgcccagatcagcgtgaccctggtgaaccacagcgagcaggagaaggccgtgcagctggccatcggcgtgcaggccgtgcactacaacggcgtgctggccgccaagctgtggagaaagaagctgcacctgaccctgagcgccaacctggagaagatcatcaccatcggcctgttcttcagcaacttcgagagaaacccccccgagaacaccttcctgagactgaccgccatggccacccacagcgagagcaacctgagctgcttcgcccaggaggacatcgccatctgcagaccccacctggccatcaagatgcccgagaaggccgagcagtaccagcccctgaccgccagcgtgagcctgcagaacagcctggacgcccccatggaggactgcgtgatcagcatcctgggcagaggcctgatccacagagagagaagctacagattcagaagcgtgtggcccgagaacaccatgtgcgccaagttccagttcacccccacccacgtgggcctgcagagactgaccgtggaggtggactgcaacatgttccagaacctgaccaactacaagagcgtgaccgtggtggcccccgagctgagcgcctag

SEQ ID NO: 42915 - DNA, 1976 bp, Artificial Sequence
  derived and/or modified sequence
gcccagaaggagcccagaagcaacagtttgagagaggcgctttctgcggccaagtggataagaggagcggcctgcaaccatgggacaggccctgggtatcaagagctgtgactttcaggcagcaagaaacaatgaggagcaccacaccaaggccctcagctcccggcgcctctttgtgaggagggggcagcccttcaccatcatcctgtacttccgcgctccagtccgtgcatttctgcctgccctgaagaaggtggccctcactgcacaaactggagagcagccttccaagatcaacaggacccaagccacattcccaatttccagtctgggggaccgaaagtggtggagtgcagtggtggaggagagagatgcccagtcctggaccatctctgtgaccacacctgcggacgctgtcattggccactactcgcttctgctgcaggtctcaggcaggaagcaactcctcttgggtcagttcacactgctttttaacccctggaatagagaggatgctgtgttcctgaagaatgaggctcagcgcatggagtacttgttgaaccagaatggtctcatctacctgggtacagctgactgcatccaggcagagtcctgggactttggccagttcgagggggatgtcattgacctcagcctgcgcttgctgagcaaggacaagcaggtagagaagtggagccagccggtgcacgtggcccgtgtgttgggtgccttgctgcattttctcaaggagcagagggtcctgcccaccccgcagacccaggccacccaggaaggggccttgctgaacaagcgccggggcagcgtgcccatcctgcggcagtggctcaccggccgaggccgacctgtgtatgatggccaggcctgggtgttggctgctgttgcttgcacagtgctgcgatgcctgggaatccctgcccgcgtggtgaccacgtttgcctcagcacagggcaccggtgggcgtcttctcatagatgaatactataatgaggagggacttcagaacggagaaggccagagaggcagaatctggaagtgctgtgaggatgggacactggagttgactgactccaacacaaagtatgttggcaacaacatcagcaccaagggtgtgggcagtgaccgctgcgaggacatcactcagaactacaagtatcctgaagggtctcttcaggaaaaagaggtgctggagagagtcgagaaagagaaaatggaacgtgagaaagacaacggcatccgtcctcccagtctcgagactgccagtcctctgtacctgctcttgaaagcacccagctccctacccctgagaggggatgcccagatctcagtgacgctggttaatcacagtgagcaggagaaggcagtgcagctggcaattggggtccaggctgtacactacaacggtgtccttgctgccaagctctggaggaagaagctgcacctcacgctcagtgccaacctggaaaagataataaccatcggcctgttcttctccaattttgagcgaaacccacccgagaacaccttccttagactcaccgccatggcaacacactctgaatccaaccttagctgctttgctcaggaagacattgccatttgtagaccacaccttgccatcaagatgccagagaaagcagagcagtatcaacccctcacagcctcagtcagcctccagaactccctagatgcccccatggaggactgtgtgatctccatcctgggaagggggctcattcacagagagaggagctacagattccgttcagtgtggcctgaaaacaccatgtgtgccaagttccagttcacgccaacacatgtggggctccagagactcactgtggaagtggactgcaacatgttccagaacctaaccaactataaaagcgtcaccgtggtagcccctgaactatcagcttaaacttccagctctatcaccactctcctgccaacccttg

SEQ ID NO: 42916 - DNA, 2446 bp, Artificial Sequence
  derived and/or modified sequence
ccccagggctgccaggcgtattcctgcctgggcctcctggcacaagagataaaatgaacagggttactcccagtaactggtccaggagataccagcagagagggagtaggagagaagaaacatgtcagggtgctcacaggagtagtggggggaggttttgctatttccagattcttaagccaacaaaagtgccttcatattttctgtctggaagacagaaagcccagaaggagcccagaagcaacagtttgagagaggcgctttctgcggccaagtggataagaggagcggcctgcaaccatgggacaggccctgggtatcaagagctgtgactttcaggcagcaagaaacaatgaggagcaccacaccaaggccctcagctcccggcgcctctttgtgaggagggggcagcccttcaccatcatcctgtacttccgcgctccagtccgtgcatttctgcctgccctgaagaaggtggccctcactgcacaaactggagagcagccttccaagatcaacaggacccaagccacattcccaatttccagtctgggggaccgaaagtggtggagtgcagtggtggaggagagagatgcccagtcctggaccatctctgtgaccacacctgcggacgctgtcattggccactactcgcttctgctgcaggtctcaggcaggaagcaactcctcttgggtcagttcacactgctttttaacccctggaatagagaggatgctgtgttcctgaagaatgaggctcagcgcatggagtacttgttgaaccagaatggtctcatctacctgggtacagctgactgcatccaggcagagtcctgggactttggccagttcgagggggatgtcattgacctcagcctgcgcttgctgagcaaggacaagcaggtagagaagtggagccagccggtgcacgtggcccgtgtgttgggtgccttgctgcattttctcaaggagcagagggtcctgcccaccccgcagacccaggccacccaggaaggggccttgctgaacaagcgccggggcagcgtgcccatcctgcggcagtggctcaccggccgaggccgacctgtgtatgatggccaggcctgggtgttggctgctgttgcttgcacagtgctgcgatgcctgggaatccctgcccgcgtggtgaccacgtttgcctcagcacagggcaccggtgggcgtcttctcatagatgaatactataatgaggagggacttcagaacggagaaggccagagaggcagaatctggatcttccagacttccacagagtgctggatgacgcggcctgccttgccccagggttatgatggatggcagattctgcacccaagtgctcctaatggaggtggagtcctggggtcctgtgatctggtgccggtcagagcagtcaaggaggggacgctggggctgaccccagcagtgtcagacctttttgctgccataaatgcctcatgtgtggtctggaagtgctgtgaggatgggacactggagttgactgactccaacacaaagtatgttggcaacaacatcagcaccaagggtgtgggcagtgaccgctgcgaggacatcactcagaactacaagtatcctgaagggtctcttcaggaaaaagaggtgctggagagagtcgagaaagagaaaatggaacgtgagaaagacaacggcatccgtcctcccagtctcgagactgccagtcctctgtacctgctcttgaaagcacccagctccctacccctgagaggggatgcccagatctcagtgacgctggttaatcacagtgagcaggagaaggcagtgcagctggcaattggggtccaggctgtacactacaacggtgtccttgctgccaagctctggaggaagaagctgcacctcacgctcagtgccaacctggaaaagataataaccatcggcctgttcttctccaattttgagcgaaacccacccgagaacaccttccttagactcaccgccatggcaacacactctgaatccaaccttagctgctttgctcaggaagacattgccatttgtagaccacaccttgccatcaagatgccagagaaagcagagcagtatcaacccctcacagcctcagtcagcctccagaactccctagatgcccccatggaggactgtgtgatctccatcctgggaagggggctcattcacagagagaggagctacagattccgttcagtgtggcctgaaaacaccatgtgtgccaagttccagttcacgccaacacatgtggggctccagagactcactgtggaagtggactgcaacatgttccagaacctaaccaactataaaagcgtcaccgtggtagcccctgaactatcagcttaaacttccagctctatcaccactctcctgccaacccttgttctacaatctaaaccaaacatgtgctaggaag

SEQ ID NO: 42917 - protein, 358 aa, Artificial Sequence
  derived and/or modified sequence
MERLQKAKMDNQVLGYKDLAAIPKDKAILDIERPDLMIYEPHFTYSLLEHVELPRSRERSLSPKSTSPPPSPEVWADSRSPGIISQASAPRTTGTPRTSLPHFHHPETSRPDSNIYKKPPIYKQRESVGGSPQTKHLIEDLIIESSKFPAAQPPDPNQPAKIETDYWPCPPSLAVVETEWRKRKASRRGAEEEEEEEDDDSGEEMKALRERQREELSKVTSNLGKMILKEEMEKSLPIRRKTRSLPDRTPFHTSLHQGTSKSSSLPAYGRTTLSRLQSTEFSPSGSETGSPGLQIYPYEMLVVTNKGRTKLPPGVDRMRLERHLSAEDFSRVFAMSPEEFGKLALWKRNELKKKASLF

SEQ ID NO: 42918 - DNA, 119 bp, Artificial Sequence
  derived and/or modified sequence
gctgccttctgcggggcttgccttctggccatgcccttcttctctcccttgcacctgtacctcttggtctttgaataaagcctgagtaggaagtgagggtctagaactagtgtcgacgc

SEQ ID NO: 42919 - DNA, 118 bp, Artificial Sequence
  derived and/or modified sequence
gctgccttctgcggggcttgccttctggccatgcccttcttctctcccttgcacctgtacctcttggtctttgaataaagcctgagtaggaaggcggccgctcgagcatgcatctaga

SEQ ID NO: 42920 - DNA, 1077 bp, Artificial Sequence
  derived and/or modified sequence
atggaacggttacagaaggctaagatggataaccaggtgttgggatataaagatctagccgcgattccgaaggacaaggcaatcctggatattgaaagacctgatctgatgatttatgagccgcacttcacctattcactcctggaacacgtagagttacctagaagcagagagaggagtctgtcaccaaaatcgactagtcctcccccctctccagaagtgtgggccgactcacggtcaccggggattatttcacaggctagcgcaccgagaaccaccggcaccccccgaacaagtctccctcacttccaccaccctgagaccagcaggccagatagcaatatttacaaaaagcctcccatctacaagcagagggagagcgtgggaggaagcccccagacaaaacatctgatagaggacctaatcatcgagagtagcaaattccccgctgctcagcctcccgatccaaaccagccagccaagattgagacagactactggccatgtcctccttccctagcagtggtggagacagagtggcgaaagagaaaggcatccagacgcggcgctgaggaagaggaggaagaggaggatgacgactccggcgaggagatgaaggccctgagagagcgacaacgtgaggaactctcaaaagtcacatctaatctgggtaaaatgatcctgaaagaggagatggagaagtctctcccgatccgcaggaaaacgaggtctctgcctgatcggactcccttccacacctccctgcatcagggcacatccaaaagctcttctctgcccgcgtacggtcgcaccacccttagcagacttcagtctaccgaattcagtcccagtggctcagagaccggctcaccaggactacagatctacccatatgagatgctcgtcgtcacgaacaaaggtcgcaccaagctgccccccggcgtggataggatgcgcctcgaaaggcatttgagtgctgaggatttctccagggtgtttgcaatgtcccccgaagagttcgggaaacttgccctctggaaacgaaacgaactcaaaaagaaggcatccttattctag

SEQ ID NO: 42921 - DNA, 1077 bp, Artificial Sequence
  derived and/or modified sequence
atggagcggctgcagaaggccaagatggacaaccaggtgctgggctacaaggacctggccgccatccccaaggacaaggccatcctggacatcgagaggccagacctgatgatctatgagccccacttcacctacagcctgctggagcacgtggagctgcccaggagccgggagaggagcctgagccccaagagcaccagccccccacccagccctgaggtgtgggccgacagccgcagccctggcatcatcagccaggccagcgcccccaggaccaccggcacccccaggaccagcctgccccacttccaccaccctgagaccagcaggccagacagcaacatctacaagaagccacccatctacaagcagcgggagagcgtgggcggcagcccccagaccaagcacctgattgaagatctcatcatcgagagcagcaagtttcctgctgcccagcccccagaccccaaccagcctgccaagattgaaacagactactggccctgcccccccagcctggccgtggtggagacagagtggaggaagaggaaggccagcagaagaggagctgaggaggaggaggaggaggaggatgatgattctggagaggagatgaaggccctgcgggagcggcagcgggaggagctgagcaaggtgaccagcaacctgggcaagatgatcctgaaggaggagatggagaagagcctgcccatccggaggaagaccaggagcctgcctgacaggacccccttccacaccagcctgcaccagggcaccagcaagagcagcagcctgcctgcctacggccgcaccaccctgagccggctgcagagcacagagttcagccccagcggcagcgagaccggcagccctggcctgcagatctacccctatgagatgctggtggtgaccaacaagggccgcaccaagctgcccccaggagtggacaggatgaggctggagcggcacctgtctgctgaggacttcagccgggtgtttgccatgagccctgaggagtttgggaagctggccctgtggaagagaaatgagctgaagaagaaggccagcctcttctag

SEQ ID NO: 42922 - DNA, 1077 bp, Artificial Sequence
  derived and/or modified sequence
atggagcggctgcagaaggccaagatggacaaccaggtgctgggctataaggatttggctgcgattccaaaagacaaagcaatactggacatcgaacggcccgatctgatgatctatgagccacacttcacatactccttactcgaacacgtggaactgcctaggtcaagagagaggagcctgtccccaaagtctacttcacccccaccatctcctgaagtgtgggccgatagcagaagccctggcatcatttctcaggcctcagcgccccgaacaacagggacaccaagaacatcccttccacattttcatcatcccgagacatcccgaccagactccaatatctacaaaaagccacctatttataagcagagggaatcagtcgggggctctccccagaccaagcatctcattgaggatctgatcatcgagagttcaaagttcccggccgcacaaccccccgacccaaaccaacctgctaagatcgagacagattattggccgtgtccccctagcctagccgtggttgagaccgagtggcggaaaagaaaggctagtcgcaggggcgccgaggaagaggaggaagaagaggacgacgactcaggagaggagatgaaagctttacgggaaaggcaacgcgaagagctgtccaaagtcacctctaatctgggaaagatgatactgaaggaggagatggagaagagcctacctatcagaaggaaaaccaggtccttaccagaccgaacccctttccatactagtcttcatcaggggacaagtaaaagctcctcactgccagcttatgggaggaccaccctctcacggctgcaaagtacagagttctctcctagcgggtctgagacggggtcgcctggtctgcagatatacccctacgaaatgcttgtcgtgaccaacaaaggccgtacgaaactgccacctggcgtcgacagaatgaggctggaacgtcacctgtctgcagaggacttttcccgggtgttcgccatgtctcctgaagaattcggtaaactggcactttggaagagaaacgaactgaaaaaaaaggcgtccctgttctag

SEQ ID NO: 42923 - DNA, 1077 bp, Artificial Sequence
  derived and/or modified sequence
atggaacgcttgcagaaggccaaaatggacaaccaggtgctcggttacaaggacctggctgccatcccaaaggataaggccattctcgacatcgaacgcccagacctcatgatctatgaaccccacttcacttattcactcctcgaacacgtggaattaccgcgaagccgcgagagatctttgtccccaaagagtaccagccctcctcccagtcccgaagtttgggcagattctcgctctcctggcatcatctcacaggcctcagcccctcggacaaccggcacaccacgtacaagtctgccccattttcaccaccctgagacctctagaccggatagtaacatctacaagaaaccaccaatttacaagcaacgtgagagcgtgggcggatcaccgcagacgaagcatctaatcgaagacctgattattgagtcctctaagtttccagctgctcagccacccgatccgaatcagcctgccaagatcgagacagattattggccctgtccaccatcgctggcagtggtggagacggagtggcgtaaaagaaaggcatctagacgtggcgctgaagaggaagaggaggaagaggacgatgattctggggaggagatgaaggccttaagagaaaggcagcgagaagagttatctaaggtgaccagtaatctgggcaaaatgatcctcaaagaggagatggagaaaagccttcctattcgtagaaagacacgatccctgcctgatcgaactccctttcacacctcccttcatcaagggacatccaaatccagctcattacctgcttatggcaggacgacattaagcaggcttcagtcaaccgaattcagcccaagcggttctgagacaggcagccctggacttcagatttacccgtacgaaatgctcgtcgtgacgaataaagggagaaccaagctccctcccggtgtggaccgcatgaggcttgagcgacacctgagtgcggaagactttagtagggtgttcgcaatgagccccgaggagtttggcaagctggcactgtggaagagaaacgagctcaagaagaaagcttctcttttttag

SEQ ID NO: 42924 - DNA, 1077 bp, Artificial Sequence
  derived and/or modified sequence
atggagagactgcagaaggccaagatggacaaccaggtgctgggctacaaggacctggccgccatccccaaggacaaggccatcctggacatcgagagacccgacctgatgatctacgagccccacttcacctacagcctgctggagcacgtggagctgcccagaagcagagagagaagcctgagccccaagagcaccagccccccccccagccccgaggtgtgggccgacagcagaagccccggcatcatcagccaggccagcgcccccagaaccaccggcacccccagaaccagcctgccccacttccaccaccccgagaccagcagacccgacagcaacatctacaagaagccccccatctacaagcagagagagagcgtgggcggcagcccccagaccaagcacctgatcgaggacctgatcatcgagagcagcaagttccccgccgcccagccccccgaccccaaccagcccgccaagatcgagaccgactactggccctgcccccccagcctggccgtggtggagaccgagtggagaaagagaaaggccagcagaagaggcgccgaggaggaggaggaggaggaggacgacgacagcggcgaggagatgaaggccctgagagagagacagagagaggagctgagcaaggtgaccagcaacctgggcaagatgatcctgaaggaggagatggagaagagcctgcccatcagaagaaagaccagaagcctgcccgacagaacccccttccacaccagcctgcaccagggcaccagcaagagcagcagcctgcccgcctacggcagaaccaccctgagcagactgcagagcaccgagttcagccccagcggcagcgagaccggcagccccggcctgcagatctacccctacgagatgctggtggtgaccaacaagggcagaaccaagctgccccccggcgtggacagaatgagactggagagacacctgagcgccgaggacttcagcagagtgttcgccatgagccccgaggagttcggcaagctggccctgtggaagagaaacgagctgaagaagaaggccagcctgttctag

SEQ ID NO: 42925 - DNA, 2415 bp, Artificial Sequence
  derived and/or modified sequence
aggttgtcttggcaacaggaggtggagaggagatgcgccgagggatggaggtgtatgtcaccgaggaggctgctgcgctcctgccccacgccctgggcccttgaagcctggagagtcaccgccgagggatgaggacgcgccagcccgggggaacgcgccagctgctttcgcggccccaagcgcgcagcgcccagcagccgcgccgagcctgacacgctgtcctctcccctcgcgcacagggctctgcgagtgacccggcgggcgagctccgtgctgcatggaacggctgcagaaggccaagatggacaatcaggtgctgggctacaaggacctggctgccatccccaaggacaaggccatcctggacatcgagcggcccgacctcatgatctacgagcctcacttcacttattccctcctggaacacgtggagctgcctcgcagccgcgagcgctcgctgtcacccaaatccacatcccccccaccatccccagaggtgtgggcggacagccggtcgcctggaatcatctctcaggcctcggcccccagaaccactggaaccccccggaccagcctgccccatttccaccaccctgagacctcccgcccagattccaacatctacaagaagcctcccatctataagcagagagagtccgtgggaggcagccctcagaccaagcacctcatcgaggatctcatcatcgagtcatccaagtttcctgcagcccagcccccagaccccaaccagccagccaaaatcgaaaccgactactggccatgccccccgtctctggctgttgtggagacagaatggaggaagcggaaggcgtctcggaggggagcagaggaagaggaggaggaggaagatgacgactctggagaggagatgaaggctctcagggagcgtcagagagaggaactcagtaaggttacttccaacttgggaaagatgatcttgaaagaagagatggaaaagtcattgccgatccgaaggaaaacccgctctctgcctgaccggacacccttccatacctccttgcaccagggaacgtctaaatcttcctctctccccgcctatggcaggaccaccctgagccggctacagtccacagagttcagcccatcagggagtgagactggaagcccaggcctgcagatctatccctatgaaatgctagtggtgaccaacaaggggcgaaccaagctgccaccgggggtggatcggatgcggcttgagaggcatctgtctgccgaggacttctcaagggtatttgccatgtcccctgaagagtttggcaagctggctctgtggaagcggaatgagctcaagaagaaggcctctctcttctgatggcccccacctgctccgggacggcccccttacccctgctgcttcagggtttttccccggcgggttgggaggggcaggaggtggggtggaaatagggtgggctcctttcctcaggtagagtggggggccaaaacctctgcagtccccggcagtgagctatggactttcttccccctcacaaggctgggggcctcctgctctcgtccctggccctccctgcacagggcaaagccagtctgggctctggcacacagagttcatgtttgcgccctctccctgcccctcaccccagagggtgaggaggaatgaggggcattggtggttaggccggttggctgtcttgaacagctggagggaagatgcaggggtgggaagcggccaggcagaaagagctccaggctcttgtgtcgcccacccagccctcccatactcactcctgacagctttcctgcactgcagcctcctgctcctctgactctagtgggaacaggccccagctcagcctccggcagggaggtcacccctccacttcagcttgccctgacctccgctcgcaaaccccgagcttccaagccttttgctccagccctgcggcttccccagaagcctgggcttagggtggagatgccgcctacacacgatcctggccctccacctgcctccaggccacgaaatgggaattccagcactaagccaggcaccgggcagaagctgggccttccgcctcccttggatggggtcaagaggccaggcctggcacattttggagtgtcctggctaccagctctcacctacacccacgcacccccccacacactatgctctctcaagaatgtaatttattggggcccccccagctgctttcctcacctgcccctgccctaccttacacccccagcttgacttctttccagtccacgtgtgtatataatgatatctatatttttgcccaggtctgggtattgctcctgcccagaccctgacatccctttccactgtgtgtgtgaccatgctgggggagggggactctgcttggaattaaaaggttgcattgggtccct

SEQ ID NO: 42926 - protein, 302 aa, Artificial Sequence
  derived and/or modified sequence
MFQAFPGDYDSGSRCSSSPSAESQYLSSVDSFGSPPTAAASQECAGLGEMPGSFVPTVTAITTSQDLQWLVQPTLISSMAQSQGQPLASQPPVVDPYDMPGTSYSTPGMSGYSSGGASGSGGPSTSGTTSGPGPARPARARPRRPREETETDQLEEEKAELESEIAELQKEKERLEFVLVAHKPGCKIPYEEGPGPGPLAEVRDLPGSAPAKEDGFSWLLPPPPPPPLPFQTSQDAPPNLTASLFTHSEVQVLGDPFPVVNPSYTSSFVLTCPEVSAFAGAQRTSGSDQPSDPLNSPSLLAL

SEQ ID NO: 42927 - DNA, 3645 bp, Artificial Sequence
  derived and/or modified sequence
cattcataagactcagagctacggccacggcagggacacgcggaaccaagacttggaaacttgattgttgtggttcttcttgggggttatgaaatttcattaatctttttttttccggggagaaagtttttggaaagattcttccagatatttcttcattttcttttggaggaccgacttactttttttggtcttctttattactcccctccccccgtgggacccgccggacgcgtggaggagaccgtagctgaagctgattctgtacagcgggacagcgctttctgcccctgggggagcaacccctccctcgcccctgggtcctacggagcctgcactttcaagaggtacagcggcatcctgtgggggcctgggcaccgcaggaagactgcacagaaactttgccattgttggaacgggacgttgctccttccccgagcttccccggacagcgtactttgaggactcgctcagctcaccggggactcccacggctcaccccggacttgcaccttacttccccaacccggccatagccttggcttcccggcgacctcagcgtggtcacaggggcccccctgtgcccagggaaatgtttcaggctttccccggagactacgactccggctcccggtgcagctcctcaccctctgccgagtctcaatatctgtcttcggtggactccttcggcagtccacccaccgccgccgcctcccaggagtgcgccggtctcggggaaatgcccggttccttcgtgcccacggtcaccgcgatcacaaccagccaggacctccagtggcttgtgcaacccaccctcatctcttccatggcccagtcccaggggcagccactggcctcccagcccccggtcgtcgacccctacgacatgccgggaaccagctactccacaccaggcatgagtggctacagcagtggcggagcgagtggcagtggtgggccttccaccagcggaactaccagtgggcctgggcctgcccgcccagcccgagcccggcctaggagaccccgagaggagacggagacagatcagttggaggaagaaaaagcagagctggagtcggagatcgccgagctccaaaaggagaaggaacgtctggagtttgtgctggtggcccacaaaccgggctgcaagatcccctacgaagaggggcccgggccgggcccgctggcggaggtgagagatttgccgggctcagcaccggctaaggaagatggcttcagctggctgctgccgcccccgccaccaccgcccctgcccttccagaccagccaagacgcaccccccaacctgacggcttctctctttacacacagtgaagttcaagtcctcggcgaccccttccccgttgttaacccttcgtacacttcttcgtttgtcctcacctgcccggaggtctccgcgttcgccggcgcccaacgcaccagcggcagtgaccagccttccgatcccctgaactcgccctccctcctcgctctgtgaactctttagacacacaaaacaaacaaacacatgggggagagagacttggaagaggaggaggaggaggagaaggaggagagagaggggaagagacaaagtgggtgtgtggcctccctggctcctccgtctgaccctctgcggccactgcgccactgccatcggacaggaggattccttgtgttttgtcctgcctcttgtttctgtgccccggcgaggccggagagctggtgactttggggacagggggtgggaaggggatggacacccccagctgactgttggctctctgacgtcaacccaagctctggggatgggtggggaggggggcgggtgacgcccaccttcgggcagtcctgtgtgaggattaagggacgggggtgggaggtaggctgtggggtgggctggagtcctctccagagaggctcaacaaggaaaaatgccactccctacccaatgtctcccacacccaccctttttttggggtgcctaggttggtttcccctgcactcccgaccttagcttattgatcccacatttccatggtgtgagatcctctttactctgggcagaagtgagccccccccttaaagggaattcgatgcccccctagaataatctcatccccccacccgacttcttttgaaatgtgaacgtccttccttgactgtctagccactccctcccagaaaaactggctctgattggaatttctggcctcctaaggctccccaccccgaaatcagcccccagccttgtttctgatgacagtgttatcccaagaccctgccccctgccagccgaccctcctggccttcctcgttgggccgctctgatttcaggcagcaggggctgctgtgatgccgtcctgctggagtgatttatactgtgaaatgagttggccagattgtggggtgcagctgggtggggcagcacacctctggggggataatgtccccactcccgaaagcctttcctcggtctcccttccgtccatcccccttcttcctcccctcaacagtgagttagactcaagggggtgacagaaccgagaagggggtgacagtcctccatccacgtggcctctctctctctcctcaggaccctcagccctggcctttttctttaaggtcccccgaccaatccccagcctaggacgccaacttctcccaccccttggcccctcacatcctctccaggaagggagtgaggggctgtgacatttttccggagaagatttcagagctgaggctttggtacccccaaacccccaatatttttggactggcagactcaaggggctggaatctcatgattccatgcccgagtccgcccatccctgaccatggttttggctctcccaccccgccgttccctgcgcttcatctcatgaggatttctttatgaggcaaatttatattttttaatatcggggggtggaccacgccgccctccatccgtgctgcatgaaaaacattccacgtgccccttgtcgcgcgtctcccatcctgatcccagacccattccttagctatttatccctttcctggtttccgaaaggcaattatatctattatgtataagtaaatatattatatatggatgtgtgtgtgtgcgtgcgcgtgagtgtgtgagcgcttctgcagcctcggcctaggtcacgttggccctcaaagcgagccgttgaattggaaactgcttctagaaactctggctcagcctgtctcgggctgacccttttctgatcgtctcggcccctctgattgttcccgatggtctctctccctctgtcttttctcctccgcctgtgtccatctgaccgttttcacttgtctcctttctgactgtccctgccaatgctccagctgtcgtctgactctgggttcgttggggacatgagattttattttttgtgagtgagactgagggatcgtagatttttacaatctgtatctttgacaattctgggtgcgagtgtgagagtgtgagcagggcttgctcctgccaaccacaattcaatgaatccccgacccccctaccccatgctgtacttgtggttctctttttgtattttgcatctgaccccggggggctgggacagattggcaatgggccgtcccctctccccttggttctgcactgttgcc

SEQ ID NO: 42928 - DNA, 3324 bp, Artificial Sequence
  derived and/or modified sequence
cattcataagactcagagctacggccacggcagggacacgcggaaccaagacttggaaacttgattgttgtggttcttcttgggggttatgaaatttcattaatctttttttttccggggagaaagtttttggaaagattcttccagatatttcttcattttcttttggaggaccgacttactttttttggtcttctttattactcccctccccccgtgggacccgccggacgcgtggaggagaccgtagctgaagctgattctgtacagcgggacagcgctttctgcccctgggggagcaacccctccctcgcccctgggtcctacggagcctgcactttcaagaggtacagcggcatcctgtgggggcctgggcaccgcaggaagactgcacagaaactttgccattgttggaacgggacgttgctccttccccgagcttccccggacagcgtactttgaggactcgctcagctcaccggggactcccacggctcaccccggacttgcaccttacttccccaacccggccatagccttggcttcccggcgacctcagcgtggtcacaggggcccccctgtgcccagggaaatgtttcaggctttccccggagactacgactccggctcccggtgcagctcctcaccctctgccgagtctcaatatctgtcttcggtggactccttcggcagtccacccaccgccgccgcctcccaggagacagatcagttggaggaagaaaaagcagagctggagtcggagatcgccgagctccaaaaggagaaggaacgtctggagtttgtgctggtggcccacaaaccgggctgcaagatcccctacgaagaggggcccgggccgggcccgctggcggaggtgagagatttgccgggctcagcaccggctaaggaagatggcttcagctggctgctgccgcccccgccaccaccgcccctgcccttccagaccagccaagacgcaccccccaacctgacggcttctctctttacacacagtgaagttcaagtcctcggcgaccccttccccgttgttaacccttcgtacacttcttcgtttgtcctcacctgcccggaggtctccgcgttcgccggcgcccaacgcaccagcggcagtgaccagccttccgatcccctgaactcgccctccctcctcgctctgtgaactctttagacacacaaaacaaacaaacacatgggggagagagacttggaagaggaggaggaggaggagaaggaggagagagaggggaagagacaaagtgggtgtgtggcctccctggctcctccgtctgaccctctgcggccactgcgccactgccatcggacaggaggattccttgtgttttgtcctgcctcttgtttctgtgccccggcgaggccggagagctggtgactttggggacagggggtgggaaggggatggacacccccagctgactgttggctctctgacgtcaacccaagctctggggatgggtggggaggggggcgggtgacgcccaccttcgggcagtcctgtgtgaggattaagggacgggggtgggaggtaggctgtggggtgggctggagtcctctccagagaggctcaacaaggaaaaatgccactccctacccaatgtctcccacacccaccctttttttggggtgcctaggttggtttcccctgcactcccgaccttagcttattgatcccacatttccatggtgtgagatcctctttactctgggcagaagtgagccccccccttaaagggaattcgatgcccccctagaataatctcatccccccacccgacttcttttgaaatgtgaacgtccttccttgactgtctagccactccctcccagaaaaactggctctgattggaatttctggcctcctaaggctccccaccccgaaatcagcccccagccttgtttctgatgacagtgttatcccaagaccctgccccctgccagccgaccctcctggccttcctcgttgggccgctctgatttcaggcagcaggggctgctgtgatgccgtcctgctggagtgatttatactgtgaaatgagttggccagattgtggggtgcagctgggtggggcagcacacctctggggggataatgtccccactcccgaaagcctttcctcggtctcccttccgtccatcccccttcttcctcccctcaacagtgagttagactcaagggggtgacagaaccgagaagggggtgacagtcctccatccacgtggcctctctctctctcctcaggaccctcagccctggcctttttctttaaggtcccccgaccaatccccagcctaggacgccaacttctcccaccccttggcccctcacatcctctccaggaagggagtgaggggctgtgacatttttccggagaagatttcagagctgaggctttggtacccccaaacccccaatatttttggactggcagactcaaggggctggaatctcatgattccatgcccgagtccgcccatccctgaccatggttttggctctcccaccccgccgttccctgcgcttcatctcatgaggatttctttatgaggcaaatttatattttttaatatcggggggtggaccacgccgccctccatccgtgctgcatgaaaaacattccacgtgccccttgtcgcgcgtctcccatcctgatcccagacccattccttagctatttatccctttcctggtttccgaaaggcaattatatctattatgtataagtaaatatattatatatggatgtgtgtgtgtgcgtgcgcgtgagtgtgtgagcgcttctgcagcctcggcctaggtcacgttggccctcaaagcgagccgttgaattggaaactgcttctagaaactctggctcagcctgtctcgggctgacccttttctgatcgtctcggcccctctgattgttcccgatggtctctctccctctgtcttttctcctccgcctgtgtccatctgaccgttttcacttgtctcctttctgactgtccctgccaatgctccagctgtcgtctgactctgggttcgttggggacatgagattttattttttgtgagtgagactgagggatcgtagatttttacaatctgtatctttgacaattctgggtgcgagtgtgagagtgtgagcagggcttgctcctgccaaccacaattcaatgaatccccgacccccctaccccatgctgtacttgtggttctctttttgtattttgcatctgaccccggggggctgggacagattggcaatgggccgtcccctctccccttggttctgcactgttgcc

SEQ ID NO: 42929 - DNA, 909 bp, Artificial Sequence
  derived and/or modified sequence
atgttccaagcgttcccaggggactacgacagtgggtctagatgttctagcagtcctagcgccgagtcccagtatcttagcagtgttgactcttttgggagcccgcccaccgcggccgcatcacaggagtgcgccggcctcggagaaatgccgggttcctttgtgcctacagtgacagccattaccacatcacaggatctgcagtggcttgttcaaccaaccctaatctccagtatggcacaatcccaaggacaaccgctggcctcccagcctcccgttgtagatccttatgacatgcctggaaccagctactccactcctggtatgagtggctatagctcagggggcgcatctggatctggcggtcccagcacaagcggtaccacatctggaccgggtcccgcccgcccagctcgcgcaaggcccaggaggcctcgagaggaaacagaaactgaccagctggaggaggagaaagccgagctggaatctgaaattgccgagcttcaaaaagagaaggagcggttagaatttgtcctcgttgcacataaaccaggttgtaagattccctatgaagagggcccaggaccagggccccttgctgaggtacgtgaccttccagggagtgcaccagcaaaagaggacggattcagctggcttttgcctcccccgcccccaccccccctacccttccagactagtcaggacgctccacctaatctaaccgcatctctgtttacgcatagtgaagtacaggtgctcggggatccctttccagtcgtcaatccgtcttataccagctcctttgtattgacatgccccgaggtgtcggcctttgccggcgctcagcgcacttctgggtcggatcaaccatccgacccgctgaacagcccatctctccttgccttatag

SEQ ID NO: 42930 - DNA, 588 bp, Artificial Sequence
  derived and/or modified sequence
atgtttcaggcatttcccggagactacgactccggctcacggtgctccagctctccatccgccgaatctcaatacctcagcagcgtggactcttttggctcccctcctaccgctgccgcgtcacaagaaacagaccagcttgaggaagaaaaagcagaactggaaagtgagatcgccgagctccaaaaagaaaaggagcggctggaattcgtcctggtggcccacaagcctggttgtaaaattccatatgaggagggacccgggccaggccccctggcagaggtgagagatctgcccggcagcgctcctgcaaaggaggacggatttagttggcttctgcccccacctccaccaccaccactgcccttccagaccagccaggacgcccctcctaacctaaccgcctctctttttacccattcagaagtgcaggtgttaggcgaccctttccctgtggtaaaccccagctatacttcttctttcgtgctaacatgtcccgaagtgtctgccttcgccggagcacagaggactagcggatcagaccagccgagcgatcccctgaattctccgtctttactggcactgtag

SEQ ID NO: 42931 - DNA, 909 bp, Artificial Sequence
  derived and/or modified sequence
atgttccaggccttccctggggactatgattctggcagccgctgcagcagcagccccagcgctgagagccagtacctgagctctgtggacagctttggcagccccccaacagctgctgccagccaggagtgtgccggcctgggggagatgcctggcagctttgtgcccaccgtgacagccatcaccaccagccaggacctgcagtggctggtgcagcccaccctcatcagctccatggcccagagccagggccagcccctggccagccagccccctgtggtggacccctatgacatgcctggcaccagctacagcaccccaggcatgagcggctacagcagcggcggggccagcggcagcggcggccccagcaccagcggcaccaccagcggccctggccctgcccggcctgcccgggcccggccccggcggccccgggaggagacagaaacagaccagctggaggaggagaaggccgagctggagagcgagattgctgagctgcagaaggagaaggagcggctggagtttgtgctggtggcccacaagccaggctgcaagatcccctatgaggagggccctggccctggccccctggccgaggtgcgggacctgcccggcagcgccccagccaaggaggatggcttctcctggctgctgcccccacctcctcctccacccctgcccttccagaccagccaggatgccccacccaacctgacagccagcctcttcacccacagcgaggtgcaggtgctgggggaccccttccctgtggtgaaccccagctacaccagcagctttgtgctgacctgcccagaggtgtctgcctttgctggggcccagaggaccagcggcagtgaccagcccagcgaccccctgaacagccccagcctgctggccctgtag

SEQ ID NO: 42932 - DNA, 588 bp, Artificial Sequence
  derived and/or modified sequence
atgttccaggccttccctggggactatgattctggcagccgctgcagcagcagccccagcgctgagagccagtacctgagctctgtggacagctttggcagccccccaacagctgctgccagccaggagacagaccagctggaggaggagaaggccgagctggagagcgagattgctgagctgcagaaggagaaggagcggctggagtttgtgctggtggcccacaagccaggctgcaagatcccctatgaggagggccctggccctggccccctggccgaggtgcgggacctgcccggcagcgccccagccaaggaggatggcttctcctggctgctgcccccacctcctcctccacccctgcccttccagaccagccaggatgccccacccaacctgacagccagcctcttcacccacagcgaggtgcaggtgctgggggaccccttccctgtggtgaaccccagctacaccagcagctttgtgctgacctgcccagaggtgtctgcctttgctggggcccagaggaccagcggcagtgaccagcccagcgaccccctgaacagccccagcctgctggccctgtag

SEQ ID NO: 42933 - DNA, 909 bp, Artificial Sequence
  derived and/or modified sequence
atgttccaggccttccccggcgactacgacagcggcagccggtgcagttcgagtccatccgccgagtctcaatacctgtcctccgtggattctttcggatcaccccccactgcagcagcttcccaggagtgtgccggtctaggggagatgcccggttcgttcgtccctacggtgactgccattaccacaagccaggatctgcagtggctggtgcagcctacgctcatatcgtccatggcacaaagccagggccagcccctagccagccagccaccggtggtcgatccgtatgacatgccaggtacatcctactcaacgccagggatgtcaggatattcctctggaggggcgtccgggtccggagggcccagtacatccggaacaactagcgggccagggccagccagacccgcccgggcacggccaaggagaccccgggaggaaaccgaaaccgaccagctcgaagaagagaaggctgaactggagtccgaaatcgctgaattgcaaaaggaaaaggagcgcctggaattcgttctagtggctcacaagcctggctgcaagattccctacgaggagggaccggggcccgggccactcgctgaagtccgggatctgcctggtagtgctccggccaaggaggacggcttctcctggttgcttccgcctcccccaccaccaccactgccatttcagacgtcgcaggatgctcctcctaacctgaccgcaagcctttttacgcacagcgaggtccaagtcctcggggaccccttcccggtagtgaacccctcctacacaagctcgttcgtgctgacctgccctgaggtgagcgctttcgccggggcccagcgaacaagcggctctgaccagccatctgacccccttaacagcccctccctgctggctctgtag

SEQ ID NO: 42934 - DNA, 588 bp, Artificial Sequence
  derived and/or modified sequence
atgttccaggccttccccggcgactacgacagcggcagccggtgctcttcaagcccttcagctgaatcacaatacctgagctcggtcgacagcttcggaagcccgccgacggcagccgcctctcaggagaccgatcagcttgaagaagagaaagccgagcttgagtccgaaatcgctgagcttcagaaggagaaggaaagactggaatttgtgttggttgcccataagcccggatgcaagataccttatgaagagggacctggcccaggtccattagctgaggtccgtgatctacccggttcagctcccgccaaggaggacggatttagctggctgctccctccaccacccccaccacccctccccttccagacttctcaggacgcgcctcctaatctgacagctagtctgtttacccattcagaggtgcaagtgttaggcgatccctttcctgttgtcaacccgagctacacctcatcctttgtgctcacttgccccgaggtgtctgcgtttgcaggcgctcaacgcacctcaggatccgaccagcctagcgatcctctcaacagcccctctctgctagcactctag

SEQ ID NO: 42935 - DNA, 909 bp, Artificial Sequence
  derived and/or modified sequence
atgtttcaggccttccccggtgattacgattccggctctcgctgcagttcgagcccgtccgctgagtcacagtatttgtcctccgttgacagcttcgggagtccgcctactgcagctgcctctcaggagtgtgccggtctcggtgagatgcctggctcgtttgtccccaccgttaccgcaataaccacctcccaggatctccagtggctcgtgcagcccactctgatcagttccatggcccagtctcagggacagccattggcttctcaaccccctgtggtggatccttatgacatgcccggtacctcctatagtactccaggaatgagcgggtatagctctgggggagcctcaggtagcggcggtcctagtacatcaggaacaacatccggccctggcccagctcgcccagcgagggcgcgtccacggaggcccagagaagagacggagacagatcagctggaggaagagaaagctgaactggaatccgaaatcgccgagctgcaaaaggaaaaggagcgcttggaattcgtgctggtggctcataaacccggttgtaaaattccttatgaggagggccctgggcctgggcctctggccgaggttagggatttacctgggtcggccccagcgaaggaggatgggttctcatggttgcttcctccccctccccctccaccgcttccattccagacatctcaggacgcccctccaaacctgactgccagtctgttcacccactcagaggtgcaggttcttggcgatcctttcccagttgttaacccaagctacacatcttcgttcgtactgacttgccccgaggtatccgccttcgctggggctcagagaacatctggctccgatcagccatccgaccccctgaactccccctctcttcttgcactgtag

SEQ ID NO: 42936 - DNA, 588 bp, Artificial Sequence
  derived and/or modified sequence
atgttccaggcattccctggtgattatgattcagggagccggtgctcgtccagccccagcgcagagagccaatatctctcatctgtggattcgtttggttctccacccaccgcagccgcttctcaggagacagaccagctggaagaagaaaaagcagaactggaaagtgaaattgctgagctgcagaaggaaaaagagcgcctggaattcgtgctagtagcccacaaacctggttgcaagatcccctatgaggaaggtccaggcccaggacctctggctgaagttcgcgatctccctggaagtgctcctgccaaggaggatggattttcatggctgcttcctccccctcctccaccccctctgccgtttcagacaagccaggatgcacctcccaatctcactgctagcttgttcacccactcagaggtgcaggtcctgggagatcccttccccgttgtgaatccgtcctatacatcgtctttcgtcctgacctgtccagaagtgtcagctttcgcaggggctcaacgaacctcagggagcgaccagccatccgaccccctgaatagtccaagccttctagctctgtag

SEQ ID NO: 42937 - DNA, 909 bp, Artificial Sequence
  derived and/or modified sequence
atgttccaggccttccccggcgactacgacagcggcagcagatgcagcagcagccccagcgccgagagccagtacctgagcagcgtggacagcttcggcagcccccccaccgccgccgccagccaggagtgcgccggcctgggcgagatgcccggcagcttcgtgcccaccgtgaccgccatcaccaccagccaggacctgcagtggctggtgcagcccaccctgatcagcagcatggcccagagccagggccagcccctggccagccagccccccgtggtggacccctacgacatgcccggcaccagctacagcacccccggcatgagcggctacagcagcggcggcgccagcggcagcggcggccccagcaccagcggcaccaccagcggccccggccccgccagacccgccagagccagacccagaagacccagagaggagaccgagaccgaccagctggaggaggagaaggccgagctggagagcgagatcgccgagctgcagaaggagaaggagagactggagttcgtgctggtggcccacaagcccggctgcaagatcccctacgaggagggccccggccccggccccctggccgaggtgagagacctgcccggcagcgcccccgccaaggaggacggcttcagctggctgctgcccccccccccccccccccccctgcccttccagaccagccaggacgccccccccaacctgaccgccagcctgttcacccacagcgaggtgcaggtgctgggcgaccccttccccgtggtgaaccccagctacaccagcagcttcgtgctgacctgccccgaggtgagcgccttcgccggcgcccagagaaccagcggcagcgaccagcccagcgaccccctgaacagccccagcctgctggccctgtag

SEQ ID NO: 42938 - DNA, 588 bp, Artificial Sequence
  derived and/or modified sequence
atgttccaggccttccccggcgactacgacagcggcagcagatgcagcagcagccccagcgccgagagccagtacctgagcagcgtggacagcttcggcagcccccccaccgccgccgccagccaggagaccgaccagctggaggaggagaaggccgagctggagagcgagatcgccgagctgcagaaggagaaggagagactggagttcgtgctggtggcccacaagcccggctgcaagatcccctacgaggagggccccggccccggccccctggccgaggtgagagacctgcccggcagcgcccccgccaaggaggacggcttcagctggctgctgcccccccccccccccccccccctgcccttccagaccagccaggacgccccccccaacctgaccgccagcctgttcacccacagcgaggtgcaggtgctgggcgaccccttccccgtggtgaaccccagctacaccagcagcttcgtgctgacctgccccgaggtgagcgccttcgccggcgcccagagaaccagcggcagcgaccagcccagcgaccccctgaacagccccagcctgctggccctgtag

SEQ ID NO: 42939 - protein, 141 aa, Artificial Sequence
  derived and/or modified sequence
MGAGPSLLLAALLLLLSGDGAVRCDTPANCTYLDLLGTWVFQVGSSGSQRDVNCSVMGPQEKKVVVYLQKLDTAYDDLGNSGHFTIIYNQGFEIVLNDYKWFAFFKDVTDFISHLFMQLGTVGIYDLPHLRNKLAMNRRWG

SEQ ID NO: 42940 - DNA, 426 bp, Artificial Sequence
  derived and/or modified sequence
atgggcgcggggccctcactcctgctggccgccctgcttttgctgctgtcaggggacggcgcggtccggtgcgatacacccgctaattgcacctacttggatcttttgggtacttgggtgtttcaggtgggatcatctggcagccaaagagatgtgaactgctcggtcatgggcccccaggagaagaaagtggttgtttatctgcaaaagcttgacaccgcatatgatgatctgggtaactcaggacacttcaccataatctacaatcaaggattcgaaatcgttttgaacgattacaagtggttcgctttcttcaaagatgtgacagacttcatcagccacctgtttatgcagcttggcacagtgggcatctacgatctgccgcacctgagaaataagctggcaatgaaccgacgatgggggtag

SEQ ID NO: 42941 - DNA, 426 bp, Artificial Sequence
  derived and/or modified sequence
atgggcgccggccccagcctgctgctggccgccctgctgctgctgctgtctggagatggagctgtgcgctgtgacaccccagccaactgcacctacctggacctgctgggcacctgggtgttccaggtgggcagcagcggcagccagagagatgtgaactgcagcgtgatgggcccccaggagaagaaggtggtggtgtacctgcagaagctggacacagcctatgatgacctgggcaacagcggccacttcaccatcatctacaaccagggctttgagatcgtgctgaatgactacaagtggtttgccttcttcaaggatgtgacagacttcatcagccacctgttcatgcagctgggcaccgtgggcatctatgacctgccccacctgaggaacaagctggccatgaacagacgctggggctag

SEQ ID NO: 42942 - DNA, 426 bp, Artificial Sequence
  derived and/or modified sequence
atgggcgccggccccagcctgctgctggccgccctgctgctgctgctgtccggagacggagcagttcgctgtgatacgccagccaactgcacatacctagatctgcttgggacctgggtgtttcaggttggctccagcgggtcgcagagggacgtgaactgcagcgtcatgggcccgcaggagaaaaaggttgtggtctatttgcagaaattggacacggcttacgatgatctggggaattccggacacttcacaataatttataaccagggattcgaaatcgtgcttaatgattacaagtggttcgcattttttaaagatgtcactgactttatttcacacttatttatgcagcttggcacggtcgggatttacgacctccctcatctgcgcaacaaacttgccatgaatcgcagatggggatag

SEQ ID NO: 42943 - DNA, 426 bp, Artificial Sequence
  derived and/or modified sequence
atgggagcagggccatctctgctgctggctgccctactgctactgctctctggagatggagccgtgagatgcgatacccctgctaattgcacctacctggacctactagggacctgggtattccaggtgggctcatcaggctcacagagagacgttaactgttccgttatgggaccccaggaaaagaaagtggtagtctatctgcaaaagctggataccgcatatgatgacctgggtaactcaggtcatttcactatcatctataaccagggcttcgaaattgttctgaacgactataaatggtttgccttttttaaagatgtgacagatttcatttcccatctcttcatgcaactcggaaccgttgggatctatgacctgccgcacctaagaaataagctggccatgaataggcgatggggctag

SEQ ID NO: 42944 - DNA, 747 bp, Artificial Sequence
  derived and/or modified sequence
gctagcccgcagcgctcggcttcctggtaattcttcacctcttttctcagctccctgcagcatgggtgctgggccctccttgctgctcgccgccctcctgctgcttctctccggcgacggcgccgtgcgctgcgacacacctgccaactgcacctatcttgacctgctgggcacctgggtcttccaggtgggctccagcggttcccagcgcgatgtcaactgctcggttatgggaccacaagaaaaaaaagtagtggtgtaccttcagaagctggatacagcatatgatgaccttggcaattctggccatttcaccatcatttacaaccaaggctttgagattgtgttgaatgactacaagtggtttgccttttttaaggatgtcactgattttatcagtcatttgttcatgcagctgggaactgtggggatatatgatttgccacatctgaggaacaaactggccatgaacagacgttggggctaagagacagagcagcctgcgacagtgtggacctacctgtagcagctagcaaaggcctctagcagctacagtcccttctggagtctttatttgcatgcaaaatgcaaaggagtcctggtgacctacctccaaggcagctgccctcctgaacactcccttggaaaacagtaaacatcattttggaatgtgaacaaccagagactacacaggagaaaggaaaaaaaaattctgaagatgcaaaatcttgggtggcttcaccgttc

SEQ ID NO: 42945 - DNA, 426 bp, Artificial Sequence
  derived and/or modified sequence
atgggcgccggccccagcctgctgctggccgccctgctgctgctgctgagcggcgacggcgccgtgagatgcgacacccccgccaactgcacctacctggacctgctgggcacctgggtgttccaggtgggcagcagcggcagccagagagacgtgaactgcagcgtgatgggcccccaggagaagaaggtggtggtgtacctgcagaagctggacaccgcctacgacgacctgggcaacagcggccacttcaccatcatctacaaccagggcttcgagatcgtgctgaacgactacaagtggttcgccttcttcaaggacgtgaccgacttcatcagccacctgttcatgcagctgggcaccgtgggcatctacgacctgccccacctgagaaacaagctggccatgaacagaagatggggctag

SEQ ID NO: 42946 - protein, 503 aa, Artificial Sequence
  derived and/or modified sequence
MAAAITDMADLEELSRLSPLPPGSPGSAARGRAEPPEEEEEEEEEEEEAEAEAVAALLLNGGSGGGGGGGGGGVGGGEAETMSEPSPESASQAGEDEDEEEDDEEEEDESSSSGGGEEESSAESLVGSSGGSSSDETRSLSPGAASSSSGDGDGKEGLEEPKGPRGSQGGGGGGSSSSSVVSSGGDEGYGTGGGGSSATSGGRRGSLEMSSDGEPLSRMDSEDSISSTIMDVDSTISSGRSTPAMMNGQGSTTSSSKNIAYNCCWDQCQACFNSSPDLADHIRSIHVDGQRGGVFVCLWKGCKVYNTPSTSQSWLQRHMLTHSGDKPFKCVVGGCNASFASQGGLARHVPTHFSQQNSSKVSSQPKAKEESPSKAGMNKRRKLKNKRRRSLPRPHDFFDAQTLDAIRHRAICFNLSAHIESLGKGHSVVFHSTVIAKRKEDSGKIKLLLHWMPEDILPDVWVNESERHQLKTKVVHLSKLPKDTALLLDPNIYRTMPQKRLKR

SEQ ID NO: 42947 - protein, 301 aa, Artificial Sequence
  derived and/or modified sequence
MYTRRYSSISSTIMDVDSTISSGRSTPAMMNGQGSTTSSSKNIAYNCCWDQCQACFNSSPDLADHIRSIHVDGQRGGVFVCLWKGCKVYNTPSTSQSWLQRHMLTHSGDKPFKCVVGGCNASFASQGGLARHVPTHFSQQNSSKVSSQPKAKEESPSKAGMNKRRKLKNKRRRSLPRPHDFFDAQTLDAIRHRAICFNLSAHIESLGKGHSVVFHSTVIAKRKEDSGKIKLLLHWMPEDILPDVWVNESERHQLKTKVVHLSKLPKDTALLLDPNIYRTMPQKRLKRTLIRKVFNLYLSKQ

SEQ ID NO: 42948 - protein, 517 aa, Artificial Sequence
  derived and/or modified sequence
MAAAITDMADLEELSRLSPLPPGSPGSAARGRAEPPEEEEEEEEEEEEAEAEAVAALLLNGGSGGGGGGGGGGVGGGEAETMSEPSPESASQAGEDEDEEEDDEEEEDESSSSGGGEEESSAESLVGSSGGSSSDETRSLSPGAASSSSGDGDGKEGLEEPKGPRGSQGGGGGGSSSSSVVSSGGDEGYGTGGGGSSATSGGRRGSLEMSSDGEPLSRMDSEDSISSTIMDVDSTISSGRSTPAMMNGQGSTTSSSKNIAYNCCWDQCQACFNSSPDLADHIRSIHVDGQRGGVFVCLWKGCKVYNTPSTSQSWLQRHMLTHSGDKPFKCVVGGCNASFASQGGLARHVPTHFSQQNSSKVSSQPKAKEESPSKAGMNKRRKLKNKRRRSLPRPHDFFDAQTLDAIRHRAICFNLSAHIESLGKGHSVVFHSTVIAKRKEDSGKIKLLLHWMPEDILPDVWVNESERHQLKTKVVHLSKLPKDTALLLDPNIYRTMPQKRLKRTLIRKVFNLYLSKQ

SEQ ID NO: 42949 - protein, 437 aa, Artificial Sequence
  derived and/or modified sequence
MAAAITDMADLEELSRLSPLPPGSPGSAARGRAEPPEEEEEDESSSSGGGEEESSAESLVGSSGGSSSDETRSLSPGAASSSSGDGDGKEGLEEPKGPRGSQGGGGGGSSSSSVVSSGGDEGYGTGGGGSSATSGGRRGSLEMSSDGEPLSRMDSEDSISSTIMDVDSTISSGRSTPAMMNGQGSTTSSSKNIAYNCCWDQCQACFNSSPDLADHIRSIHVDGQRGGVFVCLWKGCKVYNTPSTSQSWLQRHMLTHSGDKPFKCVVGGCNASFASQGGLARHVPTHFSQQNSSKVSSQPKAKEESPSKAGMNKRRKLKNKRRRSLPRPHDFFDAQTLDAIRHRAICFNLSAHIESLGKGHSVVFHSTVIAKRKEDSGKIKLLLHWMPEDILPDVWVNESERHQLKTKVVHLSKLPKDTALLLDPNIYRTMPQKRLKR

SEQ ID NO: 42950 - DNA, 5660 bp, Artificial Sequence
  derived and/or modified sequence
gaggaggaggaggagcaggcgccgccatggccgccgctatcaccgacatggccgacctggaggagctctcccgcctgagccctctgccccccggcagcccgggttcggcggcgcggggccgggctgagccccccgaggaggaggaggaagaggaggaggaggaagaggaggcggaggccgaggcggtggcggcgctgctgctgaacggcggcagcggtgggggcggcggaggcggcggcggaggagtggggggcggcgaggcagagacgatgtcggagccgagccccgagagcgccagccaggccggggaggacgaagacgaggaggaggacgacgaggaggaggaagatgagagcagcagcagcggcgggggtgaggaggagagtagcgccgagagcctggtgggcagcagcggcgggagcagcagcgacgagacccgctcgttgagccccggcgccgccagcagcagcagcggggatggggacggcaaggagggcctggaggagcccaagggaccgcggggcagccagggcggcggcgggggcggcagcagtagcagcagcgtagtctccagcggcggcgacgagggctacgggactgggggaggcggaagcagcgcgacctccgggggccggcggggcagcttggagatgtcgtcggatggggaacccctgagccgcatggactcggaggacagcataagcagtactataatggatgtagacagcacaatttccagtgggcgttcaactccagcaatgatgaatggacaaggaagcactacttcttcaagcaaaaatattgcctataattgttgttgggaccagtgccaggcttgcttcaactctagcccagatctggcagatcacatccgttccatacatgtagatggtcagcgaggaggggtatttgtttgcttatggaaaggttgtaaagtatataacactccatctaccagtcaaagttggttacaaaggcatatgctgacacacagtggagacaaacctttcaagtgtgttgttggtggctgcaatgccagctttgcttctcagggagggctagctcgtcatgtacccacacacttcagtcagcagaactcctcaaaagtttctagccagccaaaggccaaagaagaatctccttctaaagctggaatgaacaaaaggaggaaattaaagaacaaaagacgacgctcattaccacggccacatgatttcttcgatgcacaaacactggatgcgataagacatcgagccatatgctttaacctctcagctcatatagaaagtttagggaagggacacagtgttgtttttcatagtactgtaatagctaagagaaaagaagattctgggaagatcaaacttttgcttcattggatgcctgaagacattctgcctgatgtgtgggtgaatgaaagtgaacgacatcagttaaaaactaaagtagttcatttatcaaagctacccaaagatactgccttgcttttggacccaaacatatacagaacaatgccgcagaagaggttgaagaggtaaaaaataaataaatacataaaaagcaaacaagcggggacacctgcagtcttagtcactgacaatgggtttagggaaagttgcacattagagtcaaccccttcttttttttttttttttttttaaatccagtatttaggataatatttatgcttagtgtaaacattctgtgaatgaagtagactcttcggtggaatatattaatatattactgtatatccacattttcatggaatggtactgtgggagactgagcaaacactcttttggcaacttagtagaacagcttcttaaaggctttgcatgcttgctgctttaagctgcttttttttttcttttcttccctttagtgatttcagtagtttatattggaaagaaaaacaattacaacatgtgcccttacaaataccaaaagcactgtaaggatatttgtcttgacagtgtttattgatttgaagtcatattaggaaatatttagacaatgaaaattatcaagagataatttacctttcaattatgataaatagatgtgattggttgccatttgtgttcttttgcagaactctgataagaaaagtgttcaatttgtatttaagcaaacagtgaacgacgtttgcaatcaactaaaaattcgtctatcgaattagggctgaaaattactgttaaagagtgttgcagtatgtctggtggctcccttttcaggactagggctttctcatggagtacagtatgttaatatttacctatataactaatctgttaacggtttttgaaaaacctttcaaattatttgaataatcttcatattttcatttaacctatatgactctaattttttttctgaggaaatcatttggtttttgagttgttttttcttaatgtaagaaaaattgtattttttttacaagtatcttcaaactgaatcttttatgcaccaaagttggtcttgaaaaggaaaataaaatcactttcttgcttggtaagcaagaagccatatcgattttttttaacttacagaaatggaaatatgtgtaacttgttagtattgtattaaacaaatgttgcatagagataatagaacattgcttgtaaataattcagcagatttgtaatatatttttatattttgaaatgtactgtagatgttttctagaggcatgaaagttaaatgtatatattatggtagaaataatattgaaggatattgtacttcactagtgctgccagaggaattgttaataaaagcaccttctttaacaataaatgtctttcacagacttaagggactatgtactactgttaatatctctaagaacaaaacacattgaacatccttccagaaagtctttgagggaggacctatacccataatagaattatggcactcatttctgacagtgatcaagaaatcagttatttccttactgttggaaggacattgtaaagtatgtggttatatgcagtgaaactgcagaaaatactcctggttgaggagttttcactttactacagtgatataaaaaccagcagtttttacactaaattttttaaagaaatattagacaaaaatatagaattaaaacctttggttccaaaatgggaaaggttccacgatacataaatcatttctcatttgctttaaaaaatttaaaagtgtaaaaattatgagagactttattcgttaacaatgggggtaaagagctatatacatgaaaatgagtcttataaaattaagtgaagtgcaaataaaagcactgctactataagacattctggaatggttgtttaataagggtattatccatttgatctatagcaatgtgattttatttttaaaaagaaaagcagtgtgttttctttttttgttgttttcttttgcttaagcacttcatcaattgctttattctgtatctgcgaagtaatctgcaatctcttttgttctttttaaaatttgatttgttataaaattgccaaatagaagtgtttcagatacatagtttgtacctgtatttttattttattgcctcatgttcttgtaagtcattcttaattgaccaatgattgtagaccttgcttgagtattttttctaataaaacaaagcaaatcacatttagcttcaaattgtaacaattcaattgaattttaaaatgacacctgaaaagatacatctgatattttctatatagagcacagtaaataagttttttcattgtgtagaaatacttagatgtcaaaaccagatttcgtgatccttgattaacttctgagtactcaatcaatcataatccttttgctgcttatctgatgttggtttgatactgttaacacaccaaaaagaatatggaattgaaatgagctagctttataacttgtatgtatacatatatacacataacatccaattatgactgggtaataagtgtgaaaattttaatttgtggttttcatttattaatgtctgcccatctgtattgttgctcctaccttcaaatatgacacctgaaataataagtctgttgtccagaatttatgtattgttcagcatcaagcaaactacagctcacaagcatacccatttatatgttgtctatgcctgctttctcctgcagtggcagaattgagtggtgagaccttaggtcctgcaagcccccaatttttactacaggttggcaatccctaatccaaaaatctgacataaaaaatgctccaaagttcaaaactttctgagtgctgacatcatgctgcaagtggaaaattccacgcctgacctcatgtgactggtcatagtcaaaacaattaagactttgtttcatgcacaaaattattaaaactgttgtataaaattaccttcagtctatgtgtataaggtgtttgtgagatataaatgaactttatgtttagtcttggatcgcatttctgagtctcattatgtatatgcagatactcaaaaatctgaaaaaaatcaaaaatctgaaatacttctggtcccaagcatttcggataagggatactcagcctgtctctggtcctttaagaaaaagttttcgattcctttgtctagttgacaaaaagtttggaaacataaacttagaccacacaacttgcattttaatatgacaatgttgatcttggtaataagccagtacattaaattttagtgaaagctgtttcatgtattttacagtaaatactgccatattaggtacctacaacaaatggtggtttttggaaacttttacggtgggtttttaaagttattaatagtccatcatttcatcatttgtgtttctgtatttattttgctaagaactaaataagattttgtacatcagattgtgtttgaaccgtaaggcacatctgctttatctaaaagaatcttaaggtggaaatagtgtaaaatttaaaattttttatatttctaataaactttttatatataaatgttacctaaagtggacacatgttacttctgaatttcacatgaaaggaaattaaagatggacaataattatctctcaatattttaagatttgttttactaattgaaaacagtatgtcagtaaatctttggccttagtgcttttttcccccttttacacattaataaaatgttttaaatatggtaatactcttaaaacggtagaatttgccacagttgtttaaagcatttttattttttctttgaattcttaattcatggtgaacagatgttgggttcttaaaatataaaaatgagaaaatatgtattaaaaatacttgatagagggttttctctttaatcacaacttaaaaaaagaaacctttaatacctctgcataagttctctgaaagaacttaaattcttagtttatatgaaaactgatatgtatgtctgtgtaacaaagcctgttgggtacaggtctacaaggagatactttgtttctaaaaaaggagttaaatcgtgtcacctgaattttttttttttgagataagtggacattttggggattttggttaaaacatatttctctattctaaaaattacagaatatgtattcataaaagggaagaaattgttagaaaatttcctgtgtacgtagtttgtttttaaattaaagaatcttgtgacctggtgtaggacattt

SEQ ID NO: 42951 - DNA, 1554 bp, Artificial Sequence
  derived and/or modified sequence
atggctgccgccatcacggatatggctgacctggaagagttgtctaggcttagccctttgcctccagggagccccggctccgcagccagggggcgcgccgaaccccctgaggaagaggaggaagaggaagaagaagaggaggaggctgaagcggaagccgtggcggccctgctcttgaatggcggtagtgggggcggcggcgggggcggcggtggaggcgtcggcggcggagaagctgaaactatgtctgaaccaagcccagagtccgctagccaggcaggggaggatgaggatgaggaagaggatgacgaggaggaggaagatgaaagtagcagcagcgggggcggcgaggaggaatccagtgcagaaagcctggtgggcagctctggtggctcctcttccgacgagacacggagtctttcacctggcgccgctagcagttcctctggcgacggcgacggcaaggaaggcctcgaagaacctaaaggtccacgcggatcgcaggggggcggcggcgggggctccagttcgtcgagtgtcgtgtccagcggcggagatgagggatacggcaccggaggtggaggttcgtcggccacgtccggaggaagaagaggatcattagaaatgagcagcgatggagaacccctgagtagaatggactccgaggactcaatttcatcaacaataatggatgtggactccaccatatcctccggccggagtactcccgctatgatgaatggccaaggaagtaccacaagttccagtaaaaacatcgcttacaactgctgctgggatcagtgccaagcatgcttcaattcaagcccggacctcgctgaccacatccgctcaattcacgtagacgggcaaaggggaggcgtgttcgtttgtctctggaaggggtgcaaagtgtataataccccctccacatcccagtcttggctccagcgacacatgttaacacactctggagacaaacccttcaaatgtgtggtgggaggctgcaacgcaagctttgctagccagggcggtctagcgagacatgtgccaactcacttctcccagcagaacagcagtaaagtgagcagccagccaaaagccaaggaggagtccccctctaaagccggcatgaacaagcgccgcaaactcaaaaacaagcgcagacgatccctccccaggccgcatgatttcttcgatgcgcaaaccctggacgccattcgacacagagcaatttgctttaatttgtccgcccacatcgagtctctgggtaagggtcatagcgtggtgttccacagtaccgtgatcgccaaacgcaaagaggattccggtaagatcaaattactgctccactggatgcccgaagatatattgcctgacgtgtgggtgaacgagagcgaacgtcaccagctgaagactaaggttgtacacctctctaagcttcctaaggacaccgcactgttactcgatccaaatatttatcggactatgccacagaagaggcttaaaaggaccctcataagaaaagtcttcaacctctatctgagtaaacaatag

SEQ ID NO: 42952 - DNA, 1554 bp, Artificial Sequence
  derived and/or modified sequence
atggctgctgccatcacagacatggctgacctggaggagctgagccggctgagccccctgcccccaggcagccctggcagcgctgcccggggccgggcagagcccccagaggaggaggaggaggaggaggaggaggaggaggaggccgaggccgaggccgtggccgccctgctgctgaatggaggcagcggcggcggcggcggcggcggcggcggcggcgtgggcggcggggaggccgagaccatgtctgagcccagccctgagagcgccagccaggccggagaagatgaagatgaggaggaggatgatgaggaggaggaggatgagagcagcagcagcggcggcggggaggaggagagcagcgctgagagcctggtgggcagcagcggcggcagcagcagtgatgagaccaggagcctgagccctggggccgccagcagcagcagtggagatggagatggcaaggagggcctggaggagcccaagggcccccggggcagccagggcggcggcggcggcggcagcagcagcagctctgtggtgtcctctggaggagatgagggctatggaactggaggcggcggcagcagcgccaccagcggcggcagaagaggcagcctggagatgagcagtgatggagagcccctgagcaggatggattctgaggacagcatcagcagcaccatcatggatgtggacagcaccatcagcagcggccgcagcaccccagccatgatgaatggccagggcagcaccaccagcagcagcaagaacatcgcctacaactgctgctgggaccagtgccaggcctgcttcaacagcagcccagacctggccgaccacatccgcagcatccacgtggatggccagagaggaggagtgtttgtgtgcctgtggaagggctgcaaggtgtacaacacccccagcaccagccagagctggctgcagaggcacatgctgacccacagcggggacaagcccttcaagtgtgtggtgggcggctgcaatgccagctttgccagccagggcggcctggcccggcacgtgcccacccacttcagccagcagaacagcagcaaggtgagcagccagcccaaggccaaggaggagagccccagcaaggccggcatgaacaagaggaggaagctgaagaacaagagaagaagaagcctgccccggccccatgacttctttgatgcccagaccctggatgccatccgccaccgggccatctgcttcaacctgagcgcccacatcgagagcctgggcaagggccacagcgtggtgttccacagcacagtgattgccaagaggaaggaggacagcggcaagatcaagctgctgctgcactggatgcctgaggacatcctgcctgatgtgtgggtgaatgaaagtgagcggcaccagctgaagaccaaggtggtgcacctgagcaagctgcccaaggacacagccctgctgctggaccccaacatctaccgcaccatgccccagaagaggctgaagaggaccctcatcaggaaggtgttcaacctgtacctgagcaagcagtag

SEQ ID NO: 42953 - DNA, 3620 bp, Artificial Sequence
  derived and/or modified sequence
catggccgccgctatcaccgacatggccgacctggaggagctctcccgcctgagccctctgccccccggcagcccgggttcggcggcgcggggccgggctgagccccccgaggaggaggaggaagaggaggaggaggaagaggaggcggaggccgaggcggtggcggcgctgctgctgaacggcggcagcggtgggggcggcggaggcggcggcggaggagtggggggcggcgaggcagagacgatgtcggagccgagccccgagagcgccagccaggccggggaggacgaagacgaggaggaggacgacgaggaggaggaagatgagagcagcagcagcggcgggggtgaggaggagagtagcgccgagagcctggtgggcagcagcggcgggagcagcagcgacgagacccgctcgttgagccccggcgccgccagcagcagcagcggggatggggacggcaaggagggcctggaggagcccaagggaccgcggggcagccagggcggcggcgggggcggcagcagtagcagcagcgtagtctccagcggcggcgacgagggctacgggactgggggaggcggaagcagcgcgacctccgggggccggcggggcagcttggagatgtcgtcggatggggaacccctgagccgcatggactcggaggacagcataagcagtactataatggatgtagacagcacaatttccagtgggcgttcaactccagcaatgatgaatggacaaggaagcactacttcttcaagcaaaaatattgcctataattgttgttgggaccagtgccaggcttgcttcaactctagcccagatctggcagatcacatccgttccatacatgtagatggtcagcgaggaggggtatttgtttgcttatggaaaggttgtaaagtatataacactccatctaccagtcaaagttggttacaaaggcatatgctgacacacagtggagacaaacctttcaagtgtgttgttggtggctgcaatgccagctttgcttctcagggagggctagctcgtcatgtacccacacacttcagtcagcagaactcctcaaaagtttctagccagccaaaggccaaagaagaatctccttctaaagctggaatgaacaaaaggaggaaattaaagaacaaaagacgacgctcattaccacggccacatgatttcttcgatgcacaaacactggatgcgataagacatcgagccatatgctttaacctctcagctcatatagaaagtttagggaagggacacagtgttgtttttcatagtactgtaatagctaagagaaaagaagattctgggaagatcaaacttttgcttcattggatgcctgaagacattctgcctgatgtgtgggtgaatgaaagtgaacgacatcagttaaaaactaaagtagttcatttatcaaagctacccaaagatactgccttgcttttggacccaaacatatacagaacaatgccgcagaagaggttgaagaggtaaaaaataaataaatacataaaaagcaaacaagcggggacacctgcagtcttagtcactgacaatgggtttagggaaagttgcacattagagtcaaccccttcttttttttttttttttttttaaatccagtatttaggataatatttatgcttagtgtaaacattctgtgaatgaagtagactcttcggtggaatatattaatatattactgtatatccacattttcatggaatggtactgtgggagactgagcaaacactcttttggcaacttagtagaacagcttcttaaaggctttgcatgcttgctgctttaagctgcttttttttttcttttcttccctttagtgatttcagtagtttatattggaaagaaaaacaattacaacatgtgcccttacaaataccaaaagcactgtaaggatatttgtcttgacagtgtttattgatttgaagtcatattaggaaatatttagacaatgaaaattatcaagagataatttacctttcaattatgataaatagatgtgattggttgccatttgtgttcttttgcagaactctgataagaaaagtgttcaatttgtatttaagcaaacagtgaacgacgtttgcaatcaactaaaaattcgtctatcgaattagggctgaaaattactgttaaagagtgttgcagtatgtctggtggctcccttttcaggactagggctttctcatggagtacagtatgttaatatttacctatataactaatctgttaacggtttttgaaaaacctttcaaattatttgaataatcttcatattttcatttaacctatatgactctaattttttttctgaggaaatcatttggtttttgagttgttttttcttaatgtaagaaaaattgtattttttttacaagtatcttcaaactgaatcttttatgcaccaaagttggtcttgaaaaggaaaataaaatcactttcttgcttggtaagcaagaagccatatcgattttttttaacttacagaaatggaaatatgtgtaacttgttagtattgtattaaacaaatgttgcatagagataatagaacattgcttgtaaataattcagcagatttgtaatatatttttatattttgaaatgtactgtagatgttttctagaggcatgaaagttaaatgtatatattatggtagaaataatattgaaggatattgtacttcactagtgctgccagaggaattgttaataaaagcaccttctttaacaataaatgtctttcacagacttaagggactatgtactactgttaatatctctaagaacaaaacacattgaacatccttccagaaagtctttgagggaggacctatacccataatagaattatggcactcatttctgacagtgatcaagaaatcagttatttccttactgttggaaggacattgtaaagtatgtggttatatgcagtgaaactgcagaaaatactcctggttgaggagttttcactttactacagtgatataaaaaccagcagtttttacactaaattttttaaagaaatattagacaaaaatatagaattaaaacctttggttccaaaatgggaaaggttccacgatacataaatcatttctcatttgctttaaaaaatttaaaagtgtaaaaattatgagagactttattcgttaacaatgggggtaaagagctatatacatgaaaatgagtcttataaaattaagtgaagtgcaaataaaagcactgctactataagacattctggaatggttgtttaataagggtattatccatttgatctatagcaatgtgattttatttttaaaaagaaaagcagtgtgttttctttttttgttgttttcttttgcttaagcacttcatcaattgctttattctgtatctgcgaagtaatctgcaatctcttttgttctttttaaaatttgatttgttataaaattgccaaatagaagtgtttcagatacatagtttgtacctgtatttttattttattgcctcatgttcttgtaagtcattcttaattgaccaatgattgtagaccttgcttgagtattttttctaataaaacaaagcaaatcaca

SEQ ID NO: 42954 - DNA, 2235 bp, Artificial Sequence
  derived and/or modified sequence
gaggaggaggaggagcaggcgccgccatggccgccgctatcaccgacatggccgacctggaggagctctcccgcctgagccctctgccccccggcagcccgggttcggcggcgcggggccgggctgagccccccgaggaggaggaggaagaggaggaggaggaagaggaggcggaggccgaggcggtggcggcgctgctgctgaacggcggcagcggtgggggcggcggaggcggcggcggaggagtggggggcggcgaggcagagacgatgtcggagccgagccccgagagcgccagccaggccggggaggacgaagacgaggaggaggacgacgaggaggaggaagatgagagcagcagcagcggcgggggtgaggaggagagtagcgccgagagcctggtgggcagcagcggcgggagcagcagcgacgagacccgctcgttgagccccggcgccgccagcagcagcagcggggatggggacggcaaggagggcctggaggagcccaagggaccgcggggcagccagggcggcggcgggggcggcagcagtagcagcagcgtagtctccagcggcggcgacgagggctacgggactgggggaggcggaagcagcgcgacctccgggggccggcggggcagcttggagatgtcgtcggatggggaacccctgagccgcatggactcggaggacagcataagcagtactataatggatgtagacagcacaatttccagtgggcgttcaactccagcaatgatgaatggacaaggaagcactacttcttcaagcaaaaatattgcctataattgttgttgggaccagtgccaggcttgcttcaactctagcccagatctggcagatcacatccgttccatacatgtagatggtcagcgaggaggggtatttgtttgcttatggaaaggttgtaaagtatataacactccatctaccagtcaaagttggttacaaaggcatatgctgacacacagtggagacaaacctttcaagtgtgttgttggtggctgcaatgccagctttgcttctcagggagggctagctcgtcatgtacccacacacttcagtcagcagaactcctcaaaagtttctagccagccaaaggccaaagaagaatctccttctaaagctggaatgaacaaaaggaggaaattaaagaacaaaagacgacgctcattaccacggccacatgatttcttcgatgcacaaacactggatgcgataagacatcgagccatatgctttaacctctcagctcatatagaaagtttagggaagggacacagtgttgtttttcatagtactgtaatagctaagagaaaagaagattctgggaagatcaaacttttgcttcattggatgcctgaagacattctgcctgatgtgtgggtgaatgaaagtgaacgacatcagttaaaaactaaagtagttcatttatcaaagctacccaaagatactgccttgcttttggacccaaacatatacagaacaatgccgcagaagaggttgaagagaactctgataagaaaagtgttcaatttgtatttaagcaaacagtgaacgacgtttgcaatcaactaaaaattcgtctatcgaattagggctgaaaattactgttaaagagtgttgcagtatgtctggtggctcccttttcaggactagggctttctcatggagtacagtatgttaatatttacctatataactaatctgttaacggtttttgaaaaacctttcaaattatttgaataatcttcatattttcatttaacctatatgactctaattttttttctgaggaaatcatttggtttttgagttgttttttcttaatgtaagaaaaattgtattttttttacaagtatcttcaaactgaatcttttatgcaccaaagttggtcttgaaaaggaaaataaaatcactttcttgcttggtaagcaagaagccatatcgattttttttaacttacagaaatggaaatatgtgtaacttgttagtattgtattaaacaaatgttgcatagagataatagaacattgcttgtaaataattcagcagatttgtaatatatttttatattttgaaatgtactgtagatgttttctagaggcatgaaagttaaatgtatatattatggtagaaataatattgaaggatattgtacttcactagtgctgccagaggaattgttaataaaagcaccttctttaacaat

SEQ ID NO: 42955 - DNA, 3430 bp, Artificial Sequence
  derived and/or modified sequence
aggcgccgccatggccgccgctatcaccgacatggccgacctggaggagctctcccgcctgagccctctgccccccggcagcccgggttcggcggcgcggggccgggctgagccccccgaggaggaggaggaagatgagagcagcagcagcggcgggggtgaggaggagagtagcgccgagagcctggtgggcagcagcggcgggagcagcagcgacgagacccgctcgttgagccccggcgccgccagcagcagcagcggggatggggacggcaaggagggcctggaggagcccaagggaccgcggggcagccagggcggcggcgggggcggcagcagtagcagcagcgtagtctccagcggcggcgacgagggctacgggactgggggaggcggaagcagcgcgacctccgggggccggcggggcagcttggagatgtcgtcggatggggaacccctgagccgcatggactcggaggacagcataagcagtactataatggatgtagacagcacaatttccagtgggcgttcaactccagcaatgatgaatggacaaggaagcactacttcttcaagcaaaaatattgcctataattgttgttgggaccagtgccaggcttgcttcaactctagcccagatctggcagatcacatccgttccatacatgtagatggtcagcgaggaggggtatttgtttgcttatggaaaggttgtaaagtatataacactccatctaccagtcaaagttggttacaaaggcatatgctgacacacagtggagacaaacctttcaagtgtgttgttggtggctgcaatgccagctttgcttctcagggagggctagctcgtcatgtacccacacacttcagtcagcagaactcctcaaaagtttctagccagccaaaggccaaagaagaatctccttctaaagctggaatgaacaaaaggaggaaattaaagaacaaaagacgacgctcattaccacggccacatgatttcttcgatgcacaaacactggatgcgataagacatcgagccatatgctttaacctctcagctcatatagaaagtttagggaagggacacagtgttgtttttcatagtactgtaatagctaagagaaaagaagattctgggaagatcaaacttttgcttcattggatgcctgaagacattctgcctgatgtgtgggtgaatgaaagtgaacgacatcagttaaaaactaaagtagttcatttatcaaagctacccaaagatactgccttgcttttggacccaaacatatacagaacaatgccgcagaagaggttgaagaggtaaaaaataaataaatacataaaaagcaaacaagcggggacacctgcagtcttagtcactgacaatgggtttagggaaagttgcacattagagtcaaccccttcttttttttttttttttttttaaatccagtatttaggataatatttatgcttagtgtaaacattctgtgaatgaagtagactcttcggtggaatatattaatatattactgtatatccacattttcatggaatggtactgtgggagactgagcaaacactcttttggcaacttagtagaacagcttcttaaaggctttgcatgcttgctgctttaagctgcttttttttttcttttcttccctttagtgatttcagtagtttatattggaaagaaaaacaattacaacatgtgcccttacaaataccaaaagcactgtaaggatatttgtcttgacagtgtttattgatttgaagtcatattaggaaatatttagacaatgaaaattatcaagagataatttacctttcaattatgataaatagatgtgattggttgccatttgtgttcttttgcagaactctgataagaaaagtgttcaatttgtatttaagcaaacagtgaacgacgtttgcaatcaactaaaaattcgtctatcgaattagggctgaaaattactgttaaagagtgttgcagtatgtctggtggctcccttttcaggactagggctttctcatggagtacagtatgttaatatttacctatataactaatctgttaacggtttttgaaaaacctttcaaattatttgaataatcttcatattttcatttaacctatatgactctaattttttttctgaggaaatcatttggtttttgagttgttttttcttaatgtaagaaaaattgtattttttttacaagtatcttcaaactgaatcttttatgcaccaaagttggtcttgaaaaggaaaataaaatcactttcttgcttggtaagcaagaagccatatcgattttttttaacttacagaaatggaaatatgtgtaacttgttagtattgtattaaacaaatgttgcatagagataatagaacattgcttgtaaataattcagcagatttgtaatatatttttatattttgaaatgtactgtagatgttttctagaggcatgaaagttaaatgtatatattatggtagaaataatattgaaggatattgtacttcactagtgctgccagaggaattgttaataaaagcaccttctttaacaataaatgtctttcacagacttaagggactatgtactactgttaatatctctaagaacaaaacacattgaacatccttccagaaagtctttgagggaggacctatacccataatagaattatggcactcatttctgacagtgatcaagaaatcagttatttccttactgttggaaggacattgtaaagtatgtggttatatgcagtgaaactgcagaaaatactcctggttgaggagttttcactttactacagtgatataaaaaccagcagtttttacactaaattttttaaagaaatattagacaaaaatatagaattaaaacctttggttccaaaatgggaaaggttccacgatacataaatcatttctcatttgctttaaaaaatttaaaagtgtaaaaattatgagagactttattcgttaacaatgggggtaaagagctatatacatgaaaatgagtcttataaaattaagtgaagtgcaaataaaagcactgctactataagacattctggaatggttgtttaataagggtattatccatttgatctatagcaatgtgattttatttttaaaaagaaaagcagtgtgttttctttttttgttgttttcttttgcttaagcacttcatcaattgctttattctgtatctgcgaagtaatctgcaatctcttttgttctttttaaaatttgatttgttataaaattgccaaatagaagtgtttcagatacatagtttgtacctgtatttttattttattgcctcatgttcttgtaagtcattcttaattgaccaatgattgtagaccttgcttgagtattttttctaataaaacaaagcaaatcac

SEQ ID NO: 42956 - DNA, 1554 bp, Artificial Sequence
  derived and/or modified sequence
atggccgccgccatcaccgacatggccgacctggaggagctgagccggctctctccgcttcctccgggttcgcccggatccgccgcacggggacgtgctgagcccccagaggaagaagaagaggaagaggaggaagaagaggaagccgaggccgaggctgtggccgccctgctgctgaatggcggttctggaggcggtgggggcgggggtggtgggggcgttgggggcggggaggccgaaacgatgagcgagccttccccagagagcgctagccaggccggtgaagacgaggacgaggaggaggacgatgaagaggaggaggatgagtcatccagcagcggcggcggcgaagaagagagttccgctgaatccctcgtgggatcttctggtggctcctcgagcgacgaaacaaggtctctgtcgccaggcgcggccagcagcagctcaggagatggcgatggaaaggaggggttggaagagcctaaggggcctagaggaagtcaggggggcggggggggggggagttcctcgtccagcgtcgtctcttcgggcggagacgaaggctatggcacaggcggcggagggtcaagtgccaccagtggaggccgccgcggaagccttgagatgagcagtgacggcgaaccgctttctagaatggattccgaagactccatctcttccaccatcatggacgtagactccaccatctcttccggaagaagcacccctgctatgatgaatggccaaggaagtaccactagctcttcaaagaatatagcatataattgttgttgggaccagtgccaagcatgtttcaattctagtcccgaccttgccgaccatatccgaagtatacatgtggatggacaacggggtggcgtgtttgtttgcctgtggaagggttgtaaagtgtacaataccccctcgacctctcaatcatggctccagaggcatatgctgacacacagcggagataaaccatttaagtgcgtagtgggaggatgtaacgctagtttcgcctcacaaggaggactcgcccggcacgttcctacccacttttctcagcagaacagctccaaggtttcctcgcagccaaaggctaaggaggaatctccgtcgaaggctggtatgaataagaggagaaaactcaaaaacaaacgacgtcggtcgcttccccgcccccacgacttcttcgatgcgcaaactctggacgcaatccgtcaccgtgctatctgcttcaacctttcagcgcacatagagtccctcggaaaaggccattccgtcgtgtttcacagcacagtgattgctaagcggaaggaagattccgggaagatcaagctccttctccattggatgccggaggacattctccccgacgtctgggttaatgagtcagagcgccaccagctcaaaacaaaggtggtacatttgagtaagcttcctaaggacaccgcactgctcctggatcctaatatatacagaaccatgccccagaagagacttaaacgcaccctgatacgtaaagtgttcaatctatacttgagcaaacagtag

SEQ ID NO: 42957 - DNA, 1554 bp, Artificial Sequence
  derived and/or modified sequence
atggccgctgccataacagacatggcagatctggaagaactatcacgcctgtcaccgctgccgcctggcagtcccggttctgcggcaagagggcgagctgagcctccggaggaggaagaggaagaagaggaggaggaagaagaggcagaagccgaggccgtggcagcgctgctgctgaatggagggtctgggggtgggggtggtggcggtggcggtggcgtcggagggggagaggcagaaacaatgagcgaacctagccctgaaagtgctagtcaggccggagaagacgaggatgaagaagaggatgacgaggaggaagaggatgaatcgtcttcatcgggtgggggagaagaagaaagttctgcagaatctctggtgggatctagtgggggttcatcttctgacgagacacgttctctctcacctggagcggcatcaagttcatcaggggatggcgatggaaaggagggccttgaggagccaaaaggccctaggggcagccagggaggaggtggcggaggctcctcaagtagcagtgtggtctcatcaggcggtgacgagggctatggaaccgggggtggcggaagctctgccacctctggcggtaggcggggatccctcgaaatgtcctccgatggagagcccctgagtaggatggactcagaagatagtatctccagcaccattatggacgttgactccaccatcagtagtgggagatctactcccgctatgatgaatgggcagggatctaccactagcagtagcaaaaatatcgcatacaattgttgttgggatcaatgtcaggcttgtttcaatagcagcccagatctggccgaccacattaggtccattcatgtcgacggacagcgcggaggcgtatttgtctgcctctggaagggatgcaaagtatacaatacacctagcaccagtcaatcttggttacaaagacatatgctaacccactctggagataagccgtttaagtgcgtggtgggaggatgcaacgcttcctttgcaagtcagggaggtcttgcgcgtcacgtcccgactcatttctctcaacaaaactccagcaaggtgagctctcagcccaaagccaaagaggagtcccccagcaaggccggaatgaataagcgaagaaagttaaagaacaaacgtaggaggtctttgccgagaccccatgactttttcgacgcacagaccttggacgcaatacggcaccgtgccatatgtttcaatctatcggctcacattgagtcgttgggtaaagggcactccgtcgtttttcacagcacagtcatcgctaagcggaaggaggattccggtaaaattaagctgttgctgcattggatgccagaggacatcctcccagacgtctgggtcaatgagagtgaacggcatcagctgaaaaccaaagtcgtccatttgagcaaattgcccaaagacacagcactgttactggacccaaatatctataggactatgcctcagaagaggctcaagaggacgctcatccgcaaggtgttcaatttgtacttaagcaaacagtag

SEQ ID NO: 42958 - DNA, 1554 bp, Artificial Sequence
  derived and/or modified sequence
atggccgccgccatcaccgacatggccgacctggaggagctgagcagactgagccccctgccccccggcagccccggcagcgccgccagaggcagagccgagccccccgaggaggaggaggaggaggaggaggaggaggaggaggccgaggccgaggccgtggccgccctgctgctgaacggcggcagcggcggcggcggcggcggcggcggcggcggcgtgggcggcggcgaggccgagaccatgagcgagcccagccccgagagcgccagccaggccggcgaggacgaggacgaggaggaggacgacgaggaggaggaggacgagagcagcagcagcggcggcggcgaggaggagagcagcgccgagagcctggtgggcagcagcggcggcagcagcagcgacgagaccagaagcctgagccccggcgccgccagcagcagcagcggcgacggcgacggcaaggagggcctggaggagcccaagggccccagaggcagccagggcggcggcggcggcggcagcagcagcagcagcgtggtgagcagcggcggcgacgagggctacggcaccggcggcggcggcagcagcgccaccagcggcggcagaagaggcagcctggagatgagcagcgacggcgagcccctgagcagaatggacagcgaggacagcatcagcagcaccatcatggacgtggacagcaccatcagcagcggcagaagcacccccgccatgatgaacggccagggcagcaccaccagcagcagcaagaacatcgcctacaactgctgctgggaccagtgccaggcctgcttcaacagcagccccgacctggccgaccacatcagaagcatccacgtggacggccagagaggcggcgtgttcgtgtgcctgtggaagggctgcaaggtgtacaacacccccagcaccagccagagctggctgcagagacacatgctgacccacagcggcgacaagcccttcaagtgcgtggtgggcggctgcaacgccagcttcgccagccagggcggcctggccagacacgtgcccacccacttcagccagcagaacagcagcaaggtgagcagccagcccaaggccaaggaggagagccccagcaaggccggcatgaacaagagaagaaagctgaagaacaagagaagaagaagcctgcccagaccccacgacttcttcgacgcccagaccctggacgccatcagacacagagccatctgcttcaacctgagcgcccacatcgagagcctgggcaagggccacagcgtggtgttccacagcaccgtgatcgccaagagaaaggaggacagcggcaagatcaagctgctgctgcactggatgcccgaggacatcctgcccgacgtgtgggtgaacgagagcgagagacaccagctgaagaccaaggtggtgcacctgagcaagctgcccaaggacaccgccctgctgctggaccccaacatctacagaaccatgccccagaagagactgaagagaaccctgatcagaaaggtgttcaacctgtacctgagcaagcagtag

SEQ ID NO: 42959 - protein, 906 aa, Artificial Sequence
  derived and/or modified sequence
MQHIFAFFCTGFLGAVVGANFPNNIQIGGLFPNQQSQEHAAFRFALSQLTEPPKLLPQIDIVNISDSFEMTYRFCSQFSKGVYAIFGFYERRTVNMLTSFCGALHVCFITPSFPVDTSNQFVLQLRPELQDALISIIDHYKWQKFVYIYDADRGLSVLQKVLDTAAEKNWQVTAVNILTTTEEGYRMLFQDLEKKKERLVVVDCESERLNAILGQIIKLEKNGIGYHYILANLGFMDIDLNKFKESGANVTGFQLVNYTDTIPAKIMQQWKNSDARDHTRVDWKRPKYTSALTYDGVKVMAEAFQSLRRQRIDISRRGNAGDCLANPAVPWGQGIDIQRALQQVRFEGLTGNVQFNEKGRRTNYTLHVIEMKHDGIRKIGYWNEDDKFVPAATDAQAGGDNSSVQNRTYIVTTILEDPYVMLKKNANQFEGNDRYEGYCVELAAEIAKHVGYSYRLEIVSDGKYGARDPDTKAWNGMVGELVYGRADVAVAPLTITLVREEVIDFSKPFMSLGISIMIKKPQKSKPGVFSFLDPLAYEIWMCIVFAYIGVSVVLFLVSRFSPYEWHSEEFEEGRDQTTSDQSNEFGIFNSLWFSLGAFMQQGCDISPRSLSGRIVGGVWWFFTLIIISSYTANLAAFLTVERMVSPIESAEDLAKQTEIAYGTLEAGSTKEFFRRSKIAVFEKMWTYMKSAEPSVFVRTTEEGMIRVRKSKGKYAYLLESTMNEYIEQRKPCDTMKVGGNLDSKGYGIATPKGSALRGPVNLAVLKLSEQGVLDKLKSKWWYDKGECGSKDSGSKDKTSALSLSNVAGVFYILIGGLGLAMLVALIEFCYKSRSESKRMKGFCLIPQQSINEAIRTSTLPRNSGAGASSGGSGENGRVVSHDFPKSMQSIPCMSHSSGMPLGATGL

SEQ ID NO: 42960 - protein, 716 aa, Artificial Sequence
  derived and/or modified sequence
MQHIFAFFCTGFLGAVVGANFPNNIQIVCSQFSKGVYAIFGFYERRTVNMLTSFCGALHVCFITPSFPVDTSNQFVLQLRPELQDALISIIDHYKWQKFVYIYDADRGLSVLQKVLDTAAEKNWQVTAVNILTTTEEGYRMLFQDLEKKKERLVVVDCESERLNAILGQIIKLEKNGIGYHYILANLGFMDIDLNKFKESGANVTGFQLVNYTDTIPAKIMQQWKNSDARDHTRVDWKRPKYTSALTYDGVKVMAEAFQSLRRQRIDISRRGNAGDCLANPAVPWGQGIDIQRALQQVRFEGLTGNVQFNEKGRRTNYTLHVIEMKHDGIRKIGYWNEDDKFVPAATDAQAGGDNSSVQNRTYIVTTILEDPYVMLKKNANQFEGNDRYEGYCVELAAEIAKHVGYSYRLEIVSDGKYGARDPDTKAWNGMVGELVYGRADVAVAPLTITLVREEVIDFSKPFMSLGISIMIKKPQKSKPGVFSFLDPLAYEIWMCIVFAYIGVSVVLFLVSRFSPYEWHSEEFEEGRDQTTSDQSNEFGIFNSLWFSLGAFMQQGCDISPRSLSGRIVGGVWWFFTLIIISSYTANLAAFLTVERMVSPIESAEDLAKQTEIAYGTLEAGSTKEFFRRSKIAVFEKMWTYMKSAEPSVFVRTTEEGMIRVRKSKGKYAYLLESTMNEYIEQRKPCDTMKVGGNLDSKGYGIATPKGSALRTRQAL

SEQ ID NO: 42961 - DNA, 2721 bp, Artificial Sequence
  derived and/or modified sequence
atgcaacacatttttgcgttcttctgtacgggatttctgggtgctgtagttggggcaaacttcccaaacaacatccagattggcggactctttcctaaccagcagagccaggagcacgctgctttcaggtttgcactgtctcaacttaccgaacccccgaagctgctgccacagattgacattgtcaatattagtgatagcttcgagatgacctatcggttctgcagtcagtttagcaagggcgtttatgccattttcgggttttatgagcggagaacagtgaacatgctgaccagcttctgcggcgccctccacgtctgcttcattacaccctcctttcccgtcgatacgtcaaatcagttcgtgctccagctgcgccccgagctgcaggacgccctaatcagtatcattgaccactacaaatggcagaaatttgtgtacatatacgatgctgaccgggggctgtccgtgctccagaaagtcctggacaccgctgccgagaagaactggcaggtcacagcagtgaacatattgacaaccacagaggagggttaccggatgctcttccaggacctggaaaagaaaaaggagagactggtggtcgtcgactgcgagagtgagaggctgaacgccatcctgggtcaaatcattaagctagagaaaaacggaatcgggtatcactatattctggcaaaccttggattcatggacatcgacctaaacaaattcaaagagagtggagcaaatgtcactggatttcagctcgtgaactataccgacacaatccctgcgaaaatcatgcagcagtggaaaaatagcgacgccagggaccacacgagggtggattggaagagaccaaagtatacttctgccctgacctatgacggggtgaaggtcatggcagaggccttccagtcgctgcgtagacagagaatcgatatcagccgtagagggaatgccggcgactgcttggccaatcccgctgttccatggggtcaaggcatcgatattcagagggcgctacagcaggtaagatttgagggtcttactggtaatgtgcaatttaatgaaaaaggccggcgcactaactacaccctgcatgtgattgaaatgaagcatgacgggattcgcaagatcgggtactggaacgaggacgacaagttcgttccagcagcgacagatgcccaggcaggtggcgacaacagctctgtccagaaccgaacatacatcgtgactactattctggaggatccatatgttatgttgaagaagaatgcaaaccaatttgagggtaacgaccgctacgaaggctactgcgtcgagcttgccgccgaaattgccaaacacgtgggctatagttaccgtctggagatagtgagcgacgggaagtatggcgcaagagaccccgacaccaaagcctggaacgggatggttggagagttagtctacgggagagccgatgtggctgtcgctcccctcaccataactctcgtgcgtgaggaagtcatcgatttctcgaaaccattcatgtcactcggtatctccataatgattaaaaagccacagaaatcaaagcctggtgtgttcagctttttagaccccctcgcctatgagatttggatgtgtattgtcttcgcttacatcggcgtgtccgtagtcctgttcctggtatccaggttttccccctatgagtggcactctgaagagttcgaggagggtcgcgatcaaactacatctgaccagtcaaatgagtttggcattttcaactccctatggtttagtctaggcgccttcatgcagcaggggtgcgatatatccccgcggtccctgtccggacgcattgtaggcggtgtctggtggttttttacccttattataatcagttcttacaccgcgaacctggctgcttttctgacagttgagaggatggtgagccccatagagagcgccgaagaccttgccaagcagactgaaatcgcatatggcaccttagaagctgggagcaccaaggagttctttaggcgatccaagatcgcagtgttcgagaagatgtggacgtacatgaaatccgccgagccgagcgtctttgtgagaacaacagaagagggcatgatacgggtgcggaaatccaaaggcaaatatgcttacctgctcgagtccaccatgaatgagtatattgagcagcggaagccctgtgacaccatgaaggtgggagggaacctggacagcaaggggtacggcatagctacaccgaagggaagcgctctaagaggacccgtcaacctggctgtactgaaactgtccgagcagggagtgctggacaagcttaagtccaagtggtggtacgataagggcgagtgcggaagcaaagatagtggtagtaaagacaaaacatctgccctcagtctttctaatgtcgcgggggttttctacatcctgatcgggggcttagggttagccatgctggttgcactgatcgagttctgctataaaagtcgctctgagtcaaagagaatgaaggggttctgtttgattccacagcagtctattaacgaagctatcagaacaagcactctaccccgtaatagtggcgcaggcgcttcctccggtggtagtggggaaaacggcagggttgtatcacatgatttcccaaaatctatgcagtcaatcccatgcatgagccatagcagtggcatgccactaggtgccacaggactctag

SEQ ID NO: 42962 - DNA, 2151 bp, Artificial Sequence
  derived and/or modified sequence
atgcagcacattttcgcctttttctgcaccgggttcctgggcgccgtggtaggcgcaaatttcccaaacaacatacaaatagtttgcagccagttttcaaagggtgtgtatgccattttcggattttacgagagacggacagtaaacatgcttacctctttttgtggcgccctgcacgtgtgtttcatcacaccaagcttccccgtggacacaagcaatcagttcgtgctgcagctgaggccggagctccaagatgctctcatctccatcatagaccattataagtggcagaagttcgtatacatatacgacgctgaccgcgggctaagtgttttgcagaaagttttggacactgcggccgagaaaaactggcaggtgactgccgtcaacatcctcacgacgaccgaggagggctatcggatgcttttccaggacctggagaagaaaaaggagcggctggtagtggtcgactgcgaatctgagcgtctgaacgctatcctcggacagattataaagctggagaagaacggtattggataccattacattctagccaacctaggtttcatggatattgatctgaataagtttaaagaaagcggagccaatgttacaggttttcagttagtgaactatacagataccatcccagcgaagatcatgcagcagtggaagaacagtgacgcaagagaccatacgagggtagactggaagagaccgaagtatacctcggctctcacctacgacggtgtgaaggtgatggccgaagcattccaatctttacgccgccagaggatcgatatttctcgccggggtaatgccggcgattgcctagcaaaccctgcagtcccttggggtcaagggattgatattcagagggcactgcaacaggtgcgatttgaagggttaacaggaaatgttcagtttaacgaaaaggggagaaggaccaattacaccttgcatgttatagaaatgaagcatgacggcattcggaagattggttattggaacgaggatgataagttcgtgcccgcagcaacagacgcccaagcgggaggggataattcaagcgtgcagaatagaacctacatagttaccaccattttagaagacccctatgtgatgttaaaaaagaacgctaaccagttcgaagggaacgaccgttatgaaggctactgtgtagagctggccgctgagattgcaaagcatgtgggatatagctaccgtctggaaatagtctccgatggaaaatatggggctagagatccagacacaaaggcgtggaatgggatggttggggagctcgtgtatggtcgcgcggacgtggccgtcgcccccctaaccattactctggtgagggaggaagtgatcgatttctccaagccatttatgtcccttggaataagtatcatgataaaaaaaccacagaaatcaaagcctggagtcttctcttttcttgaccctctggcatacgagatctggatgtgcatcgttttcgcctatatcggtgtgtccgtagtccttttcctggtgagcagattctccccgtacgagtggcacagcgaggagttcgaggaaggcagagaccaaaccaccagcgaccagtccaacgagtttggcatttttaattctctgtggttctccttaggcgccttcatgcagcagggctgtgatatcagtcctcgctcactgagtggtaggatcgttggaggcgtgtggtggttctttaccctgatcatcatctccagctacaccgcaaacctggctgctttcttgacagtggagcgaatggtatcaccgattgagagtgccgaggacttggccaaacagaccgagattgcctacggcacgctcgaggcaggttccactaaggagttcttcagaagatccaagatcgccgtgtttgaaaaaatgtggacatatatgaagagcgctgagccttccgtgttcgtccgcactactgaggaaggtatgatccgtgtgaggaagtctaagggcaaatatgcatatctcttggagagtactatgaacgaatatatcgagcagcgtaaaccctgcgatacaatgaaggtcggcggaaatctggattctaaaggatatggtatcgccacacccaagggaagtgccctgaggacccgccaggccctgtag

SEQ ID NO: 42963 - DNA, 2721 bp, Artificial Sequence
  derived and/or modified sequence
atgcaacacattttcgcctttttttgcacgggcttcctgggcgcagtggtcggcgccaactttcccaataacattcaaatcggaggtttgttcccaaatcagcagtcccaggagcatgccgcattcagattcgctctgtctcagctgaccgagccacctaagctcctcccacaaatcgatatcgttaatatctcagattcctttgaaatgacgtataggttctgttctcaattttcaaaaggcgtgtatgctattttcggtttttacgagaggcgtacagtgaatatgctgacttccttctgcggcgccctgcacgtatgtttcataactccaagtttcccggtggacacctctaaccagtttgtgctgcagctcagaccagagctacaggacgctctaatatctataatcgatcattataaatggcagaagttcgtgtacatttacgacgccgacagaggtctatctgtcctgcaaaaagtgctcgatactgccgccgaaaagaattggcaggtgaccgctgtgaatatccttacaactacagaagaggggtatcggatgttgttccaggatttagagaagaaaaaagagagactggttgtagttgattgtgagtcggagcggctaaacgcgattctgggacaaatcattaaactcgaaaaaaatggcatcggctaccattacattctggcaaatctgggatttatggatatcgacctcaataagttcaaagaaagtggggccaacgttactggtttccaacttgtaaactatactgataccatccccgctaaaatcatgcagcagtggaagaacagtgatgccagggaccacaccagggtggactggaaaaggccgaaatatacctccgcactcacctacgatggcgtgaaagtgatggccgaagcctttcagagcctccgccgccagcggattgacatcagccgacgaggcaacgctggcgactgtctcgccaatccggccgtgccttggggacagggtatcgacattcagagagcactgcagcaggtccgcttcgaaggtcttacgggaaatgtgcagttcaatgaaaagggaagacggacaaattatactctgcatgtaatagagatgaagcatgacggaatcagaaagattggctattggaacgaagatgacaagttcgtccccgcggctactgatgcccaggccggtggcgataatagtagtgtacagaacagaacttacatagtgaccaccatcttggaggatccctatgtgatgctcaaaaagaacgctaatcagtttgaggggaacgaccgctacgaggggtactgcgtggagttggctgctgaaattgccaaacatgtaggatactcatatcgactggaaatcgtctctgatggaaagtacggtgccagagacccagatactaaggcttggaacggaatggtcggagagctagtttacggcagggccgacgtggccgtcgctcctctgacgataacactggtgagagaggaggtgatcgacttcagcaagccattcatgtccctaggtatcagcataatgatcaagaaacctcagaaaagtaagcccggagtcttctcatttctagatcccttagcctatgagatctggatgtgcatagtctttgcatacataggtgtctctgtcgtactgttcttagtgtcccgcttttccccctatgaatggcacagcgaggagttcgaggaagggcgggaccagaccacatctgaccagtcaaacgaatttggaatatttaactctctctggttttccttaggcgcctttatgcagcagggctgcgatatttctcccagaagtcttagcggaaggattgtgggcggcgtgtggtggtttttcaccctgataatcatctcatcgtacactgcaaatcttgccgcctttcttaccgtggagcgcatggtatctccaatcgagagtgcagaagacctggccaaacaaaccgagatcgcatacgggacactagaagctggctccacaaaggaattttttcgccgatctaaaattgcggtgttcgagaaaatgtggacgtacatgaagtctgcagaacccagcgtatttgtccggacaaccgaggagggcatgatccgcgtgcgaaaaagtaagggaaaatacgcttacttactggagtccactatgaacgagtacatcgagcagcgcaagccgtgtgacactatgaaggtcggcgggaatcttgattccaaaggatacggaatcgcaacacccaagggcagcgctctcaggggacctgtgaatctagccgttctgaagttgtcagaacaaggagtgctagataaactaaagtcaaagtggtggtacgacaagggggagtgcggatctaaagatagcggatcaaaggataagacttctgccctgagcttaagcaacgtcgccggcgtgttctatatcctaattggcggtttgggcttggcaatgctcgtggctctcatcgaattttgctataagtcacgctccgaatctaagcgcatgaagggcttttgtttaattccccaacagtctatcaatgaagcaattcggacaagcaccctgcccagaaactcaggtgccggagcatctagtggtggcagtggcgaaaatggccgcgttgtgtctcacgattttccaaaaagcatgcagtctattccctgtatgagccatagctccggaatgcctctgggagctaccggtctctag

SEQ ID NO: 42964 - DNA, 3170 bp, Artificial Sequence
  derived and/or modified sequence
taaagggaaagggggggaaacaccaaatctatgattggacctgggcttctttttcgccaatgcaaaaaggaatatgcagcacatttttgccttcttctgcaccggtttcctaggcgcggtagtaggtgccaatttccccaacaatatccagatcgggggattatttccaaaccagcagtcacaggaacatgctgcttttagatttgctttgtcgcaactcacagagcccccgaagctgctcccccagattgatattgtgaacatcagcgacagctttgagatgacctatagattctgttcccagttctccaaaggagtctatgccatctttgggttttatgaacgtaggactgtcaacatgctgacctccttttgtggggccctccacgtctgcttcattacgccgagctttcccgttgatacatccaatcagtttgtccttcagctgcgccctgaactgcaggatgccctcatcagcatcattgaccattacaagtggcagaaatttgtctacatttatgatgccgaccggggcttatccgtcctgcagaaagtcctggatacagctgctgagaagaactggcaggtgacagcagtcaacattttgacaaccacagaggagggataccggatgctctttcaggacctggagaagaaaaaggagcggctggtggtggtggactgtgaatcagaacgcctcaatgctatcttgggccagattataaagctagagaagaatggcatcggctaccactacattcttgcaaatctgggcttcatggacattgacttaaacaaattcaaggagagtggcgccaatgtgacaggtttccagctggtgaactacacagacactattccggccaagatcatgcagcagtggaagaatagtgatgctcgagaccacacacgggtggactggaagagacccaagtacacctctgcgctcacctacgatggggtgaaggtgatggctgaggctttccagagcctgcggaggcagagaattgatatatctcgccgggggaatgctggggattgtctggctaacccagctgttccctggggccaagggatcgacatccagagagctctgcagcaggtgcgatttgaaggtttaacaggaaacgtgcagtttaatgagaaaggacgccggaccaactacacgctccacgtgattgaaatgaaacatgacggcatccgaaagattggttactggaatgaagatgataagtttgtccctgcagccaccgatgcccaagctgggggcgataattcaagtgttcagaacagaacatacatcgtcacaacaatcctagaagatccttatgtgatgctcaagaagaacgccaatcagtttgagggcaatgaccgttacgagggctactgtgtagagctggcggcagagattgccaagcacgtgggctactcctaccgtctggagattgtcagtgatggaaaatacggagcccgagaccctgacacgaaggcctggaatggcatggtgggagagctggtctatggaagagcagatgtggctgtggctcccttaactatcactttggtccgggaagaagttatagatttctccaaaccatttatgagtttggggatctccatcatgattaaaaaaccacagaaatccaagccgggtgtcttctccttccttgatcctttggcttatgagatttggatgtgcattgtttttgcctacattggagtgagtgttgtcctcttcctggtcagccgcttcagtccctatgaatggcacagtgaagagtttgaggaaggacgggaccagacaaccagtgaccagtccaatgagtttgggatattcaacagtttgtggttctccctgggagccttcatgcagcaaggatgtgacatttctcccaggtccctgtctggtcgcatcgttggtggcgtctggtggttcttcaccttaatcatcatctcctcatatacagccaatctggccgccttcctgaccgtggagaggatggtgtctcccattgagagtgcagaggacctagcgaagcagacagaaattgcctacgggacgctggaagcaggatctactaaggagttcttcaggaggtctaaaattgctgtgtttgagaagatgtggacatacatgaagtcagcagagccatcagtttttgtgcggaccacagaggaggggatgattcgagtgaggaaatccaaaggcaaatatgcctacctcctggagtccaccatgaatgagtacattgagcagcggaaaccctgtgacaccatgaaggtgggaggtaacttggattccaaaggctatggcattgcaacacccaaggggtctgccctgagaggtcccgtaaacctagcggttttgaaactcagtgagcaaggcgtcttagacaagctgaaaagcaaatggtggtacgataaaggggaatgtggaagcaaggactccggaagtaaggacaagacaagcgctctgagcctcagcaatgtggcaggcgtgttctacatcctgatcggaggacttggactagccatgctggttgccttaatcgagttctgctacaaatcccgtagtgaatccaagcggatgaagggtttttgtttgatcccacagcaatccatcaacgaagccatacggacatcgaccctcccccgcaacagcggggcaggagccagcagcggcggcagtggagagaatggtcgggtggtcagccatgacttccccaagtccatgcaatcgattccttgcatgagccacagttcagggatgcccttgggagccacgggattgtaactggagcagatggagaccccttggggagcaggctcgggctccccagccccatcccaaacccttcagtgccaaaaacaacaacaaaatgaaacgcaaccaccaccaaccactgcgaccacaagaaggatgattcaacaggttttcctgaagaattgaaaaaccattttgctgtcccttttccttttttgatgttctttcacccttttctgtttgctaagtgaggatgaaaaaataacactgtactgcaataaggggagagtaaccctgtctaatgaaacctgtgtctctgagagtagagtcactggaacactaatgaggaaactgcactgttttattttaattcagttgttagtgtgtcttagtgtgtgcaattttt

SEQ ID NO: 42965 - DNA, 2643 bp, Artificial Sequence
  derived and/or modified sequence
agttaatctggctgtcagttggtgttaacgctgcagtttaagtgttcggattccaagggaaacagacaaacctcacgaaaggaaggaagcaagcaagcaaggaaggaactgcaggaggaaaagaacaggcagaacagcgagaagaataaagggaaagggggggaaacaccaaatctatgattggacctgggcttctttttcgccaatgcaaaaaggaatatgcagcacatttttgccttcttctgcaccggtttcctaggcgcggtagtaggtgccaatttccccaacaatatccagatcgtctgttcccagttctccaaaggagtctatgccatctttgggttttatgaacgtaggactgtcaacatgctgacctccttttgtggggccctccacgtctgcttcattacgccgagctttcccgttgatacatccaatcagtttgtccttcagctgcgccctgaactgcaggatgccctcatcagcatcattgaccattacaagtggcagaaatttgtctacatttatgatgccgaccggggcttatccgtcctgcagaaagtcctggatacagctgctgagaagaactggcaggtgacagcagtcaacattttgacaaccacagaggagggataccggatgctctttcaggacctggagaagaaaaaggagcggctggtggtggtggactgtgaatcagaacgcctcaatgctatcttgggccagattataaagctagagaagaatggcatcggctaccactacattcttgcaaatctgggcttcatggacattgacttaaacaaattcaaggagagtggcgccaatgtgacaggtttccagctggtgaactacacagacactattccggccaagatcatgcagcagtggaagaatagtgatgctcgagaccacacacgggtggactggaagagacccaagtacacctctgcgctcacctacgatggggtgaaggtgatggctgaggctttccagagcctgcggaggcagagaattgatatatctcgccgggggaatgctggggattgtctggctaacccagctgttccctggggccaagggatcgacatccagagagctctgcagcaggtgcgatttgaaggtttaacaggaaacgtgcagtttaatgagaaaggacgccggaccaactacacgctccacgtgattgaaatgaaacatgacggcatccgaaagattggttactggaatgaagatgataagtttgtccctgcagccaccgatgcccaagctgggggcgataattcaagtgttcagaacagaacatacatcgtcacaacaatcctagaagatccttatgtgatgctcaagaagaacgccaatcagtttgagggcaatgaccgttacgagggctactgtgtagagctggcggcagagattgccaagcacgtgggctactcctaccgtctggagattgtcagtgatggaaaatacggagcccgagaccctgacacgaaggcctggaatggcatggtgggagagctggtctatggaagagcagatgtggctgtggctcccttaactatcactttggtccgggaagaagttatagatttctccaaaccatttatgagtttggggatctccatcatgattaaaaaaccacagaaatccaagccgggtgtcttctccttccttgatcctttggcttatgagatttggatgtgcattgtttttgcctacattggagtgagtgttgtcctcttcctggtcagccgcttcagtccctatgaatggcacagtgaagagtttgaggaaggacgggaccagacaaccagtgaccagtccaatgagtttgggatattcaacagtttgtggttctccctgggagccttcatgcagcaaggatgtgacatttctcccaggtccctgtctggtcgcatcgttggtggcgtctggtggttcttcaccttaatcatcatctcctcatatacagccaatctggccgccttcctgaccgtggagaggatggtgtctcccattgagagtgcagaggacctagcgaagcagacagaaattgcctacgggacgctggaagcaggatctactaaggagttcttcaggaggtctaaaattgctgtgtttgagaagatgtggacatacatgaagtcagcagagccatcagtttttgtgcggaccacagaggaggggatgattcgagtgaggaaatccaaaggcaaatatgcctacctcctggagtccaccatgaatgagtacattgagcagcggaaaccctgtgacaccatgaaggtgggaggtaacttggattccaaaggctatggcattgcaacacccaaggggtctgccctgaggacaagacaagcgctctgagcctcagcaatgtggcaggcgtgttctacatcctgatcggaggacttggactagccatgctggttgccttaatcgagttctgctacaaatcccgtagtgaatccaagcggatgaagggtttttgtttgatcccacagcaatccatcaacgaagccatacggacatcgaccctcccccgcaacagcggggcaggagccagcagcggcggcagtggagagaatggtcgggtggtcagccatgacttccccaagtccatgcaatcgattccttgca

SEQ ID NO: 42966 - DNA, 3262 bp, Artificial Sequence
  derived and/or modified sequence
gagtgggggagccagcgctccagctagcatgaggacgggcttcttttcccgtgctcagttaatctggctgtcagttggtgttaacgctgcagtttaagtgttcggattccaagggaaacagacaaacctcacgaaaggaaggaagcaagcaagcaaggaaggaactgcaggaggaaaaggaatatgcagcacatttttgccttcttctgcaccggtttcctaggcgcggtagtaggtgccaatttccccaacaatatccagatcgggggattatttccaaaccagcagtcacaggaacatgctgcttttagatttgctttgtcgcaactcacagagcccccgaagctgctcccccagattgatattgtgaacatcagcgacagctttgagatgacctatagattctgttcccagttctccaaaggagtctatgccatctttgggttttatgaacgtaggactgtcaacatgctgacctccttttgtggggccctccacgtctgcttcattacgccgagctttcccgttgatacatccaatcagtttgtccttcagctgcgccctgaactgcaggatgccctcatcagcatcattgaccattacaagtggcagaaatttgtctacatttatgatgccgaccggggcttatccgtcctgcagaaagtcctggatacagctgctgagaagaactggcaggtgacagcagtcaacattttgacaaccacagaggagggataccggatgctctttcaggacctggagaagaaaaaggagcggctggtggtggtggactgtgaatcagaacgcctcaatgctatcttgggccagattataaagctagagaagaatggcatcggctaccactacattcttgcaaatctgggcttcatggacattgacttaaacaaattcaaggagagtggcgccaatgtgacaggtttccagctggtgaactacacagacactattccggccaagatcatgcagcagtggaagaatagtgatgctcgagaccacacacgggtggactggaagagacccaagtacacctctgcgctcacctacgatggggtgaaggtgatggctgaggctttccagagcctgcggaggcagagaattgatatatctcgccgggggaatgctggggattgtctggctaacccagctgttccctggggccaagggatcgacatccagagagctctgcagcaggtgcgatttgaaggtttaacaggaaacgtgcagtttaatgagaaaggacgccggaccaactacacgctccacgtgattgaaatgaaacatgacggcatccgaaagattggttactggaatgaagatgataagtttgtccctgcagccaccgatgcccaagctgggggcgataattcaagtgttcagaacagaacatacatcgtcacaacaatcctagaagatccttatgtgatgctcaagaagaacgccaatcagtttgagggcaatgaccgttacgagggctactgtgtagagctggcggcagagattgccaagcacgtgggctactcctaccgtctggagattgtcagtgatggaaaatacggagcccgagaccctgacacgaaggcctggaatggcatggtgggagagctggtctatggaagagcagatgtggctgtggctcccttaactatcactttggtccgggaagaagttatagatttctccaaaccatttatgagtttggggatctccatcatgattaaaaaaccacagaaatccaagccgggtgtcttctccttccttgatcctttggcttatgagatttggatgtgcattgtttttgcctacattggagtgagtgttgtcctcttcctggtcagccgcttcagtccctatgaatggcacagtgaagagtttgaggaaggacgggaccagacaaccagtgaccagtccaatgagtttgggatattcaacagtttgtggttctccctgggagccttcatgcagcaaggatgtgacatttctcccaggtccctgtctggtcgcatcgttggtggcgtctggtggttcttcaccttaatcatcatctcctcatatacagccaatctggccgccttcctgaccgtggagaggatggtgtctcccattgagagtgcagaggacctagcgaagcagacagaaattgcctacgggacgctggaagcaggatctactaaggagttcttcaggaggtctaaaattgctgtgtttgagaagatgtggacatacatgaagtcagcagagccatcagtttttgtgcggaccacagaggaggggatgattcgagtgaggaaatccaaaggcaaatatgcctacctcctggagtccaccatgaatgagtacattgagcagcggaaaccctgtgacaccatgaaggtgggaggtaacttggattccaaaggctatggcattgcaacacccaaggggtctgccctgagaggtcccgtaaacctagcggttttgaaactcagtgagcaaggcgtcttagacaagctgaaaagcaaatggtggtacgataaaggggaatgtggaagcaaggactccggaagtaaggacaagacaagcgctctgagcctcagcaatgtggcaggcgtgttctacatcctgatcggaggacttggactagccatgctggttgccttaatcgagttctgctacaaatcccgtagtgaatccaagcggatgaagggtttttgtttgatcccacagcaatccatcaacgaagccatacggacatcgaccctcccccgcaacagcggggcaggagccagcagcggcggcagtggagagaatggtcgggtggtcagccatgacttccccaagtccatgcaatcgattccttgcatgagccacagttcagggatgcccttgggagccacgggattgtaactggagcagatggagaccccttggggagcaggctcgggctccccagccccatcccaaacccttcagtgccaaaaacaacaacaaaatgaaacgcaaccaccaccaaccactgcgaccacaagaaggatgattcaacaggttttcctgaagaattgaaaaaccattttgctgtcccttttccttttttgatgttctttcacccttttctgtttgctaagtgaggatgaaaaaataacactgtactgcaataaggggagagtaaccctgtctaatgaaacctgtgtctctgagagtagagtcactggaacactaatgaggaaactgcactgttttattttaattcagttgttagtgtgtc

SEQ ID NO: 42967 - DNA, 2721 bp, Artificial Sequence
  derived and/or modified sequence
atgcagcacatctttgccttcttctgcaccggcttcctgggcgctgtggtgggcgccaacttccccaacaacatccagattggaggcctcttccccaaccagcagagccaggagcacgccgccttccgctttgccctgagccagctgacagagccccccaagctgctgccccagattgatattgtgaacatcagtgacagctttgagatgacctaccgcttctgcagccagttcagcaagggcgtgtatgccatcttcggcttctatgaaagaagaacagtgaacatgctgaccagcttctgtggggccctgcacgtgtgcttcatcacccccagcttccctgtggacaccagcaaccagtttgtgctgcagctgcggcctgagctgcaggatgccctgatcagcatcatcgaccactacaagtggcagaagtttgtgtacatctatgatgctgaccggggcctgtctgtgctgcagaaggtgctggacacagctgctgagaagaactggcaggtgacagctgtgaacatcctgaccaccacagaggagggctacaggatgctgttccaggacctggagaagaagaaggagcggctggtggtggtggactgtgagagcgagcggctgaatgccatcctgggccagatcatcaagctggagaagaatggcatcggctaccactacatcctggccaacctgggcttcatggacatcgacctgaacaagttcaaggagagcggggccaacgtgacaggcttccagctggtgaactacacagacaccatcccagccaagatcatgcagcagtggaagaacagtgatgcccgggaccacaccagggtggactggaagaggcccaagtacaccagcgccctgacctatgatggagtgaaggtgatggccgaggccttccagagcctgcggcggcagagaattgacatcagcagaagaggaaatgctggggactgcctggccaacccagctgtgccctggggccagggcatcgacatccagagggccctgcagcaggtgcgctttgagggcctgactggaaatgtgcagttcaatgagaagggccgccgcaccaactacaccctgcacgtgattgagatgaagcatgatggcatcaggaagattggctactggaatgaagatgacaagtttgtgcctgctgccacagatgcccaggccggcggggacaacagctctgtgcagaacagaacctacatcgtgaccaccatcctggaggacccctacgtgatgctgaagaagaatgccaaccagtttgagggcaatgacagatatgagggctactgtgtggagctggccgctgagatcgccaagcacgtgggctacagctaccgcctggagatcgtgtctgatggcaagtacggggcccgggaccctgacaccaaggcctggaatggcatggtgggggagctggtgtatggccgggcagatgtggccgtggcccccctgaccatcaccctggtgcgggaggaggtgattgacttcagcaagcccttcatgagcctgggcatcagcatcatgatcaagaagccccagaagagcaagccaggagtcttctccttcctggaccccctggcctatgagatctggatgtgcatcgtgtttgcctacatcggcgtgtctgtggtgctcttcctggtgagccgcttcagcccctatgagtggcacagcgaggagtttgaggagggccgggaccagaccaccagtgaccagagcaatgaatttggcatcttcaacagcctgtggttcagcctgggcgccttcatgcagcagggctgtgacatcagccccaggagcctgagcggccgcatcgtgggcggcgtgtggtggttcttcaccctcatcatcatcagcagctacacagccaacctggccgccttcctgactgtggagaggatggtgagccccattgaatctgctgaggacctggccaagcagacagaaattgcctacggcaccctggaggccggcagcaccaaggagttcttccgccgcagcaagattgctgtgtttgagaagatgtggacctacatgaagtctgctgagcccagcgtgtttgtgaggaccacagaggagggcatgatccgggtgaggaagagcaagggcaagtatgcctacctgctggagagcaccatgaatgagtacatcgagcagaggaagccctgtgacaccatgaaggtgggcggcaacctggacagcaagggctacggcatcgccacccccaagggcagcgccctgcggggccctgtgaacctggccgtgctgaagctgtctgagcagggcgtgctggacaagctgaagagcaagtggtggtatgacaagggggagtgtggcagcaaggacagcggcagcaaggacaagaccagcgccctgagcctgagcaatgtggccggggtcttctacatcctgattggaggcctgggcctggccatgctggtggccctgattgagttctgctacaagagccgctctgagagcaagaggatgaagggcttctgcctgatcccccagcagagcatcaatgaggccatccgcaccagcaccctgcccagaaattctggagctggggccagcagcggcggcagcggggagaatggccgggtggtgtcccatgacttccccaagtccatgcagagcatcccctgcatgagccacagcagcggcatgcccctgggcgccaccggcctgtag

SEQ ID NO: 42968 - DNA, 2151 bp, Artificial Sequence
  derived and/or modified sequence
atgcagcacatctttgccttcttctgcaccggcttcctgggcgctgtggtgggcgccaacttccccaacaacatccagatcgtgtgcagccagttcagcaagggcgtgtatgccatcttcggcttctatgaaagaagaacagtgaacatgctgaccagcttctgtggggccctgcacgtgtgcttcatcacccccagcttccctgtggacaccagcaaccagtttgtgctgcagctgcggcctgagctgcaggatgccctgatcagcatcatcgaccactacaagtggcagaagtttgtgtacatctatgatgctgaccggggcctgtctgtgctgcagaaggtgctggacacagctgctgagaagaactggcaggtgacagctgtgaacatcctgaccaccacagaggagggctacaggatgctgttccaggacctggagaagaagaaggagcggctggtggtggtggactgtgagagcgagcggctgaatgccatcctgggccagatcatcaagctggagaagaatggcatcggctaccactacatcctggccaacctgggcttcatggacatcgacctgaacaagttcaaggagagcggggccaacgtgacaggcttccagctggtgaactacacagacaccatcccagccaagatcatgcagcagtggaagaacagtgatgcccgggaccacaccagggtggactggaagaggcccaagtacaccagcgccctgacctatgatggagtgaaggtgatggccgaggccttccagagcctgcggcggcagagaattgacatcagcagaagaggaaatgctggggactgcctggccaacccagctgtgccctggggccagggcatcgacatccagagggccctgcagcaggtgcgctttgagggcctgactggaaatgtgcagttcaatgagaagggccgccgcaccaactacaccctgcacgtgattgagatgaagcatgatggcatcaggaagattggctactggaatgaagatgacaagtttgtgcctgctgccacagatgcccaggccggcggggacaacagctctgtgcagaacagaacctacatcgtgaccaccatcctggaggacccctacgtgatgctgaagaagaatgccaaccagtttgagggcaatgacagatatgagggctactgtgtggagctggccgctgagatcgccaagcacgtgggctacagctaccgcctggagatcgtgtctgatggcaagtacggggcccgggaccctgacaccaaggcctggaatggcatggtgggggagctggtgtatggccgggcagatgtggccgtggcccccctgaccatcaccctggtgcgggaggaggtgattgacttcagcaagcccttcatgagcctgggcatcagcatcatgatcaagaagccccagaagagcaagccaggagtcttctccttcctggaccccctggcctatgagatctggatgtgcatcgtgtttgcctacatcggcgtgtctgtggtgctcttcctggtgagccgcttcagcccctatgagtggcacagcgaggagtttgaggagggccgggaccagaccaccagtgaccagagcaatgaatttggcatcttcaacagcctgtggttcagcctgggcgccttcatgcagcagggctgtgacatcagccccaggagcctgagcggccgcatcgtgggcggcgtgtggtggttcttcaccctcatcatcatcagcagctacacagccaacctggccgccttcctgactgtggagaggatggtgagccccattgaatctgctgaggacctggccaagcagacagaaattgcctacggcaccctggaggccggcagcaccaaggagttcttccgccgcagcaagattgctgtgtttgagaagatgtggacctacatgaagtctgctgagcccagcgtgtttgtgaggaccacagaggagggcatgatccgggtgaggaagagcaagggcaagtatgcctacctgctggagagcaccatgaatgagtacatcgagcagaggaagccctgtgacaccatgaaggtgggcggcaacctggacagcaagggctacggcatcgccacccccaagggcagcgccctgcggacccggcaggccctgtag

SEQ ID NO: 42969 - DNA, 2721 bp, Artificial Sequence
  derived and/or modified sequence
atgcagcacatcttcgccttcttctgcaccggcttcctgggcgccgtcgtaggcgcaaatttccctaacaatattcaaatcggtggcctgtttccaaaccagcagtcacaggagcacgcggcgtttcgtttcgctttgagccagctcactgagcccccgaaattattgccccagatcgatatagttaacatctctgacagctttgagatgacataccgtttttgtagtcaattctctaagggggtttatgcaatcttcgggttttatgagcgacgcacagtgaacatgctcaccagtttctgcggtgctctgcatgtttgcttcatcactccttcatttcctgtcgacacatcgaaccagttcgtgctgcagctcaggcctgaactgcaggatgctctcatcagcattatcgaccattacaagtggcagaaatttgtctatatctatgatgcagataggggcctgagcgttctacagaaggtgctggacaccgccgccgagaagaattggcaggtaacagctgtcaatatacttacgactaccgaggaggggtatcggatgctgttccaagacctcgaaaagaaaaaagaacgcctcgtggtcgtcgactgtgagtctgaacgcctaaacgctattctggggcaaattattaaattggaaaaaaatggcatagggtatcactatatccttgcaaatctaggctttatggacatagacttgaacaagtttaaggagtcaggggcaaatgtgaccggctttcaactcgttaactacaccgacaccattcctgcaaagatcatgcagcagtggaagaattcagacgcacgagaccatactcgcgtcgattggaagagaccaaaatacacgtcagctttgacatacgatggggttaaagttatggcagaggcattccaatcactgagacgacagcggattgacatctcacgcaggggcaacgctggagattgcctggctaatccagcagtgccttggggacagggcatcgacattcagcgcgcgctccaacaagttaggtttgaagggctgactggtaacgtccagttcaacgagaaagggagacgcaccaactataccctgcatgtgatcgagatgaagcacgacgggatcaggaagatcggctactggaatgaagacgacaaattcgtgccagccgccactgacgcccaggccgggggagacaactccagtgtccagaatagaacttacatagtcaccacaatcctcgaggacccatatgtgatgctgaagaagaacgccaaccagtttgagggaaacgaccgctatgagggatattgcgtagaactggccgccgagattgcaaaacacgtaggatacagctaccgtctggaaatagtgtccgatgggaagtatggtgctcgggatcccgacactaaagcgtggaacggcatggttggagagctcgtgtatggccgagcagatgttgccgtggcccccctcacaatcacactcgtgcgcgaggaggtaatcgatttctccaagccattcatgagtctgggcatctctatcatgatcaaaaagccccagaaatcaaagcccggggtgttctcatttctggacccgctggcttatgaaatttggatgtgtattgtctttgcatacattggcgtcagtgtagtgctgtttttagtttcacgctttagtccttacgaatggcattcggaagagtttgaagaagggagggatcaaaccactagcgatcagtctaatgagttcggaatcttcaacagtctctggtttagtttaggggcatttatgcagcaagggtgcgatatatcgccacgaagtctgtctggaagaatcgtgggaggtgtctggtggttctttacactgatcattatttcgagctacaccgcaaacttggctgcatttctaaccgtggaacggatggtctcgcccatcgagtccgctgaagacctcgccaagcagaccgagatcgcctacggtaccctggaggcaggttctacgaaggaattcttcaggaggtctaagatagcagtctttgagaaaatgtggacgtacatgaaaagtgccgagcccagcgtgttcgtgcggactactgaagaagggatgattcgcgtgcgaaaatccaaaggcaaatacgcttatctgctggagagtactatgaatgagtacattgagcagaggaaaccctgcgatacaatgaaggtcggaggcaacctggatagcaaaggctacgggatcgctaccccgaagggttccgccctccggggacctgtgaacctggctgtgcttaagctgagcgaacagggggtccttgataaactgaaaagcaagtggtggtacgacaaaggcgaatgcggctctaaggactccggctcaaaggacaagacatccgctctcagtttgagtaacgtggccggggtgttttatatcctgatcggcgggctgggcctcgcaatgcttgttgccctgatcgagttttgctacaagagcagaagcgaatccaagaggatgaagggtttttgcctgattccacagcagtcaattaacgaagccatccgcacgagcacactccctcgaaattccggcgccggggcctcctcaggcgggtcgggcgagaatggccgagtcgtctcacacgattttcccaaatccatgcaatccattccctgcatgtcgcactcgtcaggtatgccactgggcgccacaggcttgtag

SEQ ID NO: 42970 - DNA, 2151 bp, Artificial Sequence
  derived and/or modified sequence
atgcagcacatcttcgccttcttctgcaccggcttcctgggcgccgttgtcggcgcgaacttcccaaacaatatccagatcgtgtgctcacagttctcaaagggagtgtacgctatcttcggcttttacgagcgaaggactgtcaacatgttaacatctttttgcggcgcgctgcacgtttgctttattaccccttcctttcccgtggatacttcaaatcagttcgttcttcagctgaggcctgagttgcaggatgcacttattagcatcatcgatcattacaaatggcaaaagtttgtgtacatctacgacgccgatcgcggactaagcgtcttacagaaagttctcgacactgcagccgagaagaattggcaggttaccgcagtgaacatcttgaccacgaccgaggaaggttaccgcatgctgttccaggatctggaaaagaagaaagaacgcctggtagtggtggactgcgaatcagaacgcctgaatgcgattctcggtcagatcattaagcttgagaagaatggcattggctaccactacatcctggctaatctgggctttatggatattgatctgaacaaatttaaggagagcggggccaacgtgaccggttttcagctggttaactacacagacactatcccagcaaaaatcatgcagcagtggaagaatagcgatgcgagggatcataccagggtagattggaagcggcctaagtatacttccgctctgacctatgacggtgtcaaggtcatggccgaagcgtttcagtcgctgcggagacagaggattgatatttcaagacggggcaatgccggtgattgcctggccaatcctgctgtgccgtggggacagggcatcgatattcagcgtgcactccagcaggtgcgctttgaaggcctaactggtaatgtgcaatttaacgaaaaaggcagacgaacaaactacactcttcacgtcatagagatgaagcacgatggcatccgaaagattggctactggaatgaagatgacaagttcgtccccgccgctacagatgcacaggcgggtggcgataatagcagtgttcagaatcggacatatatcgttacaacaatactggaagacccatatgtcatgcttaagaagaacgcaaatcagtttgaaggcaacgaccgttatgaaggatactgtgttgaactagccgcagaaatcgctaaacatgtgggctacagctacagacttgagatcgtttccgacggaaagtatggtgcacgggatcctgatacgaaagcgtggaatgggatggttggtgaattggtatatggacgagctgatgtagcagtcgcccctctcactattaccctagtcagggaggaggtgattgattttagcaaaccctttatgagcctgggcatttccatcatgataaaaaagccacagaagtcaaagcccggcgtcttttcctttctcgatccattggcgtacgaaatttggatgtgcatcgtgtttgcctatattggcgttagtgtagtgctgttcctcgttagccgcttttccccttatgagtggcactctgaggaattcgaagagggtcgggaccagactacgagtgaccagtccaatgagttcggcatctttaattccttgtggttctccctgggcgcctttatgcagcaaggatgtgatatcagcccacgatcgctgagtggccggatcgttggaggagtgtggtggtttttcaccctgattattatctcgtcttacaccgccaatctggctgctttccttacagtcgagagaatggtttctcccatcgagagcgcagaagatctggccaaacagacagagatagcctatggtacgcttgaggcgggttcaacgaaggagttcttccgtagatcaaagattgctgtgtttgagaaaatgtggacatacatgaaaagtgccgaaccttccgtgtttgtcaggaccactgaagaaggtatgattcgggtccgcaagtccaaaggcaagtatgcctacctgctcgaatcaactatgaatgagtacatagaacagaggaaaccctgcgacactatgaaggtaggaggcaatcttgattcaaaagggtacgggatcgcgacaccaaaaggctccgccctccgaactcgacaggctttgtag

SEQ ID NO: 42971 - DNA, 2721 bp, Artificial Sequence
  derived and/or modified sequence
atgcagcacatcttcgccttcttctgcaccggcttcctgggcgccgtcgtgggagctaacttcccaaacaacatccagatcggcggcctgtttccgaaccagcagtctcaggagcatgctgcatttaggttcgccctgtctcagctaactgagcctcctaaactgcttcctcagattgatatcgtcaacataagcgacagcttcgagatgacatatagattttgcagccagttcagtaagggggtctacgctattttcggattctatgagagacgcaccgtgaacatgttgacctcattctgcggtgctctgcacgtgtgctttatcacgccttcctttcccgtggacacctcaaaccagtttgtgctgcagctgaggccggagctgcaagatgcgctgattagcatcatcgatcactacaaatggcagaagtttgtttatatctatgacgccgatcggggcctttccgttctccagaaagtcctcgacaccgcagcggagaaaaactggcaagtgaccgccgtgaacattctgacaactactgaggaaggctatcgtatgctcttccaagacctggaaaagaaaaaagaacgattagtcgtcgtagactgtgaatccgagaggctgaacgccatactcggccagatcatcaagctagagaaaaatggcataggttaccactatattttagcaaatctgggattcatggatatcgacctcaacaagttcaaagagagtggcgccaacgtcacggggttccagctggttaactacaccgacaccattcctgctaagataatgcaacagtggaagaattctgacgcccgagaccacacgagagttgactggaaaaggcccaagtatacctcggccctgacgtatgatggagtgaaggtgatggccgaagcctttcagagcctgagacggcaacgcatcgacatctccagaagagggaacgctggtgattgtttggccaatcccgccgtcccctggggccaggggatcgacatccagagagccctgcagcaggtgaggttcgagggccttaccggcaatgtacagttcaatgaaaagggtcgccgcaccaattataccttgcatgttattgagatgaagcacgatggaattcgcaagataggctattggaacgaggatgacaagttcgtgccagctgctactgacgcgcaggccggcggggacaattccagcgtgcagaaccgaacttatatcgttacaacaatcctcgaggacccatacgtcatgctgaaaaaaaacgccaaccagttcgagggtaacgataggtatgagggttactgcgtggagctcgccgcggagatagccaaacatgtcggctacagttacagactggaaatagtgtccgatgggaagtacggagcacgggatcctgacactaaagcctggaacggcatggtgggtgaattggtttacggccgggccgatgtggctgtagctcccctcacaataacattagtaagagaggaagtcattgacttttcaaagccttttatgtccctgggcatctcaatcatgattaagaaaccacagaagtccaaacctggtgtcttctctttcttggacccgctggcatacgaaatttggatgtgtattgtgttcgcatacataggcgttagtgtggtgctctttttggtctcaagattcagtccttatgaatggcatagtgaggagtttgaggagggcagggaccagactacctcagaccagagtaacgaatttggcatttttaactccttatggttctcacttggggcattcatgcagcagggctgcgatattagcccgaggtcattgtctggccgcatagtgggaggcgtctggtggttcttcaccttaataatcatttcctcatatactgcaaatctggcggcgttcttgactgtggagcgtatggtctctccaatagaaagtgcagaggatctcgcaaagcagacagagattgcatacgggactctcgaagccggatcgaccaaggaattcttccgccgttcaaagattgccgtgtttgagaagatgtggacctacatgaagagcgcagagcccagcgtcttcgtccgcaccacagaagaggggatgattagggtgcgaaaatcgaagggtaagtacgcttacttgctggagtctacaatgaatgagtacattgagcagcgtaagccgtgcgacactatgaaagtgggcggcaatctcgattcaaaggggtatgggatcgctacacctaagggatccgccctgcggggtcccgtaaatttggccgttttgaagctgtcagaacaaggggttctggataaactaaagtctaaatggtggtacgataagggcgagtgcggctcgaaggacagtggttcaaaggacaagacctccgcactatctctgtcgaatgtggccggggtattctatattctcatcggaggacttggcttggctatgctcgtggcccttattgagttctgctataaatcacgctctgagagtaagcgaatgaagggcttttgtctgattccacagcagtctattaatgaagccattcgcacatctacactgcctaggaattcaggcgcaggcgcctcaagcggtggctccggtgaaaacggaagggttgtttcgcacgacttccccaaatcaatgcagagcattccatgtatgtctcattccagtggtatgccactcggagccaccggtttgtag

SEQ ID NO: 42972 - DNA, 2721 bp, Artificial Sequence
  derived and/or modified sequence
atgcaacatattttcgcattcttctgtaccggttttcttggggctgtggtaggcgctaatttcccaaataacatacagattggaggcctgttccctaatcaacagtcccaggaacatgcagcattcaggttcgctttatctcagctgacagagccccctaaactgctacctcagatcgacattgtgaatattagtgacagtttcgaaatgacctacaggttttgctctcagtttagcaagggggtgtacgccatatttggcttctacgaacggcgtacggttaatatgttaaccagtttctgtggagccctgcacgtatgttttattaccccatcttttcctgtagacacgtctaatcagttcgtgcttcagctgaggcctgagttgcaggacgcgctgataagcatcattgaccactataaatggcagaagtttgtgtatatctatgatgccgaccggggtctatcagttctgcaaaaagttctggacaccgccgctgagaagaactggcaggtaacagcagtaaatatcctcactactacagaagaaggttataggatgctcttccaggatctcgagaagaagaaagagcgtctggtcgtcgttgattgtgaatcggagaggctcaatgccattctggggcaaattatcaagctggagaagaatgggatcggttaccattatatactcgctaacctgggctttatggatatcgaccttaacaagttcaaggaaagcggcgcaaatgttacgggctttcagctggtgaattacacggatacaattcctgccaagatcatgcagcagtggaagaattctgacgccagggaccacaccagggtggactggaaaagaccaaagtacacttccgcccttacatacgatggggtgaaggtcatggccgaggcttttcagagcctacgcaggcaacgaattgacatctccaggcggggaaacgcaggggattgcttagcaaacccggcagtgccttggggccagggaatcgatattcagcgggcactacagcaggtgaggttcgaaggcctgactggcaacgttcagtttaacgaaaagggcaggaggactaactacaccctgcatgttatcgaaatgaagcatgacggaatccgcaagatcggatattggaatgaggatgataagtttgttcccgctgccactgacgctcaggctggaggagataattctagcgtgcaaaataggacctatatagttactacaatactggaggacccctacgtgatgctgaaaaaaaacgcaaatcagttcgaggggaacgatcgttacgagggctactgcgtggagctcgcagcggaaatcgctaaacacgtgggctatagctaccgcctagagattgtgtccgatggtaagtatggagcccgagaccccgacaccaaagcctggaatggcatggtgggtgaattagtatacggtagagccgatgtggccgttgctcctcttaccattaccctggttcgggaagaggtcatcgatttttcaaaaccattcatgtctctgggaattagcatcatgattaagaaacctcagaagtctaagccgggagtgttcagctttctggacccgctggcttatgaaatctggatgtgtatagtgtttgcatacatcggcgtgagcgtggtactattcttggtctctcggttcagcccttatgagtggcactccgaggagttcgaggagggcagggatcagactaccagcgatcagagcaatgagtttgggatttttaatagtctctggttctcgctgggggcttttatgcagcaagggtgtgacatttccccgcgatcattaagtgggaggattgttggcggagtgtggtggttcttcacgctgatcatcatatctagttacacagccaacctagccgcatttctgacagtggagaggatggtgtcgcccattgaaagtgctgaggatttagcaaagcagaccgaaatcgcgtacgggacgctggaggcaggaagcacgaaagaattcttccgtcggagtaagattgccgtatttgagaagatgtggacatatatgaagagcgctgaacccagtgttttcgtcagaactacagaggaggggatgatacgtgtgcgcaagagcaagggtaaatatgcctatctgcttgaaagcacaatgaacgagtacattgagcagcgcaaaccatgcgacaccatgaaagtgggcggaaacctcgacagcaaaggctacggcatcgcgacgcctaagggatcagcactcaggggccctgtgaatttggccgtgctgaagctgagtgaacagggggtgctggacaagctgaagtcaaagtggtggtacgacaaaggtgaatgtgggtctaaggactcagggagcaaggacaagacctcagctctctctctgtctaatgtggccggagtgttctatatccttattggcggactgggactggccatgcttgtggccctgatcgagttctgttacaagagcaggtctgaatccaagaggatgaagggcttttgccttatcccgcagcagtccatcaacgaggccataaggactagcactcttccgcgaaacagcggtgccggagcctcatcagggggaagtggggaaaatggtagagttgtgagccatgatttcccaaagtctatgcagtctatcccgtgcatgtcccactccagtgggatgcctcttggtgccaccggtctttag

SEQ ID NO: 42973 - DNA, 2151 bp, Artificial Sequence
  derived and/or modified sequence
atgcagcacatcttcgcttttttctgcacagggtttcttggcgcagtggtgggcgcaaacttccctaacaacatacagatagtatgttctcaattcagtaagggtgtttacgccatcttcgggttttatgagaggaggaccgtcaatatgctgacttctttttgtggcgctctccatgtgtgtttcattacaccctcattccccgtggatacatccaaccagtttgtactgcagcttagacccgagcttcaggatgccctcattagtattattgaccattataaatggcagaagttcgtgtatatttatgatgctgacagggggctttcagtcctgcaaaaagtgcttgatacggcagcagagaaaaattggcaggttacggccgtcaatatactcacaaccacagaagaaggttacaggatgctgtttcaggatttggagaagaaaaaggagaggctggtcgtggtggattgtgaaagcgagcgcctgaatgccattctcggtcagatcattaagttggaaaagaatggaattggatatcactatattcttgccaacctgggatttatggatattgatttgaataaatttaaggagagcggtgctaatgtgacgggctttcagctggtcaattacaccgacacaataccagcgaagattatgcagcagtggaagaactcagacgccagggatcacaccagggtggactggaagagacccaagtacactagcgccctgacctatgatggggtaaaggtgatggccgaggccttccaaagtctgcggagacaacgcattgatatttcgcgaagggggaacgccggtgattgtcttgcaaacccggcagttccctggggccagggaattgacatccaacgggcactgcagcaggttagattcgagggtcttaccgggaatgtccagtttaatgagaagggtaggcgcactaactataccttgcatgtaatagagatgaagcatgacggtatacgaaaaattggatactggaacgaggacgataaatttgtgcccgcagccaccgatgcccaggccggaggtgacaatagcagcgtgcaaaacaggacgtacattgtgacgacaatcttggaggacccttatgttatgcttaagaagaacgcgaaccagtttgagggtaatgatcgctacgagggttactgtgttgaactggctgccgagatcgctaaacatgttggttattcatataggcttgagatcgtgtcagacggcaagtatggagcacgcgaccctgataccaaggcgtggaacggtatggtgggcgagctcgtttatggccgtgctgatgtggcagtcgccccactcacgattactttggtccgagaggaagtgatcgacttttcaaagccattcatgagcttaggcatcagcatcatgataaagaagccgcaaaagtcaaaaccaggcgtgttctccttcctggatcccctggcctacgaaatctggatgtgtatagtcttcgcttacatcggggtctctgtggttttattccttgtttccaggtttagtccctacgaatggcacagtgaggaattcgaggaggggagagaccagaccaccagtgaccaatctaacgagtttggtatattcaattccctgtggttttcacttggcgctttcatgcagcagggctgcgatattagccccaggtcactatcaggcagaatagttggcggagtttggtggttttttaccctaatcatcatatcgtcatacacagctaacctcgcagctttcctcactgtagagcggatggtttcaccaatcgaaagcgcagaggacctggccaaacagaccgagatcgcttacggtaccctggaggcaggctccacaaaggaattcttccgcaggtctaaaatcgctgtatttgagaagatgtggacatacatgaagtccgcagagccctctgtcttcgtgcgtacaacagaagagggcatgatacgggtgcgtaaatcaaagggcaaatatgcttatcttctcgaatccacaatgaatgaatacatcgagcaacgcaaaccttgcgataccatgaaggtggggggaaatctggattccaaggggtacgggatcgctacaccaaaaggttccgccctgcgtaccagacaggcgttgtag

SEQ ID NO: 42974 - DNA, 2721 bp, Artificial Sequence
  derived and/or modified sequence
atgcaacatatattcgctttcttttgcaccggatttctgggcgcagtggtaggggctaattttcctaataatatccaaatagggggactgttcccgaaccagcagagccaagaacatgccgcattccggtttgcactgagccagttgacagaaccccctaagctacttccgcaaattgacattgttaatattagtgattccttcgaaatgacatatcgcttctgctctcagttctccaaaggggtttatgctattttcggcttctatgagagacgcaccgtcaatatgctaacctctttttgtggtgcactgcacgtgtgttttattaccccatccttccctgtggatacatctaatcagttcgtcctgcagctccgccctgaactgcaagacgccctgatttcgattattgaccattacaagtggcaaaagttcgtatacatctacgatgccgacagagggctgtccgtccttcagaaggttctcgacaccgctgccgaaaaaaactggcaggtgacagcagtcaatatcctgaccactactgaggaggggtatcggatgttgtttcaagatctggagaaaaagaaggagcgcctggtggtggttgactgcgagtccgaacgcttgaacgccatcctgggacaaataattaagctggaaaagaatggaatcgggtatcactacattctagcaaatttaggattcatggacatcgatctaaacaagtttaaggaaagtggcgctaatgtgacaggatttcaactcgttaattatactgacactattcctgccaaaattatgcaacaatggaagaattcggacgcccgagaccatactcgtgtcgactggaagcgtcctaagtacacatccgcccttacatacgacggggtcaaggtgatggccgaagccttccagtccctcagacggcaaagaatcgatatcagccgcagaggtaacgccggagattgcctcgccaatcccgcagtgccatgggggcaggggatcgatatccagcgtgccctgcagcaggtccgttttgaaggcctcactggcaacgtgcagttcaatgagaaaggccgacgcactaattacactctccacgttatcgagatgaagcacgacggaataaggaaaatagggtactggaacgaagacgataagtttgtaccggctgccactgatgctcaagctggcggagacaactcatccgtgcagaatagaacatacatcgtaacgaccatcctggaagatccttatgtaatgctgaagaaaaacgcaaaccagttcgagggaaatgacagatacgagggatactgtgtggagctagccgctgagattgccaagcacgtgggatactcatataggctggaaatcgtgagcgatggaaaatacggcgcacgcgaccccgacacaaaggcgtggaacgggatggtcggagagctcgtgtacgggagagcagatgtggccgttgcgccactcaccatcactcttgtcagagaggaggttatagacttctccaaaccctttatgtccctcggaattagtattatgattaaaaagccacagaaatcaaagccaggcgtgttttccttcttggatccactggcgtacgagatctggatgtgcattgtgttcgcatacattggcgtctccgtggttctttttctcgtgagcagattttctccatatgaatggcattcagaagaattcgaggaaggccgagaccagactacgagcgaccagtctaacgagtttgggatattcaattccctttggttttctctcggtgcctttatgcagcaaggatgtgatatcagcccccgatccctaagcggacgcattgtaggaggtgtttggtggttcttcaccctgattatcatctcctcatacactgccaatcttgccgctttcctcaccgtggagagaatggtttcccccattgaaagtgccgaagacctagctaagcagactgaaattgcctatggcaccctcgaggccggttcaaccaaagaattctttcgaaggagcaagatagccgtgtttgagaagatgtggacatacatgaagtctgccgagccatcagtgttcgtgcgtacaactgaggagggtatgattcgggtgaggaagagtaaaggcaaatatgcttacctgctggagtccactatgaatgaatatatcgagcagcgaaaaccttgcgataccatgaaggtgggcggtaacctcgattccaaaggctacgggatcgccacacctaaaggttcagctctcagagggccagtgaatctggcagtcctgaagctctccgagcagggtgtccttgacaaactcaagagtaagtggtggtacgacaaaggggaatgcggatccaaggacagcggtagcaaggataagaccagcgcactcagcttatcaaacgtggccggtgtgttctacattctaattggagggttgggcctggccatgctagtagccctcatagaattttgttacaagtcacgatccgagtcgaaaaggatgaagggcttctgcttaatcccccagcaatcaatcaacgaggccatccggacttcaacactccctcgaaactctggagccggtgccagctctggaggctcaggcgaaaatggcagggttgtttctcacgatttccccaagtcgatgcaaagcattccttgtatgtcacattcttccgggatgcccctgggcgcaacgggtctgtag

SEQ ID NO: 42975 - DNA, 2721 bp, Artificial Sequence
  derived and/or modified sequence
atgcagcacatcttcgccttcttctgcaccggcttcctgggcgccgtggtgggcgccaacttccccaacaacatccagatcggcggcctgttccccaaccagcagagccaggagcacgccgccttcagattcgccctgagccagctgaccgagccccccaagctgctgccccagatcgacatcgtgaacatcagcgacagcttcgagatgacctacagattctgcagccagttcagcaagggcgtgtacgccatcttcggcttctacgagagaagaaccgtgaacatgctgaccagcttctgcggcgccctgcacgtgtgcttcatcacccccagcttccccgtggacaccagcaaccagttcgtgctgcagctgagacccgagctgcaggacgccctgatcagcatcatcgaccactacaagtggcagaagttcgtgtacatctacgacgccgacagaggcctgagcgtgctgcagaaggtgctggacaccgccgccgagaagaactggcaggtgaccgccgtgaacatcctgaccaccaccgaggagggctacagaatgctgttccaggacctggagaagaagaaggagagactggtggtggtggactgcgagagcgagagactgaacgccatcctgggccagatcatcaagctggagaagaacggcatcggctaccactacatcctggccaacctgggcttcatggacatcgacctgaacaagttcaaggagagcggcgccaacgtgaccggcttccagctggtgaactacaccgacaccatccccgccaagatcatgcagcagtggaagaacagcgacgccagagaccacaccagagtggactggaagagacccaagtacaccagcgccctgacctacgacggcgtgaaggtgatggccgaggccttccagagcctgagaagacagagaatcgacatcagcagaagaggcaacgccggcgactgcctggccaaccccgccgtgccctggggccagggcatcgacatccagagagccctgcagcaggtgagattcgagggcctgaccggcaacgtgcagttcaacgagaagggcagaagaaccaactacaccctgcacgtgatcgagatgaagcacgacggcatcagaaagatcggctactggaacgaggacgacaagttcgtgcccgccgccaccgacgcccaggccggcggcgacaacagcagcgtgcagaacagaacctacatcgtgaccaccatcctggaggacccctacgtgatgctgaagaagaacgccaaccagttcgagggcaacgacagatacgagggctactgcgtggagctggccgccgagatcgccaagcacgtgggctacagctacagactggagatcgtgagcgacggcaagtacggcgccagagaccccgacaccaaggcctggaacggcatggtgggcgagctggtgtacggcagagccgacgtggccgtggcccccctgaccatcaccctggtgagagaggaggtgatcgacttcagcaagcccttcatgagcctgggcatcagcatcatgatcaagaagccccagaagagcaagcccggcgtgttcagcttcctggaccccctggcctacgagatctggatgtgcatcgtgttcgcctacatcggcgtgagcgtggtgctgttcctggtgagcagattcagcccctacgagtggcacagcgaggagttcgaggagggcagagaccagaccaccagcgaccagagcaacgagttcggcatcttcaacagcctgtggttcagcctgggcgccttcatgcagcagggctgcgacatcagccccagaagcctgagcggcagaatcgtgggcggcgtgtggtggttcttcaccctgatcatcatcagcagctacaccgccaacctggccgccttcctgaccgtggagagaatggtgagccccatcgagagcgccgaggacctggccaagcagaccgagatcgcctacggcaccctggaggccggcagcaccaaggagttcttcagaagaagcaagatcgccgtgttcgagaagatgtggacctacatgaagagcgccgagcccagcgtgttcgtgagaaccaccgaggagggcatgatcagagtgagaaagagcaagggcaagtacgcctacctgctggagagcaccatgaacgagtacatcgagcagagaaagccctgcgacaccatgaaggtgggcggcaacctggacagcaagggctacggcatcgccacccccaagggcagcgccctgagaggccccgtgaacctggccgtgctgaagctgagcgagcagggcgtgctggacaagctgaagagcaagtggtggtacgacaagggcgagtgcggcagcaaggacagcggcagcaaggacaagaccagcgccctgagcctgagcaacgtggccggcgtgttctacatcctgatcggcggcctgggcctggccatgctggtggccctgatcgagttctgctacaagagcagaagcgagagcaagagaatgaagggcttctgcctgatcccccagcagagcatcaacgaggccatcagaaccagcaccctgcccagaaacagcggcgccggcgccagcagcggcggcagcggcgagaacggcagagtggtgagccacgacttccccaagagcatgcagagcatcccctgcatgagccacagcagcggcatgcccctgggcgccaccggcctgtag

SEQ ID NO: 42976 - DNA, 2151 bp, Artificial Sequence
  derived and/or modified sequence
atgcagcacatcttcgccttcttctgcaccggcttcctgggcgccgtggtgggcgccaacttccccaacaacatccagatcgtgtgcagccagttcagcaagggcgtgtacgccatcttcggcttctacgagagaagaaccgtgaacatgctgaccagcttctgcggcgccctgcacgtgtgcttcatcacccccagcttccccgtggacaccagcaaccagttcgtgctgcagctgagacccgagctgcaggacgccctgatcagcatcatcgaccactacaagtggcagaagttcgtgtacatctacgacgccgacagaggcctgagcgtgctgcagaaggtgctggacaccgccgccgagaagaactggcaggtgaccgccgtgaacatcctgaccaccaccgaggagggctacagaatgctgttccaggacctggagaagaagaaggagagactggtggtggtggactgcgagagcgagagactgaacgccatcctgggccagatcatcaagctggagaagaacggcatcggctaccactacatcctggccaacctgggcttcatggacatcgacctgaacaagttcaaggagagcggcgccaacgtgaccggcttccagctggtgaactacaccgacaccatccccgccaagatcatgcagcagtggaagaacagcgacgccagagaccacaccagagtggactggaagagacccaagtacaccagcgccctgacctacgacggcgtgaaggtgatggccgaggccttccagagcctgagaagacagagaatcgacatcagcagaagaggcaacgccggcgactgcctggccaaccccgccgtgccctggggccagggcatcgacatccagagagccctgcagcaggtgagattcgagggcctgaccggcaacgtgcagttcaacgagaagggcagaagaaccaactacaccctgcacgtgatcgagatgaagcacgacggcatcagaaagatcggctactggaacgaggacgacaagttcgtgcccgccgccaccgacgcccaggccggcggcgacaacagcagcgtgcagaacagaacctacatcgtgaccaccatcctggaggacccctacgtgatgctgaagaagaacgccaaccagttcgagggcaacgacagatacgagggctactgcgtggagctggccgccgagatcgccaagcacgtgggctacagctacagactggagatcgtgagcgacggcaagtacggcgccagagaccccgacaccaaggcctggaacggcatggtgggcgagctggtgtacggcagagccgacgtggccgtggcccccctgaccatcaccctggtgagagaggaggtgatcgacttcagcaagcccttcatgagcctgggcatcagcatcatgatcaagaagccccagaagagcaagcccggcgtgttcagcttcctggaccccctggcctacgagatctggatgtgcatcgtgttcgcctacatcggcgtgagcgtggtgctgttcctggtgagcagattcagcccctacgagtggcacagcgaggagttcgaggagggcagagaccagaccaccagcgaccagagcaacgagttcggcatcttcaacagcctgtggttcagcctgggcgccttcatgcagcagggctgcgacatcagccccagaagcctgagcggcagaatcgtgggcggcgtgtggtggttcttcaccctgatcatcatcagcagctacaccgccaacctggccgccttcctgaccgtggagagaatggtgagccccatcgagagcgccgaggacctggccaagcagaccgagatcgcctacggcaccctggaggccggcagcaccaaggagttcttcagaagaagcaagatcgccgtgttcgagaagatgtggacctacatgaagagcgccgagcccagcgtgttcgtgagaaccaccgaggagggcatgatcagagtgagaaagagcaagggcaagtacgcctacctgctggagagcaccatgaacgagtacatcgagcagagaaagccctgcgacaccatgaaggtgggcggcaacctggacagcaagggctacggcatcgccacccccaagggcagcgccctgagaaccagacaggccctgtag

SEQ ID NO: 42977 - protein, 348 aa, Artificial Sequence
  derived and/or modified sequence
MAATCEISNIFSNYFSAMYSSEDSTLASVPPAATFGADDLVLTLSNPQMSLEGTEKASWLGEQPQFWSKTQVLDWISYQVEKNKYDASAIDFSRCDMDGATLCNCALEELRLVFGPLGDQLHAQLRDLTSSSSDELSWIIELLEKDGMAFQEALDPGPFDQGSPFAQELLDDVSTAGTGASRSSHSSDSGGSDVDLDPTDGKLFPSDGFRDCKKGDPKHGKRKRGRPRKLSKEYWDCLEGKKSKHAPRGTHLWEFIRDILIHPELNEGLMKWENRHEGVFKFLRSEAVAQLWGQKKKNSNMTYEKLSRAMRYYYKREILERVDGRRLVYKFGKNSSGWKEEEVLQSRN

SEQ ID NO: 42978 - protein, 371 aa, Artificial Sequence
  derived and/or modified sequence
MAATCEISNIFSNYFSAMYSSEDSTLASVPPAATFGADDLVLTLSNPQMSLEGTEKASWLGEQPQFWSKTQVLDWISYQVEKNKYDASAIDFSRCDMDGATLCNCALEELRLVFGPLGDQLHAQLRDLTSSSSDELSWIIELLEKDGMAFQEALDPGPFDQGSPFAQELLDDGQQASPYHPGSCGAGAPSPGSSDVSTAGTGASRSSHSSDSGGSDVDLDPTDGKLFPSDGFRDCKKGDPKHGKRKRGRPRKLSKEYWDCLEGKKSKHAPRGTHLWEFIRDILIHPELNEGLMKWENRHEGVFKFLRSEAVAQLWGQKKKNSNMTYEKLSRAMRYYYKREILERVDGRRLVYKFGKNSSGWKEEEVLQSRN

SEQ ID NO: 42979 - protein, 232 aa, Artificial Sequence
  derived and/or modified sequence
MAATCEISNIFSNYFSAMYSSEDSTLASVPPAATFGADDLVLTLSNPQMSLEEKASWLGEQPQFWSKTQVLDWISYQVEKNKYDASAIDFSRCDMDGATLCNCALEELRLVFGPLGDQLHAQLRDLTSSSSDELSWIIELLEKDGMAFQEALDPGPFDQGSPFAQELLDDGQQASPYHPGSCGAGAPSPGSSDVSTAGTGASRSSHSSDSGGSDVDLDPTDGKLFPSDGFRD

SEQ ID NO: 42980 - DNA, 3149 bp, Artificial Sequence
  derived and/or modified sequence
ctgagctcagggaggagctccctccaggctctatttagagccgggtaggggagcgcagcggccagatacctcagcgctacctggcggaactggatttctctcccgcctgccggcctgcctgccacagccggactccgccactccggtagcctcatggctgcaacctgtgagattagcaacatttttagcaactacttcagtgcgatgtacagctcggaggactccaccctggcctctgttccccctgctgccacctttggggccgatgacttggtactgaccctgagcaacccccagatgtcattggagggtacagagaaggccagctggttgggggaacagccccagttctggtcgaagacgcaggttctggactggatcagctaccaagtggagaagaacaagtacgacgcaagcgccattgacttctcacgatgtgacatggatggcgccaccctctgcaattgtgcccttgaggagctgcgtctggtctttgggcctctgggggaccaactccatgcccagctgcgagacctcacttccagctcttctgatgagctcagttggatcattgagctgctggagaaggatggcatggccttccaggaggccctagacccagggccctttgaccagggcagcccctttgcccaggagctgctggacgacggtcagcaagccagcccctaccaccccggcagctgtggcgcaggagccccctcccctggcagctctgacgtctccaccgcagggactggtgcttctcggagctcccactcctcagactccggtggaagtgacgtggacctggatcccactgatggcaagctcttccccagcgatggttttcgtgactgcaagaagggggatcccaagcacgggaagcggaaacgaggccggccccgaaagctgagcaaagagtactgggactgtctcgagggcaagaagagcaagcacgcgcccagaggcacccacctgtgggagttcatccgggacatcctcatccacccggagctcaacgagggcctcatgaagtgggagaatcggcatgaaggcgtcttcaagttcctgcgctccgaggctgtggcccaactatggggccaaaagaaaaagaacagcaacatgacctacgagaagctgagccgggccatgaggtactactacaaacgggagatcctggaacgggtggatggccggcgactcgtctacaagtttggcaaaaactcaagcggctggaaggaggaagaggttctccagagtcggaactgagggttggaactatacccgggaccaaactcacggaccactcgaggcctgcaaaccttcctgggaggacaggcaggccagatggcccctccactggggaatgctcccagctgtgctgtggagagaagctgatgttttggtgtattgtcagccatcgtcctgggactcggagactatggcctcgcctccccaccctcctcttggaattacaagccctggggtttgaagctgactttatagctgcaagtgtatctccttttatctggtgcctcctcaaacccagtctcagacactaaatgcagacaacaccttcctcctgcagacacctggactgagccaaggaggcctggggaggccctaggggagcaccgtgatggagaggacagagcaggggctccagcaccttctttctggactggcgttcacctccctgctcagtgcttgggctccacgggcaggggtcagagcactccctaatttatgtgctatataaatatgtcagatgtacatagagatctattttttctaaaacattcccctccccactcctctcccacagagtgctggactgttccaggccctccagtgggctgatgctgggacccttaggatggggctcccagctcctttctcctgtgaatggaggcagagacctccaataaagtgccttctgggctttttctaacctttgtcttagctacctgtgtactgaaatttgggcctttggatcgaatatggtcaagaggttggaggggaggaaaatgaaggtctaccaggctgagggtgagggcaaaggctgacgaagaggggagttacagatttcctgtagcaggtgtgggcttacagacacatggactgggctgggaggcgagcaaaggaagcagctgagactgttggagaacgcttacaagacttcatgcaagcaaggacatgaactcagaacactgaggtcagaagcatcctgctgtcatgacaccgctcgagtgaccttgaccttgaccaagtctgtcctgtttaggactgatttttcctattaggctagggtttggacctgatgttctcaagatgtctagaattgcatggctggccttgtggaatagatggttttgcattccagccaagtgtgctgtaaactgtatatctgtaatatgaatcccagcttttgagtctgacaaaatcagagttaggatcttgtaaaggaaaaaaaaaaaaaaacaaaacaaaatggagatgagtacttgctgagaaagaatgagggaaggagttggcatttgttgaaagtgtagtctttttctcttttttttttaattgcaacttttactttagatttaggaggtcgtgcgcaggtttgttacatgggtatattgtgtgatgctgagcttgggatgcgaatgatcctgtcacccaggtagtgagtatagcacccagtgaaactgtagtctcatgccaggcactgtgctagcccactctggctcatttaatcctctcctaagaagagaggagacacagcgtccccatttgacagatgcagaaagaggttccacaggtgtgccttgattctgtcctaaaaccgtttcccggaagcttttcctggtgtgggcgcttctaacctaatcctcaatcgattccagaactattactctgtttccacagtgatactgtgtctaggttttagggaggacagttcattgatgttacttaagaatgctttccaggtggaaagttccttaagtttgaggcttcaaattccatacagcacattaaaatcccattcatgagtttgaaatactgctctgttgtcttggaaataccaatcagattgttggctgaagtgatgtggataaagaagggatcttagaaaaactaaaaaaaaaaaaaaaaaa

SEQ ID NO: 42981 - DNA, 1047 bp, Artificial Sequence
  derived and/or modified sequence
atggcagctacttgtgagatcagcaacattttctcgaactattttagcgccatgtatagcagcgaggattcaaccctggcctccgttcctcccgctgccacttttggggctgatgatctggttttaaccttgtctaacccacagatgagtttggagggcactgaaaaggcgtcatggctgggagagcaacctcagttctggtccaaaacccaggtactcgactggattagttaccaggtcgagaagaataaatatgatgccagcgctattgacttctcccgctgtgatatggatggcgctactctgtgtaattgtgcactggaggagctgaggctggtattcggaccgctgggcgatcagcttcatgcgcagctccgggacctgacaagctcatctagtgatgagctttcatggattattgaattgctggagaaagacggaatggctttccaggaagcccttgatccaggtccgttcgatcagggatcaccatttgcccaagaactgctggatgatgtctcaaccgcgggcacaggcgcgtcaagatcttctcactccagcgatagtggcggctccgatgtggatttggacccaaccgacggcaaactcttcccttcagatggctttcgggactgtaaaaagggcgaccctaaacacggaaaacgcaagcgcggtcggcctcgtaagctgagcaaggagtactgggactgtttggagggaaaaaaaagcaagcatgcacccagggggactcacctgtgggaatttataagggacatcctgatccacccagaactgaacgaaggtctgatgaaatgggaaaataggcatgagggcgtgtttaagttccttcgctccgaggccgttgctcagctgtggggtcagaaaaagaaaaatagtaacatgacctatgagaaactctcgagggcaatgaggtactactacaaaagagagatccttgagcgggtggacgggaggcgcctggtgtacaagtttggtaaaaattcgagtggctggaaggaggaagaggtgctgcagagccggaactag

SEQ ID NO: 42982 - DNA, 1116 bp, Artificial Sequence
  derived and/or modified sequence
atggccgcaacgtgcgaaattagcaacatcttcagtaactattttagtgccatgtattcgagcgaagatagcaccctggcatcagtgcctcctgccgccacctttggagcagatgaccttgtgctaactttgagcaatcctcagatgtccttagaaggaaccgaaaaggctagttggctcggggagcagccccagttttggagcaagacccaagtgctggattggatatcttaccaggttgagaaaaacaagtacgacgccagcgccatcgacttctctaggtgtgacatggacggggcaactttatgcaactgcgccttggaagagcttaggctggttttcggacctctcggagatcagctgcatgcccaactacgggacttaaccagctcttcttcagacgagctgagttggattatagaactgctggagaaagatggaatggctttccaggaggctctggatccgggaccattcgatcaagggagtcctttcgcccaggagttacttgatgatggtcagcaggcatccccctatcatcccggttcatgtggcgccggggccccgagcccgggcagtagcgacgtgtcaaccgccgggacaggcgcctcaagaagctcccacagttcagacagcggcggttctgatgtggacctcgatccaactgatggtaagctgtttccatcagatggcttccgggactgtaagaaaggtgaccccaagcacggaaagaggaagagaggcagacctcgaaagctgtctaaggagtattgggactgcctcgaaggtaagaagagtaagcacgcccctcgcggcacacacttgtgggaattcatacgcgatattctgatccatccggagctaaacgaaggcctcatgaaatgggagaaccgacacgagggagtgttcaagtttctcagatcagaggccgtcgcccagctgtggggtcagaagaaaaaaaattctaacatgacctacgaaaaactatcgcgagctatgagatattactataaacgagaaattctcgaaagagttgacggtaggaggttagtgtacaaattcggcaagaatagttccggctggaaggaggaagaggtccttcagagccgcaactag

SEQ ID NO: 42983 - DNA, 1116 bp, Artificial Sequence
  derived and/or modified sequence
atggcggccacgtgcgagatttctaacatcttctcaaattacttcagtgctatgtactcctcggaggactcaacactggcctcagtgcccccagcagcaactttcggcgcagacgaccttgtgctgaccttgagcaacccacagatgtctttggagggcacggaaaaagcgtcatggctgggggaacagccacagttttggtccaagacgcaagtgcttgattggatctcctatcaggtggaaaaaaataaatatgacgctagcgccatcgatttctcgcgctgtgatatggatggcgctaccctgtgcaactgcgctctggaagagttgagactggtgtttggacccctaggagatcagcttcacgcccaactgcgagatctgacttcctctagtagtgacgagctgtcttggatcattgagttacttgaaaaggacggtatggctttccaggaagcccttgaccctggaccatttgatcagggcagtccattcgcccaggagctactggacgacggacagcaggccagcccatatcacccaggatcctgcggggctggcgcgccgagccctggctcgagcgacgtctctacagccggaacaggtgcctctaggtcttcacattccagcgactctgggggatctgatgtggacctcgatcctacagatggcaagcttttccctagcgacggtttccgcgactgcaagaagggcgatccaaagcatgggaagaggaagagggggaggcctaggaagctcagcaaggagtattgggactgcttggaaggaaaaaagtcaaaacacgctccccgcggcacacacctctgggagtttatacgtgatattctgatccaccctgagcttaatgaggggctcatgaagtgggagaaccgacatgaaggagtgtttaagtttctacgcagtgaggctgttgcccagctgtgggggcagaaaaagaaaaacagcaatatgacctatgagaagctgagtagggctatgagatattactacaaaagggagatattggagcgggtcgacggccggcgcctggtctacaaattcggcaaaaactcctccggctggaaggaagaagaggtactgcaatcgaggaattag

SEQ ID NO: 42984 - DNA, 1116 bp, Artificial Sequence
  derived and/or modified sequence
atggctgccacgtgtgagatttcaaacattttctctaactacttcagcgccatgtactcatcagaggattccactctggcttctgtacccccagccgccacctttggtgccgacgatttagttctgaccctatctaatccccagatgtccctagagggtacagagaaggctagctggttgggcgagcagccccagttttggagcaagacacaggtgttagattggatctcttatcaggtcgaaaagaacaaatatgacgcgtcagccatcgattttagtagatgtgacatggacggggccacactttgtaactgcgctcttgaagaactgagacttgtgttcgggccacttggcgaccaactgcacgcgcagctaagagacttgacctcctcaagtagcgatgagctctcatggatcattgaactcctggagaaggacgggatggccttccaggaggcccttgatccaggcccattcgatcaggggtcgccttttgcccaggaactgctagacgacggacaacaggcctccccctatcatccaggctcatgtggtgcaggcgctccttcacctggctcctccgacgtctctactgcgggaacgggcgcgagcagatctagccattcatcagattctggcggcagcgatgtagaccttgacccaaccgacggcaagttgttccctagcgacgggttcagagactgcaaaaagggtgaccccaagcacggaaaacgcaagcgcggccggccccggaaactgtccaaagagtattgggactgtcttgagggtaagaagtcgaaacatgccccccgcggaactcatttgtgggagttcatacgtgatatcttgatccacccagagcttaacgaaggtttgatgaagtgggaaaacagacacgaaggcgtgttcaaattcctaaggagtgaagccgtcgcccagctgtggggacagaagaaaaagaattcaaatatgacctatgaaaaattatctcgggctatgcggtattactataaaagggagatacttgagcgcgtggacggccgaaggttggtttacaagttcggaaagaactcttcaggctggaaggaagaggaagtactccagagccgcaattag

SEQ ID NO: 42985 - DNA, 699 bp, Artificial Sequence
  derived and/or modified sequence
atggcagctacctgtgaaatttctaacatcttttcgaactatttctccgctatgtacagtagcgaagactccactctggcctctgttccacctgctgccacatttggagctgatgacctggtcttaacactaagtaatccacagatgagcctcgaggagaaagcaagctggctcggggagcaaccacaattctggtccaaaacccaggtgctggactggatctcctaccaggtggaaaaaaacaaatatgacgcctccgcaattgatttttccagatgtgatatggacggagctactctatgcaattgtgcgctggaggagctgcgtctcgtctttggacctttgggcgatcagttacacgctcagcttcgggacctgaccagtagctcttcagatgagctcagctggattatagaactgttggagaaggatggcatggcattccaggaggctctggatcctggaccttttgatcaaggatctcccttcgctcaagaacttctggacgacggccaacaggcttccccctatcatcccggcagttgtggtgccggtgctccctccccaggtagtagtgatgtgagcaccgccggtaccggagcctcccggagtagtcattcctcagactccggaggctctgatgtagacctggatcctaccgacgggaagctgtttccatctgacggttttcgcgattag

SEQ ID NO: 42986 - DNA, 1047 bp, Artificial Sequence
  derived and/or modified sequence
atggccgccacctgtgagatcagcaacatcttcagcaactacttcagcgccatgtacagcagcgaggacagcaccctggcctctgtgcccccagctgccacctttggagcagatgacctggtgctgaccctgagcaacccccagatgagcctggagggcacagagaaggcctcctggctgggggagcagccccagttctggagcaagacccaggtgctggactggatctcctaccaggtggagaagaacaagtatgatgccagcgccatcgacttcagccgctgtgacatggatggagccaccctgtgcaactgtgccctggaggagctgcggctggtgtttggccccctgggggaccagctgcacgcccagctgcgggacctgaccagcagcagcagtgatgagctgtcctggatcatcgagctgctggagaaggatggcatggccttccaggaggccctggaccccggcccctttgaccagggcagcccctttgcccaggagctgctggatgatgtgtccacagctggcaccggggccagccgcagcagccacagcagtgacagcggcggcagtgatgtggacctggaccccacagatggcaagctgttccccagtgatggcttccgggactgcaagaagggggaccccaagcacggcaagaggaagaggggccggcccaggaagctgagcaaggagtactgggactgcctggagggcaagaagagcaagcacgccccccggggcacccacctgtgggagttcatccgggacatcctgatccaccctgagctgaatgaaggcctgatgaagtgggagaacagacatgagggcgtcttcaagttcctgcggtctgaggccgtggcccagctgtggggccagaagaagaagaacagcaacatgacctatgagaagctgagccgggccatgagatactactacaagcgggagatcctggagcgggtggatggaagaaggctggtgtacaagtttgggaagaacagcagcggctggaaggaggaggaggtgctgcagagcagaaattag

SEQ ID NO: 42987 - DNA, 1116 bp, Artificial Sequence
  derived and/or modified sequence
atggccgccacctgtgagatcagcaacatcttcagcaactacttcagcgccatgtacagcagcgaggacagcaccctggcctctgtgcccccagctgccacctttggagcagatgacctggtgctgaccctgagcaacccccagatgagcctggagggcacagagaaggcctcctggctgggggagcagccccagttctggagcaagacccaggtgctggactggatctcctaccaggtggagaagaacaagtatgatgccagcgccatcgacttcagccgctgtgacatggatggagccaccctgtgcaactgtgccctggaggagctgcggctggtgtttggccccctgggggaccagctgcacgcccagctgcgggacctgaccagcagcagcagtgatgagctgtcctggatcatcgagctgctggagaaggatggcatggccttccaggaggccctggaccccggcccctttgaccagggcagcccctttgcccaggagctgctggatgatggccagcaggccagcccctaccaccctggcagctgtggggccggggcccccagccctggcagcagtgatgtgtccacagctggcactggagccagccgcagcagccacagcagtgacagcggcggcagtgatgtggacctggaccccacagatggcaagctgttccccagtgatggcttccgggactgcaagaagggggaccccaagcacggcaagaggaagaggggccggcccaggaagctgagcaaggagtactgggactgcctggagggcaagaagagcaagcacgccccccggggcacccacctgtgggagttcatccgggacatcctgatccaccctgagctgaatgaaggcctgatgaagtgggagaacagacatgaaggagtcttcaagttcctgcggtctgaggccgtggcccagctgtggggccagaagaagaagaacagcaacatgacctatgagaagctgagccgggccatgagatactactacaagcgggagatcctggagcgggtggatggccggcggctggtgtacaagtttgggaagaacagcagcggctggaaggaggaggaggtgctgcagagcaggaactag

SEQ ID NO: 42988 - DNA, 699 bp, Artificial Sequence
  derived and/or modified sequence
atggccgccacctgtgagatcagcaacatcttcagcaactacttcagcgccatgtacagcagcgaggacagcaccctggcctctgtgcccccagctgccacctttggagcagatgacctggtgctgaccctgagcaacccccagatgagcctggaggagaaggcctcctggctgggggagcagccccagttctggagcaagacccaggtgctggactggatctcctaccaggtggagaagaacaagtatgatgccagcgccatcgacttcagccgctgtgacatggatggagccaccctgtgcaactgtgccctggaggagctgcggctggtgtttggccccctgggggaccagctgcacgcccagctgcgggacctgaccagcagcagcagtgatgagctgtcctggatcatcgagctgctggagaaggatggcatggccttccaggaggccctggaccccggcccctttgaccagggcagcccctttgcccaggagctgctggatgatggccagcaggccagcccctaccaccctggcagctgtggggccggggcccccagccctggcagcagtgatgtgtccacagctggcactggagccagccgcagcagccacagcagtgacagcggcggcagtgatgtggacctggaccccacagatggcaagctgttccccagtgatggcttccgggactag

SEQ ID NO: 42989 - DNA, 1047 bp, Artificial Sequence
  derived and/or modified sequence
atggccgccacctgcgagatcagcaacatcttcagcaactacttctcagctatgtactcatctgaagattcaaccctggcatcagtgccacccgctgccacctttggggcagacgacctggtgctgactctgagcaatccccagatgagtttagagggcaccgagaaggctagctggttgggtgagcaaccccagttctggagcaagacccaagttctggattggatttcgtaccaagtggagaaaaacaagtatgacgcctccgccattgacttctcccgttgcgacatggatggtgcaaccctgtgcaactgtgctttagaggaactaaggctcgtgttcggacctttgggagaccagctccacgctcaactgagggaccttacctcatcctcatctgacgagctgtcatggattattgaacttctagagaaagatggcatggccttccaggaggccctggacccggggcctttcgaccagggctctcccttcgctcaggaactactggatgatgttagcacggctggaacaggggcctctcgttcctcccatagctccgacagcggaggctcagacgtggacctggatcctaccgacggtaagctcttcccgagcgacggcttccgagattgtaagaagggcgaccccaaacacggcaaaaggaagaggggaaggcctcggaaactgagcaaggaatactgggactgtcttgaaggcaagaagagcaagcatgcacccagaggaacacacctttgggagttcattcgggacatcctgattcatccagaactgaacgaaggcttaatgaagtgggaaaataggcatgagggcgtcttcaaattcctgagatccgaagcagtggcccaactgtggggtcagaaaaagaaaaatagcaatatgacttatgagaaactgtccagagccatgcggtactactataagcgagagatcctcgagagagtcgacggccgacggcttgtgtacaaattcggcaaaaatagcagcggctggaaagaagaggaagttcttcagagccgtaactag

SEQ ID NO: 42990 - DNA, 1116 bp, Artificial Sequence
  derived and/or modified sequence
atggccgccacctgcgagatcagcaacatcttcagcaactacttctccgccatgtactcatccgaggactccactttagcgtcagtgcctccagctgctaccttcggcgctgacgacctagttctgactctctctaatccacagatgtctttggagggcaccgagaaggcttcttggctgggagaacagccccagttctggtccaaaacccaagtcttggactggatttcctatcaggttgaaaagaataagtacgacgcgtccgcaattgatttctctcggtgtgatatggacggcgccaccctctgcaattgcgcactggaggaactgagactggtattcgggcccctcggggatcagcttcacgctcaactgagggatctgacctcttcttcaagcgacgagctgtcatggatcatagagcttttagagaaagacggcatggcattccaggaagccctggacccaggaccattcgatcagggcagccccttcgcccaagagttgctggatgacgggcagcaggcttctccatatcatcctgggagctgtggagctggggctccctcccctgggtcttccgacgtgtctactgcagggaccggcgctagccgcagctctcactcctcagactctgggggaagtgatgttgatctggaccctaccgacggcaagctgttcccatctgatggatttagggattgcaagaagggggaccctaagcatgggaaacggaaaaggggccgtcctagaaagctgagtaaggaatattgggactgcttggagggcaagaagagcaaacatgccccacgcggcacccacttgtgggaattcatcagggacatacttatccatccagaactcaatgaaggcctgatgaaatgggagaaccggcatgagggggtgttcaagttcctaaggtccgaggctgtggctcaactttggggccagaagaagaagaacagcaacatgacatacgaaaagttgtctcgcgcaatgcgatactattataagcgggagattttagaaagagtcgacgggagacgactggtgtataagttcggtaagaatagttctggatggaaagaagaggaggtgttgcagagcagaaattag

SEQ ID NO: 42991 - DNA, 1116 bp, Artificial Sequence
  derived and/or modified sequence
atggccgccacctgcgagatcagcaacatcttcagcaactacttctccgccatgtatagctcagaggattccacactggccagtgtgcctcccgccgctacatttggtgctgatgatctcgtgctcaccctgtctaacccacagatgtctttagagggcaccgagaaggctagctggctcggggagcagccccaattttggtcaaagacacaagtcctcgactggatcagttaccaggtggagaagaataagtatgacgcgagtgccatagatttctcacgctgtgacatggacggggccaccctatgcaattgtgccctggaagagctcaggttggtgttcggacccctcggcgatcaactacacgcccagttaagagatctgacgtcgagtagctccgatgagttgagctggatcattgagctattggagaaggacgggatggccttccaggaggctctcgatcccgggcccttcgatcaaggcagcccattcgcccaggagctgttggacgacggccagcaagcgagtccctaccatcctggctcctgcggagcaggcgccccctcccccggatccagtgacgtatccaccgctgggacgggtgcatcacgctcctcacacagttctgattctggcgggagtgatgtggacctggacccgactgacggaaaattattcccctccgatgggttcagagattgtaagaaaggggatcccaagcatgggaagcggaagagaggtagacccagaaagctcagcaaagagtattgggactgcttagagggaaaaaaaagcaaacatgctcccaggggtacacatctctgggagtttatacgtgatatcctcatccaccctgagctaaatgaaggcctgatgaaatgggagaatagacatgagggcgtcttcaaatttctcaggtctgaggcagtggcacagctgtgggggcagaaaaagaagaattctaatatgacctacgagaagttaagtagggcaatgcgctattactataagagggagattctagagcgcgtggatgggcgacgactggtgtataagttcgggaaaaacagctcaggatggaaagaagaagaagtattgcaatcccgcaattag

SEQ ID NO: 42992 - DNA, 1116 bp, Artificial Sequence
  derived and/or modified sequence
atggccgccacctgcgagatcagcaacatcttcagcaactacttctccgcgatgtactcttccgaagatagcactctagccagtgtcccgcccgccgcaacatttggagctgacgacctggtcctgaccctttctaatccacagatgtctcttgagggtactgagaaggcctcgtggctcggggagcagcctcagttttggtccaagacacaggttttggactggatttcttaccaggtcgagaagaataaatatgacgcaagcgctattgatttttcacgatgcgacatggatggcgcaacactgtgtaactgcgcgctggaagaactcaggcttgtgttcggacccctaggcgaccagcttcacgcccaactgagggatctcaccagtagctcctctgatgaactgtcctggataattgagctcctggagaaagatgggatggcgtttcaagaggccctggatccaggaccatttgaccagggctcgccattcgcccaggaattattagacgatggtcaacaagcctccccatatcaccccggatcctgcggggccggggctccatcgccgggcagttcagatgtgtcaactgccggcacaggtgcctctagatcaagccactctagtgactccggggggagtgacgtggatctcgatcccacggacggcaagctctttcccagcgatggcttccgagattgtaaaaaaggggatccgaagcatgggaaaagaaaaagaggccgtcctcgaaaattaagcaaggagtactgggattgcctggagggtaaaaaaagcaaacacgcacccagaggcacccatctgtgggagtttataagagatatcttgatacacccagaactcaatgagggcctcatgaaatgggagaacaggcacgagggggtatttaaattcctccgctccgaagcagtggcacagctttgggggcagaagaaaaaaaactcaaacatgacttacgagaagctctcccgggcgatgagatactattacaaaagggaaattctggaacgtgtggacgggcgcaggctggtatataaatttggtaagaatagtagcggttggaaagaggaggaagttctgcagtccaggaattag

SEQ ID NO: 42993 - DNA, 699 bp, Artificial Sequence
  derived and/or modified sequence
atggccgccacctgcgagatcagcaacatcttcagcaactacttctccgccatgtatagtagcgaggattccaccctggcctcagtgccccctgccgctaccttcggtgcagacgatttagttctcacgctgagcaaccctcagatgtccctagaagagaaagctagctggctcggggaacagccacagttctggtctaagacccaggtcctggattggatcagctaccaggtggagaaaaataaatatgatgccagtgccatcgacttcagccggtgtgatatggacggggccactctatgcaactgcgccctggaagagctcagactcgtgtttggccctttgggtgaccaactgcacgctcagctgagggacttaacctcatcttcctccgacgagctgtcctggataatcgaattactggagaaagacgggatggcctttcaggaagcccttgatccaggtccattcgaccagggatccccctttgcccaggagctattagacgatggacagcaggcatctccctaccatccaggcagctgtggggcgggggccccaagccccgggagctctgatgtgagcacagccggaactggggcttcccgctcatctcacagttcagatagcgggggctctgacgtcgacctcgacccaaccgatggaaagctgttcccaagtgacggtttcagagactag

SEQ ID NO: 42994 - DNA, 1047 bp, Artificial Sequence
  derived and/or modified sequence
atggccgctacgtgcgagatttctaatatcttctccaattacttcagcgccatgtactcttctgaagattctacactggcaagcgtccctccagcggcaaccttcggcgctgatgacctggtgctgaccctctcaaacccacagatgtcattagagggcaccgagaaggcctcctggctaggggagcagccacaattctggtctaaaacccaggttctggattggataagttaccaggtggagaagaataagtacgatgccagtgctattgactttagcaggtgtgatatggacggtgctacattgtgtaattgtgcgcttgaggagctccggcttgtcttcggtcccctcggggatcagctccatgctcagctcagggacctgacttcatcctccagtgacgagctatcttggattattgagttgttagaaaaggacggtatggcctttcaggaggccctggatcctggaccatttgatcaggggagcccttttgcgcaggagctgttagacgatgtttcaacggccggaactggcgcatctcgttcttctcattctagtgatagtggaggttctgatgtagacctggaccccactgacgggaaactgttcccctccgatgggttccgggactgcaaaaaaggagacccaaagcacggcaaacgaaaacgcggacgccctaggaaactgtcaaaagagtattgggattgtctggagggcaaaaaatcaaagcacgctccccgaggcactcacttgtgggaattcataagagacatactaatccaccccgagttaaacgaaggacttatgaaatgggagaaccggcatgagggggtgttcaaatttctgcgctccgaagccgtcgcgcagctttgggggcagaagaagaaaaacagtaacatgacttatgaaaagctaagccgggcaatgcggtactactacaaaagggagattctggaacgtgttgacgggagacgccttgtctacaaattcgggaaaaattccagtggctggaaggaagaggaggtcttacagtccagaaactag

SEQ ID NO: 42995 - DNA, 1116 bp, Artificial Sequence
  derived and/or modified sequence
atggccgcaacatgtgaaatctctaatatcttcagcaactatttttcagccatgtactcctcggaggatagtactctggcctcagtcccgccagcggctacctttggagcggacgatctggtcctgacactttctaaccctcaaatgtctctagagggtacggagaaggcatcctggctcggcgagcaacctcagttttggagtaagacacaggttctcgattggatctcttatcaggtcgaaaaaaacaagtatgatgccagcgccatcgacttcagccgatgcgacatggatggagctacgctttgtaattgtgccctcgaagagcttcggctggtgttcggaccactgggtgaccagcttcatgcccagctgagagatcttacgtccagttctagcgacgagctttcttggataatcgaactgctggagaaggacggcatggcattccaggaggctctggaccctggcccattcgatcagggcagcccttttgcgcaagagctgctcgacgatggtcaacaggccagcccataccatccaggcagctgtggggctggagctccaagcccaggaagcagcgacgtgtccaccgcaggaaccggagcatctcggtcgagccactctagtgacagtggcggatccgacgtggatcttgatccgacagacggcaaactgttccctagtgatggctttcgtgattgcaagaagggggatccaaaacatggaaagaggaaaagagggaggccaaggaagttgtctaaggaatactgggactgccttgaaggtaaaaaatcaaagcatgcccctagggggactcacctgtgggagttcatccgagacatcttgatccacccagaactgaatgaagggctcatgaaatgggaaaatcgtcatgagggggtgttcaaattcctgcgttccgaagccgtcgcacaactctggggccagaagaaaaaaaacagcaatatgacctatgagaaactttcccgggcaatgcggtactattacaaacgtgagatcttggagcgggtcgacggaaggcggctcgtatataagtttggcaaaaactcctccgggtggaaagaggaagaagtactccagagccgaaattag

SEQ ID NO: 42996 - DNA, 1116 bp, Artificial Sequence
  derived and/or modified sequence
atggcagccacatgtgaaatttccaacatcttttccaactacttcagtgccatgtactcaagcgaggactccacactcgcatcggtgccaccggcagccacttttggcgctgatgaccttgtgctaactttatctaacccccagatgagtttggagggtacggagaaggcatcatggctgggcgagcagccacagttttggtccaaaacccaggtgctggactggatatcctatcaggttgagaagaacaagtacgatgccagcgccatcgattttagccggtgcgatatggatggtgctactctgtgcaactgcgctctggaggagctaaggctagtctttgggcctctgggtgaccagctgcacgcacagctgagggatctgacttcttcttcctccgatgaactatcgtggatcattgagttgttggaaaaggatggcatggcatttcaagaagcgctcgatcccggaccgttcgaccaggggtcccctttcgcccaggagttactggatgacgggcaacaggctagtccctaccaccctggctcttgcggggcaggtgctcccagtcccggaagtagcgacgtgtcaacagccggaacaggtgcgtcgcggtcgtcccattcctcagattccggtgggtcagacgtcgacttagacccaactgacggcaaattatttccaagtgatggcttccgagactgcaaaaaaggagaccccaaacacggaaaacgcaaacggggacgccctcgaaaactttccaaggaatactgggattgtctggagggaaaaaagagcaaacacgctccaagagggacacatctgtgggaattcattagggacattcttatccaccctgagcttaacgagggcctgatgaagtgggagaaccgccatgaaggtgtgttcaagttcttgcgctctgaggctgttgctcagctctgggggcaaaaaaagaaaaattctaatatgacgtacgagaaactttcccgggctatgcggtactactacaaaagggagattctggagagggtcgacggtcgcaggctggtgtacaaattcggcaagaatagctccggatggaaagaggaggaagtgctacagagccgcaactag

SEQ ID NO: 42997 - DNA, 1116 bp, Artificial Sequence
  derived and/or modified sequence
atggcggctacttgcgaaatttctaacatcttttctaactacttcagcgccatgtattcctccgaggattctaccctcgccagcgtgcctccagccgctacattcggggctgatgaccttgtcctcactctctcgaatcctcaaatgtccctggaaggcactgagaaagcctcttggttaggggagcagcctcagttttggtccaagactcaggtgctcgattggatctcgtatcaggttgaaaagaataagtacgatgcctccgcaatcgatttcagtaggtgtgacatggacggtgcaacgttatgcaactgtgcgctagaggagctaagactggtcttcggccctcttggagaccagttgcacgcccagctgcgagatctaacgtcgtcttcaagtgacgagctttcttggatcattgaactcctggaaaaggacggaatggcgttccaggaggctttagatccagggcctttcgatcagggcagtcctttcgcacaggaactcctcgacgatggacagcaggcgtccccctaccacccaggcagctgtggcgcaggggctcccagcccgggaagtagcgacgtctcgacagctggaacaggagcttcgaggtcgagtcactccagtgactcaggaggcagcgacgtggatctggatccgacagatgggaagctgtttccaagcgacggcttccgggattgcaaaaagggggatccaaagcatggaaagcgtaagcggggtaggcccaggaaactgtctaaagaatactgggactgtctggaaggtaaaaaatccaagcatgcccctcgcggaacacatctttgggagtttatccgcgacatcttaatccatccggaactcaacgagggactcatgaaatgggagaataggcacgagggcgtgttcaaattcctccgaagtgaagccgtagcccaactatggggtcagaaaaagaagaacagcaacatgacttacgagaaactaagcagagctatgagatattattacaaacgtgagatactcgaacgggtggacggaaggcggctagtttacaagttcggtaagaattcttccgggtggaaagaggaggaggtgctacaatctcgtaattag

SEQ ID NO: 42998 - DNA, 699 bp, Artificial Sequence
  derived and/or modified sequence
atggccgctacgtgtgagatttctaacatttttagtaactactttagtgctatgtactcttctgaggatagcaccctggcatcggttccacccgctgctacctttggcgctgacgatctcgtgctgaccctgagcaatcctcagatgtcgctggaagagaaggcatcctggctaggggaacagccccaattttggtccaagacccaagttctggactggattagctatcaggtcgaaaaaaacaaatatgacgcatccgctattgatttttctaggtgtgacatggacggggctaccctgtgcaattgcgctctggaggaactccgcctggttttcggccctctcggggatcaactccatgcacagctacgggatctcacctcatctagcagtgatgaactgtcctggataatcgagctgctggagaaggacgggatggcattccaagaggccctggaccctggacccttcgaccaggggtccccctttgctcaagaactgttagacgacggtcagcaggccagcccttaccaccccggatcttgcggagccggagctcccagccctggttccagtgatgtgagtactgctggtactggggcaagccgcagttcccattcaagcgacagcggcggtagcgacgtggatctggatccaactgacggcaagttgtttccctccgacgggttccgagattag

SEQ ID NO: 42999 - DNA, 1047 bp, Artificial Sequence
  derived and/or modified sequence
atggccgccacctgcgagatcagcaacatcttcagcaactacttcagcgccatgtacagcagcgaggacagcaccctggccagcgtgccccccgccgccaccttcggcgccgacgacctggtgctgaccctgagcaacccccagatgagcctggagggcaccgagaaggccagctggctgggcgagcagccccagttctggagcaagacccaggtgctggactggatcagctaccaggtggagaagaacaagtacgacgccagcgccatcgacttcagcagatgcgacatggacggcgccaccctgtgcaactgcgccctggaggagctgagactggtgttcggccccctgggcgaccagctgcacgcccagctgagagacctgaccagcagcagcagcgacgagctgagctggatcatcgagctgctggagaaggacggcatggccttccaggaggccctggaccccggccccttcgaccagggcagccccttcgcccaggagctgctggacgacgtgagcaccgccggcaccggcgccagcagaagcagccacagcagcgacagcggcggcagcgacgtggacctggaccccaccgacggcaagctgttccccagcgacggcttcagagactgcaagaagggcgaccccaagcacggcaagagaaagagaggcagacccagaaagctgagcaaggagtactgggactgcctggagggcaagaagagcaagcacgcccccagaggcacccacctgtgggagttcatcagagacatcctgatccaccccgagctgaacgagggcctgatgaagtgggagaacagacacgagggcgtgttcaagttcctgagaagcgaggccgtggcccagctgtggggccagaagaagaagaacagcaacatgacctacgagaagctgagcagagccatgagatactactacaagagagagatcctggagagagtggacggcagaagactggtgtacaagttcggcaagaacagcagcggctggaaggaggaggaggtgctgcagagcagaaactag

SEQ ID NO: 43000 - DNA, 1116 bp, Artificial Sequence
  derived and/or modified sequence
atggccgccacctgcgagatcagcaacatcttcagcaactacttcagcgccatgtacagcagcgaggacagcaccctggccagcgtgccccccgccgccaccttcggcgccgacgacctggtgctgaccctgagcaacccccagatgagcctggagggcaccgagaaggccagctggctgggcgagcagccccagttctggagcaagacccaggtgctggactggatcagctaccaggtggagaagaacaagtacgacgccagcgccatcgacttcagcagatgcgacatggacggcgccaccctgtgcaactgcgccctggaggagctgagactggtgttcggccccctgggcgaccagctgcacgcccagctgagagacctgaccagcagcagcagcgacgagctgagctggatcatcgagctgctggagaaggacggcatggccttccaggaggccctggaccccggccccttcgaccagggcagccccttcgcccaggagctgctggacgacggccagcaggccagcccctaccaccccggcagctgcggcgccggcgcccccagccccggcagcagcgacgtgagcaccgccggcaccggcgccagcagaagcagccacagcagcgacagcggcggcagcgacgtggacctggaccccaccgacggcaagctgttccccagcgacggcttcagagactgcaagaagggcgaccccaagcacggcaagagaaagagaggcagacccagaaagctgagcaaggagtactgggactgcctggagggcaagaagagcaagcacgcccccagaggcacccacctgtgggagttcatcagagacatcctgatccaccccgagctgaacgagggcctgatgaagtgggagaacagacacgagggcgtgttcaagttcctgagaagcgaggccgtggcccagctgtggggccagaagaagaagaacagcaacatgacctacgagaagctgagcagagccatgagatactactacaagagagagatcctggagagagtggacggcagaagactggtgtacaagttcggcaagaacagcagcggctggaaggaggaggaggtgctgcagagcagaaactag

SEQ ID NO: 43001 - DNA, 699 bp, Artificial Sequence
  derived and/or modified sequence
atggccgccacctgcgagatcagcaacatcttcagcaactacttcagcgccatgtacagcagcgaggacagcaccctggccagcgtgccccccgccgccaccttcggcgccgacgacctggtgctgaccctgagcaacccccagatgagcctggaggagaaggccagctggctgggcgagcagccccagttctggagcaagacccaggtgctggactggatcagctaccaggtggagaagaacaagtacgacgccagcgccatcgacttcagcagatgcgacatggacggcgccaccctgtgcaactgcgccctggaggagctgagactggtgttcggccccctgggcgaccagctgcacgcccagctgagagacctgaccagcagcagcagcgacgagctgagctggatcatcgagctgctggagaaggacggcatggccttccaggaggccctggaccccggccccttcgaccagggcagccccttcgcccaggagctgctggacgacggccagcaggccagcccctaccaccccggcagctgcggcgccggcgcccccagccccggcagcagcgacgtgagcaccgccggcaccggcgccagcagaagcagccacagcagcgacagcggcggcagcgacgtggacctggaccccaccgacggcaagctgttccccagcgacggcttcagagactag

SEQ ID NO: 43002 - DNA, 1848 bp, Artificial Sequence
  derived and/or modified sequence
atttagagccgggtaggggagcgcagcggccagatacctcagcgctacctggcggaactggatttctctcccgcctgccggcctgcctgccacagccggactccgccactccggtagcctcatggctgcaacctgtgagattagcaacatttttagcaactacttcagtgcgatgtacagctcggaggactccaccctggcctctgttccccctgctgccacctttggggccgatgacttggtactgaccctgagcaacccccagatgtcattggagggtacagagaaggccagctggttgggggaacagccccagttctggtcgaagacgcaggttctggactggatcagctaccaagtggagaagaacaagtacgacgcaagcgccattgacttctcacgatgtgacatggatggcgccaccctctgcaattgtgcccttgaggagctgcgtctggtctttgggcctctgggggaccaactccatgcccagctgcgagacctcacttccagctcttctgatgagctcagttggatcattgagctgctggagaaggatggcatggccttccaggaggccctagacccagggccctttgaccagggcagcccctttgcccaggagctgctggacgacgtctccaccgcagggactggtgcttctcggagctcccactcctcagactccggtggaagtgacgtggacctggatcccactgatggcaagctcttccccagcgatggttttcgtgactgcaagaagggggatcccaagcacgggaagcggaaacgaggccggccccgaaagctgagcaaagagtactgggactgtctcgagggcaagaagagcaagcacgcgcccagaggcacccacctgtgggagttcatccgggacatcctcatccacccggagctcaacgagggcctcatgaagtgggagaatcggcatgaaggcgtcttcaagttcctgcgctccgaggctgtggcccaactatggggccaaaagaaaaagaacagcaacatgacctacgagaagctgagccgggccatgaggtactactacaaacgggagatcctggaacgggtggatggccggcgactcgtctacaagtttggcaaaaactcaagcggctggaaggaggaagaggttctccagagtcggaactgagggttggaactatacccgggaccaaactcacggaccactcgaggcctgcaaaccttcctgggaggacaggcaggccagatggcccctccactggggaatgctcccagctgtgctgtggagagaagctgatgttttggtgtattgtcagccatcgtcctgggactcggagactatggcctcgcctccccaccctcctcttggaattacaagccctggggtttgaagctgactttatagctgcaagtgtatctccttttatctggtgcctcctcaaacccagtctcagacactaaatgcagacaacaccttcctcctgcagacacctggactgagccaaggaggcctggggaggccctaggggagcaccgtgatggagaggacagagcaggggctccagcaccttctttctggactggcgttcacctccctgctcagtgcttgggctccacgggcaggggtcagagcactccctaatttatgtgctatataaatatgtcagatgtacatagagatctattttttctaaaacattcccctccccactcctctcccacagagtgctggactgttccaggccctccagtgggctgatgctgggacccttaggatggggctcccagctcctttctcctgtgaatggaggcagagacctccaataaagtgccttctgggctttttct

SEQ ID NO: 43003 - DNA, 4994 bp, Artificial Sequence
  derived and/or modified sequence
gtgctgccgtgtgggcaagctctgtggggagaggggaggccagtgggttgtttttgccatcacagaatactgggaagcccctggcatcctgctccatagctctcttcaccactatcctggaaccttctccccacccccatccccatgcctccaaggcactgacctcaaatccaagtctttctcacttatctcaagctgccagcctgtagggattccttatctcagctccatgtcagcggtgaggaagccccaagaaggcaagggagctgacagccttctcatttttctcgtacatcctcctgttcaccccgccatcccgggagccccagccagatgctcttcagggcagggagcacgtgagcagccctggggctagaagccggttctcccacattcctgggtgagggactgggtggagggtgtgcctgcctcaggctccttgggggaggccccctgaagggctggggaaaatcctactgagccccaggctctcctgcctgcactggcccagtgcgggggcgggggggcggggggatcctggacattaactctctcctaggcacctgggagcttcagagaggaagaaggtaaggtaagaagcagattctctgcgcaggactttcttagtcctcaggctatagagttaaagaaagaagtatctgtagaaggtggagtcaccttttgtttgagtaaccgtttcacccaccctggctgagggtggccaggaactccccaagttgtgcattaatggaggggggtcacacagatcctacatttttttgtttttgtttttttttttttgagacgcagtgattacaggtgtgagccaccggatcctacatttcaaatgcataaaaatctagatatgggctgggcgcagtagctcatgcctgtaatcccagcactttgggaggctgaggcaggcagatcatgaggtcaggagatcgagtccatcctggctaacatggtgaaaccccgtctctactaaaaatacagaaagccgggcatggcagcgggcgcctgtaatcccagctactcggaaagctgaggcaggagaatcgcttgaacccaggagtcagaggttgcagtgagcagagatcacgccactgcactccaacctgggcgacagagcgagactccacctcaaaacaaaataaacaaaatactagatctggaagagatcttagggattattaaattcagacaacctcattttttatagatggggaaacaagcacagactccaagggtctcatccaagatcacacagttgcagatgctggctacaagtctcctgcctcaaccacctgtattaccccattcagggtctcaagaagggtctataagacactatccattgtgtttcgggctgagtccatagagacaaccacagacatgggggactctgcccacagggaaggcaagggctctggccatggagctggatgggaagactctgaagcccgaagacattgaatcctgtgcagggaaagagcgagggttttgtgtacaacacacctgcatacctggatgtgaatctcagctccaccccttcaccaactctgtgtggcctgggcaagccattctaagggaaccctccacactgcaactttcatgtctataaaatgggaataaccatgcattccttacaggacttttttggtgtgaggattaaatgagagaatatgttgaaaagtgcttggtaaatatattaatactatgcattccctcttctttgaatgacgtgacccaggtagtcaggcttctgaccactagagggcagcagaaggtactggaaaactgggccgagtgaaccagagattagatggggtccagagagcagggatgaacttacccgtgtggattctggcaactccggcagggagggctccagcaggcgctgagggaagaactttcaagcagagccgggtctcttcaggagcgactgcagcaaccctgatgcttggatggagtccaggcaggtgatggtagtgaagaccttgccaacagagtgggcgctggagaaggagccctttagtggggaccctggggccacgactaggctggcaggcccagccagcaccaattaatccatgagtattgcccagcattgagcctggagcaccttccagcccctggccagagtcctgggtgttctgggaaaaacccctaaacctagtaactcctctccctactaggcctctttgttgctgaatctctggaatttaggggccagcagctttctgactcaggtcagccaggggttcatgttccctcacttgccctccccctgcctggcccatctctggcctggcccctgggaggaatttcctgggccagagggcagccgaaagcacagatgcccaccccagcaacgttcccgccacctgcccaggccagtgccccgtgcccaaccccagagggtgcgggatgacagactctgacaatcattaaaccagccgggcctgatttcccagcactgcctgctaagatccgggccaagtggcactgaatatgcaaatcacctggggccaggagcccagtctaaaggccaggaaatcccctccatccaatgagacaccagctcaggttactgcaggggacacactataaagccctgagctcagggaggagctccctccaggctctatttagagccgggtaggggagcgcagcggccagatacctcagcgctacctggcggaactggatttctctcccgcctgccggcctgcctgccacagccggactccgccactccggtaggattccccgcctgtcattccctagcccagctcttgggaaactgcagaggggtccagaggatttgcagttctgaacctgcacactccagtctaggatctccgagcaagagcgtaggtgtcctgagggtcaaagaacagagagagattgtctctgggaaggcagaatggccatgacgccgctagtctggctccagggccccagagatctgaggagggaagcccagctggaggctcctgtggtcctgccctggtctgagatcttggagcccttcttgaagagacggtgtccgcagagttgctgatcttcctgcccctgggggctactcttgcccagggttgggcaaagcagagtagctgggagtgtaaggagaggaccctcgtcccctcaccaacctcatcctctctccccctacccacaggtagcctcatggctgcaacctgtgagattagcaacatttttagcaactacttcagtgcgatgtacagctcggaggactccaccctggcctctgttccccctgctgccacctttggggccgatgacttggtactgaccctgagcaacccccagatgtcattggagggtacagagaaggccagctggttgggggaacagccccagttctggtcgaagacgcaggttctggactggatcagctaccaagtggagaagaacaagtacgacgcaagcgccattgacttctcacgatgtgacatggatggcgccaccctctgcaattgtgcccttgaggagctgcgtctggtctttgggcctctgggggaccaactccatgcccagctgcgagacctcacttccagctcttctgatgagctcagttggatcattgagctgctggagaaggatggcatggccttccaggaggccctagacccagggccctttgaccagggcagcccctttgcccaggagctgctggacgacggtcagcaagccagcccctaccaccccggcagctgtggcgcaggagccccctcccctggcagctctgacgtctccaccgcagggactggtgcttctcggagctcccactcctcagactccggtggaagtgacgtggacctggatcccactgatggcaagctcttccccagcgatggttttcgtgactgcaagaagggggatcccaagcacgggaagcggaaacgaggccggccccgaaagctgagcaaagagtactgggactgtctcgagggcaagaagagcaagcacgcgcccagaggcacccacctgtgggagttcatccgggacatcctcatccacccggagctcaacgagggcctcatgaagtgggagaatcggcatgaaggcgtcttcaagttcctgcgctccgaggctgtggcccaactatggggccaaaagaaaaagaacagcaacatgacctacgagaagctgagccgggccatgaggtactactacaaacgggagatcctggaacgggtggatggccggcgactcgtctacaagtttggcaaaaactcaagcggctggaaggaggaagaggttctccagagtcggaactgagggttggaactatacccgggaccaaactcacggaccactcgaggcctgcaaaccttcctgggaggacaggcaggccagatggcccctccactggggaatgctcccagctgtgctgtggagagaagctgatgttttggtgtattgtcagccatcgtcctgggactcggagactatggcctcgcctccccaccctcctcttggaattacaagccctggggtttgaagctgactttatagctgcaagtgtatctccttttatctggtgcctcctcaaacccagtctcagacactaaatgcagacaacaccttcctcctgcagacacctggactgagccaaggaggcctggggaggccctaggggagcaccgtgatggagaggacagagcaggggctccagcaccttctttctggactggcgttcacctccctgctcagtgcttgggctccacgggcaggggtcagagcactccctaatttatgtgctatataaatatgtcagatgtacatagagatctattttttctaaaacattcccctccccactcctctcccacagagtgctggactgttccaggccctccagtgggctgatgctgggacccttaggatggggctcccagctcctttctcctgtgaatggaggcagagacctccaataaagtgccttctgggctttttctaacctt

SEQ ID NO: 43004 - DNA, 2044 bp, Artificial Sequence
  derived and/or modified sequence
aggctctatttagagccgggtaggggagcgcagcggccagatacctcagcgctacctggcggaactggatttctctcccgcctgccggcctgcctgccacagccggactccgccactccggtaggattccccgcctgtcattccctagcccagctcttgggaaactgcagaggggtccagaggatttgcagttctgaacctgcacactccagtctaggatctccgagcaagagcgtagcctcatggctgcaacctgtgagattagcaacatttttagcaactacttcagtgcgatgtacagctcggaggactccaccctggcctctgttccccctgctgccacctttggggccgatgacttggtactgaccctgagcaacccccagatgtcattggagggtacagagaaggccagctggttgggggaacagccccagttctggtcgaagacgcaggttctggactggatcagctaccaagtggagaagaacaagtacgacgcaagcgccattgacttctcacgatgtgacatggatggcgccaccctctgcaattgtgcccttgaggagctgcgtctggtctttgggcctctgggggaccaactccatgcccagctgcgagacctcacttccagctcttctgatgagctcagttggatcattgagctgctggagaaggatggcatggccttccaggaggccctagacccagggccctttgaccagggcagcccctttgcccaggagctgctggacgacggtcagcaagccagcccctaccaccccggcagctgtggcgcaggagccccctcccctggcagctctgacgtctccaccgcagggactggtgcttctcggagctcccactcctcagactccggtggaagtgacgtggacctggatcccactgatggcaagctcttccccagcgatggttttcgtgactgcaagaagggggatcccaagcacgggaagcggaaacgaggccggccccgaaagctgagcaaagagtactgggactgtctcgagggcaagaagagcaagcacgcgcccagaggcacccacctgtgggagttcatccgggacatcctcatccacccggagctcaacgagggcctcatgaagtgggagaatcggcatgaaggcgtcttcaagttcctgcgctccgaggctgtggcccaactatggggccaaaagaaaaagaacagcaacatgacctacgagaagctgagccgggccatgaggtactactacaaacgggagatcctggaacgggtggatggccggcgactcgtctacaagtttggcaaaaactcaagcggctggaaggaggaagaggttctccagagtcggaactgagggttggaactatacccgggaccaaactcacggaccactcgaggcctgcaaaccttcctgggaggacaggcaggccagatggcccctccactggggaatgctcccagctgtgctgtggagagaagctgatgttttggtgtattgtcagccatcgtcctgggactcggagactatggcctcgcctccccaccctcctcttggaattacaagccctggggtttgaagctgactttatagctgcaagtgtatctccttttatctggtgcctcctcaaacccagtctcagacactaaatgcagacaacaccttcctcctgcagacacctggactgagccaaggaggcctggggaggccctaggggagcaccgtgatggagaggacagagcaggggctccagcaccttctttctggactggcgttcacctccctgctcagtgcttgggctccacgggcaggggtcagagcactccctaatttatgtgctatataaatatgtcagatgtacatagagatctattttttctaaaacattcccctccccactcctctcccacagagtgctggactgttccaggccctccagtgggctgatgctgggacccttaggatggggctcccagctcctttctcctgtgaatggaggcagagacctccaataaagtgccttctgggctttttctaacctt

SEQ ID NO: 43005 - DNA, 3179 bp, Artificial Sequence
  derived and/or modified sequence
atgagacaccagctcaggttactgcaggggacacactataaagccctgagctcagggaggagctccctccaggctctatttagagccgggtaggggagcgcagcggccagatacctcagcgctacctggcggaactggatttctctcccgcctgccggcctgcctgccacagccggactccgccactccggtagcctcatggctgcaacctgtgagattagcaacatttttagcaactacttcagtgcgatgtacagctcggaggactccaccctggcctctgttccccctgctgccacctttggggccgatgacttggtactgaccctgagcaacccccagatgtcattggagggtacagagaaggccagctggttgggggaacagccccagttctggtcgaagacgcaggttctggactggatcagctaccaagtggagaagaacaagtacgacgcaagcgccattgacttctcacgatgtgacatggatggcgccaccctctgcaattgtgcccttgaggagctgcgtctggtctttgggcctctgggggaccaactccatgcccagctgcgagacctcacttccagctcttctgatgagctcagttggatcattgagctgctggagaaggatggcatggccttccaggaggccctagacccagggccctttgaccagggcagcccctttgcccaggagctgctggacgacggtcagcaagccagcccctaccaccccggcagctgtggcgcaggagccccctcccctggcagctctgacgtctccaccgcagggactggtgcttctcggagctcccactcctcagactccggtggaagtgacgtggacctggatcccactgatggcaagctcttccccagcgatggttttcgtgactgcaagaagggggatcccaagcacgggaagcggaaacgaggccggccccgaaagctgagcaaagagtactgggactgtctcgagggcaagaagagcaagcacgcgcccagaggcacccacctgtgggagttcatccgggacatcctcatccacccggagctcaacgagggcctcatgaagtgggagaatcggcatgaaggcgtcttcaagttcctgcgctccgaggctgtggcccaactatggggccaaaagaaaaagaacagcaacatgacctacgagaagctgagccgggccatgaggtactactacaaacgggagatcctggaacgggtggatggccggcgactcgtctacaagtttggcaaaaactcaagcggctggaaggaggaagaggttctccagagtcggaactgagggttggaactatacccgggaccaaactcacggaccactcgaggcctgcaaaccttcctgggaggacaggcaggccagatggcccctccactggggaatgctcccagctgtgctgtggagagaagctgatgttttggtgtattgtcagccatcgtcctgggactcggagactatggcctcgcctccccaccctcctcttggaattacaagccctggggtttgaagctgactttatagctgcaagtgtatctccttttatctggtgcctcctcaaacccagtctcagacactaaatgcagacaacaccttcctcctgcagacacctggactgagccaaggaggcctggggaggccctaggggagcaccgtgatggagaggacagagcaggggctccagcaccttctttctggactggcgttcacctccctgctcagtgcttgggctccacgggcaggggtcagagcactccctaatttatgtgctatataaatatgtcagatgtacatagagatctattttttctaaaacattcccctccccactcctctcccacagagtgctggactgttccaggccctccagtgggctgatgctgggacccttaggatggggctcccagctcctttctcctgtgaatggaggcagagacctccaataaagtgccttctgggctttttctaacctttgtcttagctacctgtgtactgaaatttgggcctttggatcgaatatggtcaagaggttggaggggaggaaaatgaaggtctaccaggctgagggtgagggcaaaggctgacgaagaggggagttacagatttcctgtagcaggtgtgggcttacagacacatggactgggctgggaggcgagcaaaggaagcagctgagactgttggagaacgcttacaagacttcatgcaagcaaggacatgaactcagaacactgaggtcagaagcatcctgctgtcatgacaccgctcgagtgaccttgaccttgaccaagtctgtcctgtttaggactgatttttcctattaggctagggtttggacctgatgttctcaagatgtctagaattgcatggctggccttgtggaatagatggttttgcattccagccaagtgtgctgtaaactgtatatctgtaatatgaatcccagcttttgagtctgacaaaatcagagttaggatcttgtaaaggaaaaaaaaaaaaaaacaaaacaaaatggagatgagtacttgctgagaaagaatgagggaaggagttggcatttgttgaaagtgtagtctttttctcttttttttttaattgcaacttttactttagatttaggaggtcgtgcgcaggtttgttacatgggtatattgtgtgatgctgagcttgggatgcgaatgatcctgtcacccaggtagtgagtatagcacccagtgaaactgtagtctcatgccaggcactgtgctagcccactctggctcatttaatcctctcctaagaagagaggagacacagcgtccccatttgacagatgcagaaagaggttccacaggtgtgccttgattctgtcctaaaaccgtttcccggaagcttttcctggtgtgggcgcttctaacctaatcctcaatcgattccagaactattactctgtttccacagtgatactgtgtctaggttttagggaggacagttcattgatgttacttaagaatgctttccaggtggaaagttccttaagtttgaggcttcaaattccatacagcacattaaaatcccattcatgagtttgaaatactgctctgttgtcttggaaataccaatcagattgttggctgaagtgatgtggataaagaagggatcttagaaaaactaaa

SEQ ID NO: 43006 - DNA, 769 bp, Artificial Sequence
  derived and/or modified sequence
ggcggaactggatttctctcccgcctgccggcctgcctgccacagccggactccgccactccggtagcctcatggctgcaacctgtgagattagcaacatttttagcaactacttcagtgcgatgtacagctcggaggactccaccctggcctctgttccccctgctgccacctttggggccgatgacttggtactgaccctgagcaacccccagatgtcattggaggagaaggccagctggttgggggaacagccccagttctggtcgaagacgcaggttctggactggatcagctaccaagtggagaagaacaagtacgacgcaagcgccattgacttctcacgatgtgacatggatggcgccaccctctgcaattgtgcccttgaggagctgcgtctggtctttgggcctctgggggaccaactccatgcccagctgcgagacctcacttccagctcttctgatgagctcagttggatcattgagctgctggagaaggatggcatggccttccaggaggccctagacccagggccctttgaccagggcagcccctttgcccaggagctgctggacgacggtcagcaagccagcccctaccaccccggcagctgtggcgcaggagccccctcccctggcagctctgacgtctccaccgcagggactggtgcttctcggagctcccactcctcagactccggtggaagtgacgtggacctggatcccactgatggcaagctcttccccagcgatggttttcgtgactg

SEQ ID NO: 43007 - protein, 781 aa, Artificial Sequence
  derived and/or modified sequence
MANVSKKVSWSGRDRDDEEAAPLLRRTARPGGGTPLLNGAGPGAARQDMDPPHPFPKEIPHNEKLLSLKYESLDYDNSENQLFLEEERRINHTAFRTVEIKRWVICALIGILTGLVACFIDIVVENLAGLKYRVIKGNIDKFTEKGGLSFSLLLWATLNAAFVLVGSVIVAFIEPVAAGSGIPQIKCFLNGVKIPHVVRLKTLVIKVSGVILSVVGGLAVGKEGPMIHSGSVIAAGISQGRSTSLKRDFKIFEYFRRDTEKRDFVSAGAAAGVSAAFGAPVGGVLFSLEEGASFWNQFLTWRIFFASMISTFTLNFVLSIYHGNMWDLSSPGLINFGRFDSEKMAYTIHEIPVFIAMGVVGGVLGAVFNALNYWLTMFRIRYIHRPCLQVIEAVLVAAVTATVAFVLIYSSRDCQPLQGGSMSYPLQLFCADGEYNSMAAAFFNTPEKSVVSLFHDPPGSYNPLTLGLFTLVYFFLACWTYGLTVSAGVFIPSLLIGAAWGRLFGISLSYLTGAAIWADPGKYALMGAAAQLGGIVRMTLSLTVIMMEATSNVTYGFPIMLVLMTAKIVGDVFIEGLYDMHIQLQSVPFLHWEAPVTSHSLTAREVMSTPVTCLRRREKVGVIVDVLSDTASNHNGFPVVEHADDTQPARLQGLILRSQLIVLLKHKVFVERSNLGLVQRRLRLKDFRDAYPRFPPIQSIHVSQDERECTMDLSEFMNPSPYTVPQEASLPRVFKLFRALGLRHLVVVDNRNQVVGLVTRKDLARYRLGKRGLEELSLAQT

SEQ ID NO: 43008 - DNA, 2346 bp, Artificial Sequence
  derived and/or modified sequence
atggccaacgtgagtaagaaggtctcttggagcgggagagatcgggatgacgaggaagccgcacctttattacgccgaacagcccggccaggggggggtacaccccttctgaacggcgctgggccaggcgctgcccgccaggacatggacccaccacaccccttccctaaggagatacctcacaatgagaagctactgagtttaaaatacgagtcactcgactacgacaattcagaaaatcagctgtttttagaagaggagcggagaattaatcatacagcctttcgcaccgtggagattaagcgctgggttatttgtgccttgatcggtattctgacaggtctggtagcctgcttcatagacatcgtggttgaaaacctggccgggttgaagtacagagtgataaagggtaatattgataaatttaccgagaagggaggcttgtcatttagtctcctgctgtgggccacgcttaatgctgcattcgttttggttggtagcgtgatcgtggcctttattgaacctgtggctgccgggtctggtattccacaaatcaaatgctttctgaacggcgtcaaaatccctcacgtggtaaggctgaagaccctagttatcaaagtgtccggggttatactcagcgtggtgggtgggctagctgtgggtaaagagggccccatgattcactccggcagtgtgatcgccgccggcatttcacagggccgatcaacctctctaaagagggacttcaagattttcgagtatttccgacgggacaccgaaaagcgtgactttgtgtctgctggagccgcggccggggtgtctgctgcgttcggagctcccgtgggaggggtgctcttttcactggaagaaggcgcatccttctggaaccagttcctgacatggaggattttctttgccagcatgatttccacatttacattgaacttcgttctgtccatataccatggtaacatgtgggatctcagttcaccaggtctgatcaactttggtcgattcgactccgagaagatggcctatactatccatgaaattccagtttttattgccatgggagttgtcggcggcgtgctgggtgccgtgttcaacgctctgaactattggttgactatgtttcggattcgctacattcacagaccatgtctgcaggtgattgaagcggtattggtagccgcggtcaccgctaccgttgcatttgttctaatttattccagccgcgactgtcagcctctgcagggagggtctatgtcttatccactgcagctattctgcgctgacggcgagtataactcaatggccgcagctttttttaacacccccgagaaatccgtcgtgtcactgtttcacgatccacccgggtcgtataatccactgacattggggctgttcaccttggtgtatttttttctggcctgttggacctacggactcacggtgagcgccggagtgttcattcctagcctcctgataggggccgcctgggggcgactcttcgggatctctttgtcatatctgacaggcgccgctatctgggctgatccggggaaatatgctttgatgggggcagcggcacagctgggcgggatcgtacgaatgacgctgagtctgacagtcatcatgatggaagctacaagtaatgtgacctacgggttccccatcatgttggtgctgatgacagctaagattgtcggcgacgtttttattgaagggctgtatgacatgcacattcaactgcagtccgtcccctttcttcactgggaggccccggtcaccagccacagcctgacggcaagggaggtgatgagcacacccgtgacatgcctacgcaggcgagagaaggtcggggttatcgtggatgtcctgtctgacacggcttcaaatcacaacggttttcccgtggtcgagcatgcggatgacactcagccagctaggcttcaggggttgatcttacggtctcagcttattgtgcttctcaagcacaaagtgtttgtggagcggtctaacctgggcctcgtgcagcggcgcctaaggcttaaagatttccgggatgcttatccccggttccccccaatccagtccattcacgttagccaggatgaacgggagtgcaccatggatctgtctgagtttatgaatcccagtccctatacagtaccccaggaggctagtctgcctcgtgtattcaaactcttcagggctctcggactgagacacctcgttgtggtggacaaccggaatcaggttgtcggtcttgttactcgcaaagacctggcaagataccgtctgggaaaacggggccttgaagagttgagcctggctcagacctag

SEQ ID NO: 43009 - DNA, 2346 bp, Artificial Sequence
  derived and/or modified sequence
atggccaacgtgtccaagaaggtgtcctggagcggccgggacagagatgatgaggaggccgcccccctgctgcggaggacagcccggcctgggggcggcacccccctgctgaatggagctggccctggggccgcccggcaggacatggaccccccccaccccttccccaaggagatcccccacaatgagaagctgctgagcctgaagtatgagagcctggactatgacaacagcgagaaccagctgttcctggaggaggagcggcgcatcaaccacacagccttcagaacagtggagatcaagcgctgggtgatctgtgccctgattggcatcctgaccggcctggtggcctgcttcatcgacatcgtggtggagaacctggccggcctgaagtacagagtcatcaagggcaacatcgacaagttcacagagaagggcggcctgtccttcagcctgctgctgtgggccaccctgaatgctgcctttgtgctggtgggctctgtgattgtggccttcatcgagcctgtggccgccggcagcggcatcccccagatcaagtgcttcctgaatggagtgaagatcccccacgtggtgcggctgaagaccctggtgatcaaggtgtctggagtcatcctgtctgtggtgggcggcctggccgtgggcaaggagggccccatgatccacagcggctctgtgattgctgctggcatcagccagggccgcagcaccagcctgaagagggacttcaagatctttgagtacttccggcgggacacagagaagagggactttgtgtctgctggagctgctgctggggtgtctgctgcctttggagcccctgtgggcggcgtgctcttcagcctggaggagggcgccagcttctggaaccagttcctgacctggaggatcttctttgcctccatgatcagcaccttcaccctgaactttgtgctgagcatctaccacggcaacatgtgggacctgagcagccctggcctcatcaactttggccgctttgattctgagaagatggcctacaccatccacgagatccctgtgttcatcgccatgggcgtggtgggcggcgtgctgggcgctgtgttcaatgccctgaactactggctgaccatgttccgcatccgctacatccaccggccctgcctgcaggtgattgaagctgtgctggtggccgctgtgacagccaccgtggcctttgtgctgatctacagcagccgggactgccagcccctgcagggcggctccatgagctaccccctgcagctgttctgtgctgatggagagtacaacagcatggccgccgccttcttcaacaccccagagaagtctgtggtgtccctcttccatgaccccccaggcagctacaaccccctgaccctgggcctcttcaccctggtgtacttcttcctggcctgctggacctacggcctgactgtgtctgctggggtcttcatccccagcctgctgattggagctgcctggggccgcctgtttggcatcagcctgagctacctgaccggggccgccatctgggccgaccccgggaagtatgccctgatgggcgctgctgcccagctgggcggcatcgtgaggatgaccctgagcctgaccgtcatcatgatggaggccaccagcaatgtgacctacggcttccccatcatgctggtgctgatgacagccaagatcgtgggagatgtgttcatcgagggcctgtatgacatgcacatccagctgcagagcgtgcccttcctgcactgggaggcccctgtgaccagccacagcctgacagcccgggaggtgatgagcacccctgtgacctgcctgcggcggcgggagaaggtgggcgtgattgtggatgtgctgagtgacacagccagcaaccacaacggcttccctgtggtggagcacgcagatgacacccagcctgcccggctgcagggcctcatcctgcggagccagctgattgtgctgctgaagcacaaggtgtttgtggagaggagcaacctgggcctggtgcagaggcggctgcggctgaaggacttcagagatgcctacccccgcttcccccccatccagagcatccacgtgtcccaggatgagcgggagtgcaccatggacctgtctgagttcatgaaccccagcccctacacagtgccccaggaggccagcctgcccagggtcttcaagctgttccgggccctgggcctgcggcacctggtggtggtggacaacagaaaccaggtggtgggcctggtgaccaggaaggacctggcccgctaccgcctgggcaagaggggcctggaggagctgagcctggcccagacctag

SEQ ID NO: 43010 - DNA, 2346 bp, Artificial Sequence
  derived and/or modified sequence
atggccaacgtgagcaagaaggtgagctggagcggccgggaccgggacgacgaggaagcagccccattactccggaggaccgctcgcccaggcggagggacaccacttcttaatggcgctggacctggggctgcccggcaagacatggatccaccccatccttttcccaaggaaatccctcataatgaaaaactattgtctctgaaatatgagtccctggattacgacaatagcgaaaatcagctgttcctcgaggaggaaaggcgaattaatcacacggcctttcgaaccgtggagattaaaaggtgggtgatctgtgcgcttatcggcatcctgacagggttggtcgcctgcttcatcgatattgtagtggagaatttggctgggcttaaataccgggtgataaaggggaatatagataaatttacagagaaaggaggtctcagcttcagcctcctgctctgggcaaccctgaatgctgctttcgtgctggtgggcagtgtcattgtcgcatttattgagccggtggcagcagggtccgggataccccagataaaatgcttcctaaacggagtcaaaattcctcacgttgttaggctgaaaacgctggtcattaaggtttcgggggtgatcctcagcgtggtgggcggactggccgtaggcaaagaggggcccatgattcactccggaagtgtgatagcagcagggatcagtcaggggcgaagtacttctctgaaaagagattttaagattttcgagtactttaggagggataccgagaagagagacttcgtgagcgcgggggccgcagcgggggtttccgcagccttcggggctcccgtaggtggcgtgctgttttcattagaagaaggagcttccttttggaatcagtttctaacctggcggattttttttgcaagcatgattagcacttttaccttgaattttgttctgagcatctatcatgggaacatgtgggacctgtcctcccccggtctgatcaatttcggacgattcgactctgagaagatggcttatactattcacgagatcccggtctttattgctatgggggtggtcggcggggttcttggagccgtcttcaacgcactgaattattggctaactatgttccgcatccgctatatacatcggccatgtttgcaagtgatcgaggccgtgttagttgctgccgttaccgcaacagtggccttcgtcctgatctattcgagccgtgactgccaacccctgcagggggggtccatgtcttaccctttgcagctgttctgcgccgatggcgagtacaatagcatggcagccgccttctttaacacgccagaaaaatctgtagtgtcgctctttcatgacccacctggttcctacaatcctctgaccctgggcctgtttactctcgtctattttttcctagcctgttggacttatgggctaaccgtgagtgcgggagtcttcattccatctctgcttattggggccgcttggggccgcctcttcggcatttcactgagctacctgactggggccgccatatgggcagaccctggtaaatatgctctgatgggagcggcagcccaacttggcggtatagtgcgcatgactctctccctgacggtcattatgatggaggccacgtcgaatgtcacatacggctttcccataatgttggtgctcatgaccgccaaaatagttggcgacgtattcatcgaaggactttacgacatgcatattcagctgcagtcagtacctttccttcattgggaagctcccgtaacctcgcacagcttgacagcgagagaggtgatgtccacccctgtgacctgcctgagaaggagggaaaaggtcggtgttattgttgatgtgctctctgatacagcatcaaatcacaacgggttccccgtggtggagcatgccgacgacacacagccagcgagactccaggggctcatccttcgcagtcaactaattgtgctactgaaacataaggtcttcgtggagaggagcaatttgggtctggtccagaggcgactgcggctcaaggactttagagacgcatatccacgcttcccacctatacaatctatccacgtatcccaagatgaacgggagtgcaccatggacctctccgagttcatgaatccttcgccctatacggtgccccaagaagcttctctgccacgggtgtttaagctttttcgcgcactcgggttgcggcacctggttgtggtggacaaccgtaatcaagtagttggtttagtcacccggaaagacctggctcgataccgcttgggcaagaggggactggaggagctgtccctagctcagacttag

SEQ ID NO: 43011 - DNA, 2346 bp, Artificial Sequence
  derived and/or modified sequence
atggccaacgttagcaagaaggtcagctggtccggtagagaccgggatgatgaggaagccgcacctttgctgaggcgcacggccagaccagggggagggaccccgcttctgaatggagccggtccaggagccgcaaggcaggacatggacccaccccaccctttccccaaagaaattccgcacaacgagaaactactctcgctcaaatacgaatccctcgactatgacaacagtgagaatcaattatttctggaagaggagcgacgcatcaaccacaccgcctttcgcacggtcgaaatcaagagatgggtaatttgtgcgctgattgggattctgacagggctggttgcctgttttattgacattgtcgtggagaatttggccggtctcaaatatagagtgattaagggcaacatcgacaagttcactgagaagggaggtctctccttttctctcttgttgtgggccacgcttaatgcagcattcgttctggtgggtagtgtgatcgttgctttcatcgagcctgtagccgcaggctctggtatcccccaaataaagtgctttctcaatggggtcaagataccacacgtcgttaggctaaaaacgttggttattaaagtgtctggtgtgattttaagcgtggttgggggactcgccgtgggaaaagagggcccaatgattcattcaggctctgtcattgccgctggcatatcccaggggaggtctactagtctgaagcgcgactttaagatctttgaatacttcagaagagacacagagaaacgggattttgtttccgctggcgcagccgcaggcgtgagcgccgcttttggggcaccagtcggaggggttttgttcagcctggaagaaggagcgagtttctggaaccaattcctaacctggaggattttttttgcctcaatgatcagtacttttacactaaacttcgtgttatccatttaccacggcaacatgtgggatttaagctcacctggcttgattaactttggccgtttcgacagcgagaagatggcttataccatccatgagatccctgtctttattgctatgggcgtggttggaggggtgttaggcgctgtattcaacgccttgaactactggcttactatgttcagaatcagatatattcataggccctgccttcaggtgatcgaagcggtgctagtcgcagccgtgactgcaactgtagcttttgtccttatttattccagcagggactgccaaccactgcaagggggttcaatgagctatccgctccagctgttttgcgccgatggcgagtacaattctatggccgcagccttcttcaacacccccgagaagagtgtggtctctctcttccatgacccacccggaagctacaatccactgacgctcggcctctttaccctggtgtacttctttctagcctgctggacatacggcctgaccgtttccgccggtgtgtttatcccgtccctcttaatcggggcagcgtggggtagactcttcggtatctccctgtcctaccttacaggagccgctatctgggctgatcctgggaaatatgccctgatgggagcggcagcccaattaggtggaattgtcagaatgacgctgtctctgaccgtcatcatgatggaggcgacctccaatgtaacgtacggtttccccatcatgctcgtacttatgaccgctaaaatagttggtgacgtgtttattgaaggactgtacgatatgcacatccagctgcagtcagtccccttcctgcattgggaggcccctgtgacctcgcattcccttacagcgagggaagtgatgagtacaccagtcacttgtctccgcaggcgggaaaaagtcggcgtgattgtcgatgtactgtccgataccgcatccaatcacaatgggttccctgtggttgaacacgctgacgacactcagccagcccgtctacaggggttgatccttcggagtcagctgattgtccttctcaagcacaaagtgttcgtggagcgatctaatctcggtttagttcagcgtagactgcgcctcaaagatttcagagatgcctatcccagattcccacccatccaaagcatccacgtttcccaggacgaaagagaatgcactatggatctgagtgagtttatgaacccctccccttacactgtcccacaggaggcctccctccctcgagtctttaaacttttccgagcattaggcctgcgacaccttgttgtcgtggataatcgcaaccaagtggtcggcctcgtgaccaggaaagatttggcgaggtacaggctgggaaagcgtgggctggaggagctgagcctcgctcagacttag

SEQ ID NO: 43012 - DNA, 4153 bp, Artificial Sequence
  derived and/or modified sequence
gtcgctcatcacgtggccccgtcgcgcgtcacgtggccgccggcgcgggtcacgagaacaaacacgggggcagccggcgcttcccggccggtgtcgctccgcggcgggccatggccaacgtctctaagaaggtgtcctggtccggccgggaccgggacgacgaggaggcggcgccgctgctgcggaggacggcgcggcccggcggggggacgccgctgctgaacggggctgggcctggggctgcgcgccaggatatggaccctccacatcccttccccaaggagatcccacacaacgagaagctcctgtccctcaagtatgagagcttggactatgacaacagtgagaaccagctgttcctggaggaggagcggcggatcaatcacacggccttccggacggtggagatcaagcgctgggtcatctgcgccctcattgggatcctcacgggcctcgtggcctgcttcattgacatcgtggtggaaaacctggctggcctcaagtacagggtcatcaagggcaatatcgacaagttcacagagaagggcggactgtccttctccctgttgctgtgggccacgctgaacgccgccttcgtgctcgtgggctctgtgattgtggctttcatagagccggtggctgctggcagcggaatcccccagatcaagtgcttcctcaacggggtgaagatcccccacgtggtgcggctcaagacgttggtgatcaaagtgtccggtgtgatcctgtccgtggtcgggggcctggccgtgggaaaggaagggccgatgatccactcaggttcagtgattgccgccgggatctctcagggaaggtcaacgtcactgaaacgagatttcaagatcttcgagtacttccgcagagacacagagaagcgggacttcgtctccgcaggggctgcggccggagtgtcagcggcgtttggagcccccgtgggtggggtcctgttcagcttggaggagggtgcgtccttctggaaccagttcctgacctggaggatcttctttgcttccatgatctccacgttcaccctgaattttgttctgagcatttaccacgggaacatgtgggacctgtccagcccaggcctcatcaacttcggaaggtttgactcggagaaaatggcctacacgatccacgagatcccggtcttcatcgccatgggcgtggtgggcggtgtgcttggagcagtgttcaatgccttgaactactggctgaccatgtttcgaatcaggtacatccaccggccctgcctgcaggtgattgaggccgtgctggtggccgccgtcacggccacagttgccttcgtgctgatctactcgtcgcgggattgccagcccctgcaggggggctccatgtcctacccgctgcagctcttttgtgcagatggcgagtacaactccatggctgcggccttcttcaacaccccggagaagagcgtggtgagcctcttccacgacccgccaggctcctacaaccccctgaccctcggcctgttcacgctggtctacttcttcctggcctgctggacctacgggctcacggtgtctgccggggtcttcatcccgtccctgctcatcggggctgcctggggccggctctttgggatctccctgtcctacctcacgggggcggcgatctgggcggaccccggcaaatacgccctgatgggagctgctgcccagctgggcgggattgtgcggatgacactgagcctgaccgtcatcatgatggaggccaccagcaacgtgacctacggcttccccatcatgctggtgctcatgaccgccaagatcgtgggcgacgtcttcattgagggcctgtacgacatgcacattcagctgcagagtgtgcccttcctgcactgggaggccccggtcacctcacactcactcactgccagggaggtgatgagcacaccagtgacctgcctgaggcggcgtgagaaggtcggcgtcattgtggacgtgctgagcgacacggcgtccaatcacaacggcttccccgtggtggagcatgccgatgacacccagcctgcccggctccagggcctgatcctgcgctcccagctcatcgttctcctaaagcacaaggtgtttgtggagcggtccaacctgggcctggtacagcggcgcctgaggctgaaggacttccgagacgcctacccgcgcttcccacccatccagtccatccacgtgtcccaggacgagcgggagtgcaccatggacctctccgagttcatgaacccctccccctacacggtgccccaggaggcgtcgctcccacgggtgttcaagctgttccgggccctgggcctgcggcacctggtggtggtggacaaccgcaatcaggttgtcgggttggtgaccaggaaggacctcgccaggtaccgcctgggaaagagaggcttggaggagctctcgctggcccagacgtgaggcccagccctgcccataatgggcactggcgctggcaccccggcccttctgcatttcctcccggagtcactggtttctcggcccaaaccatgctccccagcagtggcaatggcgagcaccctgcagctgggcgggcaggcggcaggcgcggaactgaccctctcgcgggactgaccctgttgtgggcagtggtctccccccttggcgcctccttgcgcaggcccagcctccactctcctcgtctaggtttctttacctccagggatcagctgtgtgtgtgtgacctccctaccgggctatcggcctcttgggagccagcggcagggccggcacctgcgtgcctgtgcccgtgtgcgtgagacagagcccttgcccctgctgctgccccgagggctgccctgccctggaagggcccctctgcctccacaccagtggagtcttcgagacttgggagctgcttggcctcattttcagccatgagcagacggcctgtggtccctgggcctgaggcacggactcgtagcaccagggtttggaggctgcgaccgccccggagagcagcttcacactggcgccacagaggagccccacgtgcactccccggcctgcatccggcttgggtacacaggcccagaggactggggtgactcacgggccctgtgctgtgatgttgagagctgagaaaaacctccaaggccctgagccccatgcccagccctgccttggtcccccaacccccagagcttggagtctgggccccacacccagccctgccttggtccctgagcctcagagcgtggaattgctgccctgtggacactggctgggaaggcaggtcttcccctagcacatggggaccccggcctcgagggtgacctccctaccccgcccctgccagccaccaagcgcaggtgcagcgggggccagactcctgccggcctcagaggacacctggcccagcacaggcagctagaagggccggtgggcaccggggccgggaagcccccacctcaccacctgagggcccctgggaggctcctctggcctggctgggctgggtctggggccgccacaggcccctcacggggcggcagaggcaacttcagtgtccctgttagagcaacacgggtccctccgtggggggctgggtgcggccccctgccgtgtatttcctccccagggagtggggcctccccgggagctgacgccaccaccctgcttagccctcacagggccccaaggtgtccgagtgtgttgggtctgaacgcgaaataaagaaatcctctcagcccgcctttgccagcgtcgtccctcccaccccacccagaccacgtccaacagcctgggactttcgggaccctggggtcggggcaccgtgtggagtgagaaaggcgtgaaagacagcggctgcggccacccagggcaccagccacatcctcttcctcgtccccgcccctcagcctccctcctctggctcctggctggtgggtctgggggcaaggcagaggcgctccaggtggaggggggcgggccggggtgcccacgctggggtgacgcaagaagaaaactcccgggcctcagagtcggcgccggaaacctaggtctgggtttccctcgtggtggttgtgtactgaggacctggaagtgatcatattttggatatattcggttaaataaaatcagcggttaggattcac

SEQ ID NO: 43013 - DNA, 2346 bp, Artificial Sequence
  derived and/or modified sequence
atggccaacgtgagcaagaaggtgagctggagcggcagagacagagacgacgaggaggccgcccccctgctgagaagaaccgccagacccggcggcggcacccccctgctgaacggcgccggccccggcgccgccagacaggacatggaccccccccaccccttccccaaggagatcccccacaacgagaagctgctgagcctgaagtacgagagcctggactacgacaacagcgagaaccagctgttcctggaggaggagagaagaatcaaccacaccgccttcagaaccgtggagatcaagagatgggtgatctgcgccctgatcggcatcctgaccggcctggtggcctgcttcatcgacatcgtggtggagaacctggccggcctgaagtacagagtgatcaagggcaacatcgacaagttcaccgagaagggcggcctgagcttcagcctgctgctgtgggccaccctgaacgccgccttcgtgctggtgggcagcgtgatcgtggccttcatcgagcccgtggccgccggcagcggcatcccccagatcaagtgcttcctgaacggcgtgaagatcccccacgtggtgagactgaagaccctggtgatcaaggtgagcggcgtgatcctgagcgtggtgggcggcctggccgtgggcaaggagggccccatgatccacagcggcagcgtgatcgccgccggcatcagccagggcagaagcaccagcctgaagagagacttcaagatcttcgagtacttcagaagagacaccgagaagagagacttcgtgagcgccggcgccgccgccggcgtgagcgccgccttcggcgcccccgtgggcggcgtgctgttcagcctggaggagggcgccagcttctggaaccagttcctgacctggagaatcttcttcgccagcatgatcagcaccttcaccctgaacttcgtgctgagcatctaccacggcaacatgtgggacctgagcagccccggcctgatcaacttcggcagattcgacagcgagaagatggcctacaccatccacgagatccccgtgttcatcgccatgggcgtggtgggcggcgtgctgggcgccgtgttcaacgccctgaactactggctgaccatgttcagaatcagatacatccacagaccctgcctgcaggtgatcgaggccgtgctggtggccgccgtgaccgccaccgtggccttcgtgctgatctacagcagcagagactgccagcccctgcagggcggcagcatgagctaccccctgcagctgttctgcgccgacggcgagtacaacagcatggccgccgccttcttcaacacccccgagaagagcgtggtgagcctgttccacgacccccccggcagctacaaccccctgaccctgggcctgttcaccctggtgtacttcttcctggcctgctggacctacggcctgaccgtgagcgccggcgtgttcatccccagcctgctgatcggcgccgcctggggcagactgttcggcatcagcctgagctacctgaccggcgccgccatctgggccgaccccggcaagtacgccctgatgggcgccgccgcccagctgggcggcatcgtgagaatgaccctgagcctgaccgtgatcatgatggaggccaccagcaacgtgacctacggcttccccatcatgctggtgctgatgaccgccaagatcgtgggcgacgtgttcatcgagggcctgtacgacatgcacatccagctgcagagcgtgcccttcctgcactgggaggcccccgtgaccagccacagcctgaccgccagagaggtgatgagcacccccgtgacctgcctgagaagaagagagaaggtgggcgtgatcgtggacgtgctgagcgacaccgccagcaaccacaacggcttccccgtggtggagcacgccgacgacacccagcccgccagactgcagggcctgatcctgagaagccagctgatcgtgctgctgaagcacaaggtgttcgtggagagaagcaacctgggcctggtgcagagaagactgagactgaaggacttcagagacgcctaccccagattcccccccatccagagcatccacgtgagccaggacgagagagagtgcaccatggacctgagcgagttcatgaaccccagcccctacaccgtgccccaggaggccagcctgcccagagtgttcaagctgttcagagccctgggcctgagacacctggtggtggtggacaacagaaaccaggtggtgggcctggtgaccagaaaggacctggccagatacagactgggcaagagaggcctggaggagctgagcctggcccagacctag

SEQ ID NO: 43014 - DNA, 1191 bp, Artificial Sequence
  derived and/or modified sequence
atgcccaaccccagacccggcaagcccagcgcccccagcctggccctgggccccagccccggcgccagccccagctggagagccgcccccaaggccagcgacctgctgggcgccagaggccccggcggcaccttccagggcagagacctgagaggcggcgcccacgccagcagcagcagcctgaaccccatgccccccagccagctgcagctgagcaccgtggacgcccacgccagaacccccgtgctgcaggtgcaccccctggagagccccgccatgatcagcctgaccccccccaccaccgccaccggcgtgttcagcctgaaggccagacccggcctgccccccggcatcaacgtggccagcctggagtgggtgagcagagagcccgccctgctgtgcaccttccccaaccccagcgcccccagaaaggacagcaccctgagcgccgtgccccagagcagctaccccctgctggccaacggcgtgtgcaagtggcccggctgcgagaaggtgttcgaggagcccgaggacttcctgaagcactgccaggccgaccacctgctggacgagaagggcagagcccagtgcctgctgcagagagagatggtgcagagcctggagcagcagctggtgctggagaaggagaagctgagcgccatgcaggcccacctggccggcaagatggccctgaccaaggccagcagcgtggccagcagcgacaagggcagctgctgcatcgtggccgccggcagccagggccccgtggtgcccgcctggagcggccccagagaggcccccgacagcctgttcgccgtgagaagacacctgtggggcagccacggcaacagcaccttccccgagttcctgcacaacatggactacttcaagttccacaacatgagaccccccttcacctacgccaccctgatcagatgggccatcctggaggcccccgagaagcagagaaccctgaacgagatctaccactggttcaccagaatgttcgccttcttcagaaaccaccccgccacctggaagaacgccatcagacacaacctgagcctgcacaagtgcttcgtgagagtggagagcgagaagggcgccgtgtggaccgtggacgagctggagttcagaaagaagagaagccagagacccagcagatgcagcaaccccacccccggcccctag

SEQ ID NO: 43015 - DNA, 1191 bp, Artificial Sequence
  derived and/or modified sequence
atgcccaatcccaggccaggaaagccgtcagccccatccctagctcttggcccttccccaggggccagtccaagttggcgtgcagctcctaaggcctcagatcttcttggcgcccgcggacctgggggtaccttccaggggagagacttacgcggcggcgcgcatgccagcagtagctcccttaaccctatgcctccgagtcagttgcaactgtcaacggttgacgctcacgccagaacccccgtactgcaggtgcacccattagaaagcccggcaatgatctcgctgaccccgcccaccactgcaacaggggtcttcagcctgaaggcccgaccaggcctgccgcccgggattaacgtggcaagcctggaatgggtaagccgagaaccagccctcttgtgtaccttcccaaaccctagtgccccccgcaaggactcaaccctgtccgccgtgcctcagtcctcctaccctctgcttgctaacggtgtgtgtaagtggcccggctgcgagaaggtatttgaagaacccgaagactttttgaagcactgccaggctgaccacttgctggatgagaaaggccgggcccagtgtttgttgcagcgggagatggtgcagtcactagagcagcagctggtgctagagaaggagaaactttccgccatgcaggcccacctggcaggcaaaatggccctgaccaaagccagtagtgttgccagctccgacaagggttcatgctgtatcgtggccgcaggctctcaaggtccggtggtaccagcgtggagtggtcctcgggaggctccagactccctctttgcagtgcgaagacatctgtggggatcacatggcaactctacctttccggaatttctccataatatggattacttcaaattccacaatatgagaccacctttcacctacgcaaccctaatccgatgggcaatcctcgaagcccccgagaaacagcgtacgcttaacgagatctaccactggttcacaagaatgtttgcgttctttcgcaaccatcccgcgacctggaaaaacgcaattaggcataatctctccctccacaaatgctttgtaagggtcgaaagcgaaaagggggccgtttggacagtcgatgaattggaattccgtaagaagcggagccagcggccttcccggtgcagtaatcctacacccggcccttag

SEQ ID NO: 43016 - DNA, 1191 bp, Artificial Sequence
  derived and/or modified sequence
atgcccaaccccaggcctgggaagcccagcgcccccagcctggccctgggccccagccctggggccagccccagctggagggctgcccccaaggccagtgacctgctgggcgcccggggccctgggggcaccttccagggccgggacctgcggggcggggcccacgccagcagcagcagcctgaaccccatgccacccagccagctgcagctgagcacagtggatgcccacgcccggacccctgtgctgcaggtgcaccccctggagagccctgccatgatcagcctgaccccacccaccacagccactggagtcttcagcctgaaggcccggcccggcctgcccccaggcatcaacgtggccagcctggagtgggtgtcccgggagcccgccctgctgtgcaccttccccaaccccagcgcccccaggaaggacagcaccctgtctgctgtgccccagagcagctaccccctgctggccaatggagtgtgcaagtggccaggctgtgagaaggtgtttgaggagcctgaggacttcctgaagcactgccaggccgaccacctgctggatgagaagggccgggcccagtgcctgctgcagcgggagatggtgcagagcctggagcagcagctggtgctggagaaggagaagctgagcgccatgcaggcccacctggccggcaagatggccctgaccaaggccagctctgtggccagcagtgacaagggcagctgctgcatcgtggccgccggcagccagggccctgtggtgcctgcctggagcggcccccgggaggccccagacagcctgtttgctgtgcggcggcacctgtggggcagccacggcaacagcaccttccctgagttcctgcacaacatggactacttcaagttccacaacatgaggcctcccttcacctacgccaccctcatccgctgggccatcctggaggcccctgagaagcagaggaccctgaatgagatctaccactggttcaccaggatgtttgccttcttcaggaaccacccagccacctggaagaatgccatccgccacaacctgagcctgcacaagtgctttgtgcgggtggagagcgagaagggagctgtgtggacagtggatgagctggagttcaggaagaagaggagccagaggcccagccgctgcagcaaccccaccccaggcccctag

SEQ ID NO: 43017 - DNA, 1191 bp, Artificial Sequence
  derived and/or modified sequence
atgcccaacccccggcccggcaagcccagcgcccccagcctggccttgggacctagccctggagctagtcccagctggagggccgcccctaaagccagcgacctcctcggcgcccgagggccaggtggcacttttcagggccgggatctccggggcggcgcccatgcctcgtcctcaagtctcaacccaatgccaccctcgcagctgcagctatccaccgtggacgcccatgctaggacccccgtgttgcaggtgcacccattggagagccccgctatgatttccctaactccccccactaccgccaccggcgtgttttcactgaaggctcgccccgggcttccgcccgggataaacgtggcttctttggagtgggtcagtagagagcctgccctgctgtgcacctttcctaatccatctgccccccgaaaggactccaccttgagtgccgtgccgcagtcctcatatcccttgctcgcgaatggagtatgtaagtggccagggtgcgagaaagtgttcgaagaaccagaggactttctaaaacattgtcaagcagatcatctcctggatgagaagggtcgcgctcagtgcttgctgcaacgcgagatggtccagagtctggaacagcagttggtcctggagaaggagaagctctctgcaatgcaagctcacttagccggaaagatggctctgacaaaagctagtagtgtggccagctcagataagggttcctgctgcattgtggctgctggctcgcagggtcccgttgttcccgcgtggtccggccccagagaggcccccgactcactctttgcggtgcggcggcacctctggggctcacatggcaattctacattccccgaattcctccataatatggactattttaaattccataacatgagaccaccatttacatacgccacgctgattagatgggcgatcctggaggctcccgagaaacagcgcacgctgaatgaaatataccactggttcacccgcatgttcgctttttttaggaaccacccggccacttggaagaacgccatcaggcataacttgtcactgcataagtgttttgttcgggttgagtcagaaaaaggggcagtatggactgttgatgagctggagtttcgaaagaagcgtagccagcgcccgtcaaggtgcagcaaccccactccagggccctag

SEQ ID NO: 43018 - DNA, 1191 bp, Artificial Sequence
  derived and/or modified sequence
atgcctaaccctagacccggaaaacccagcgccccaagcctggccctcggcccatctccaggcgctagtccttcttggagagctgctcccaaagcatctgacctcctgggagccagggggccaggcggaacttttcagggcagggatctccgcggtggtgcacatgcctcctcgtcaagtctcaacccgatgccacccagccaactgcaactctcgaccgtggatgcgcatgctcgaacgcccgtcctgcaggttcaccctctggagagtcctgccatgataagcctcactccgcctacaactgctacaggagtgttttcattgaaagcacggccagggctgccgcctgggattaatgtggcatccctggagtgggtcagcagagagcctgccctgctctgcacctttcctaatccgagcgctccgagaaaggatagcacactctcagcggtgcctcagtcctcctatcctctgctagccaatggggtatgcaagtggcccggatgcgaaaaggtcttcgaggagccagaggattttttaaaacactgccaggcagatcaccttttggacgagaagggcagagcccagtgcctactgcagagagagatggtgcagtcattggaacagcaactggtcctggagaaggagaaacttagtgctatgcaggctcatctcgccggaaagatggccctgacaaaggcatccagtgtggctagttcagataaaggaagctgctgcattgtagctgccggtagtcaagggccagtcgtgccagcttggtctggtccacgcgaggccccagatagcctgttcgcagttaggcggcatctgtggggctctcatggtaatagcacattccctgaattcctacacaatatggattatttcaaattccacaacatgagacctccctttacgtacgctacattgattaggtgggctatcctcgaggctcccgagaaacagagaaccctgaatgagatctatcattggtttactaggatgtttgccttttttcgcaatcatcccgctacctggaagaacgcaattcggcacaatttgagcctgcacaagtgctttgtgagggtggagtctgaaaagggggcagtctggacagtggacgagctcgaatttagaaagaaacgcagtcagagaccatccagatgcagcaaccctacccctggtccatag

SEQ ID NO: 43019 - DNA, 1191 bp, Artificial Sequence
  derived and/or modified sequence
atgcccaatccccggcctggcaagccgtcagcaccaagtctcgctctaggcccaagtcctggcgcatctccatcatggagggctgcccccaaggcctctgacctgttaggagcccgcggacctggaggcacatttcaggggagagatctacgcggaggcgcccatgcaagcagcagctcccttaaccccatgcccccttcccagctgcagctatctaccgtagacgcccacgcccgtacaccagtcttgcaggtccatccattggagagccccgccatgatctctctgacgccgcctactactgccaccggagtcttctctttgaaggcgaggcctgggcttcccccaggtataaatgtggcttccttggagtgggtgtcacgcgagccagcgctgctgtgtacgttccccaatccctctgccccaaggaaagatagtaccctttcagccgtgccacagtccagctacccgctcctcgctaatggtgtgtgcaaatggcctgggtgtgagaaagtgtttgaagaaccagaggacttcctgaagcattgtcaggctgaccacttattggatgagaagggccgagcccagtgtctgctgcagcgagagatggtccagtccctggagcagcagctcgtactggagaaagagaagctaagcgccatgcaggcccaccttgctggtaagatggcactcactaaagcttcaagcgtcgcgagcagcgacaaaggctcatgctgcatcgtggccgccggatcgcagggacctgtggtgccagcctggtcaggaccgagggaggcacccgattcactgttcgccgtccgacggcatttatggggctctcatggcaattctactttcccggaattcctacataatatggactacttcaagttccataatatgcgcccgccgttcacttatgctaccctcatcaggtgggccattctggaagcccccgagaagcaacgcacgcttaacgaaatttatcattggtttacccgcatgttcgccttcttccggaatcaccccgccacttggaagaatgccatcaggcacaacctatcgctgcataagtgtttcgtacgtgtggaatctgagaagggagccgtgtggacagtggacgaactggaatttaggaaaaaaagaagtcagcgcccgtcccggtgctcaaaccccactccaggaccctag

SEQ ID NO: 43020 - DNA, 1191 bp, Artificial Sequence
  derived and/or modified sequence
atgcccaatccccggccaggaaaaccatcggcaccttcactggccttgggtccctctccaggggccagtccttcctggagagccgcaccgaaagccagcgacctgctgggcgcaagaggtcccggaggtacttttcaggggcgagacttaagaggaggagcacatgcatcctccagctcacttaaccccatgccacctagccaacttcaactcagtactgtcgacgcgcatgcccgcacccccgtgctgcaggttcaccctcttgaatcgcctgccatgatcagtctaacaccacccacaactgcaacaggagtgttctcactgaaagcaaggccgggtttacccccaggcatcaacgtcgcctccctggagtgggtcagccgtgagccagctcttctctgcacctttccgaatccttctgctccacggaaggattccacgctgagtgcagtacctcagagctcctaccctctgctcgcaaacggagtttgcaaatggccagggtgcgagaaggtgtttgaagagcccgaagacttcctaaagcactgccaagcggaccaccttctggatgaaaaaggccgagcccagtgtctgctgcaacgggaaatggtccagtccctcgagcagcaactagtccttgagaaggagaaactaagtgctatgcaagcccacctggccgggaagatggccctaaccaaagcgtcaagcgtggccagttccgataaaggaagttgctgtatagttgccgcaggttcgcagggaccagttgtacctgcctggtcgggccctagagaagctcccgacagtcttttcgccgtacgccgccatctttggggatcacacggcaactccactttccctgaatttctgcataacatggattattttaagttccacaacatgaggccaccgttcacctatgcaacattgatcaggtgggcgatcctggaggcgccagagaaacaacgaactttgaacgagatctaccactggttcacccgcatgtttgccttcttcagaaatcacccagcaacttggaagaacgccatccgacacaacctgtctctccataaatgtttcgttagagtggagtcagagaagggggccgtgtggaccgtcgacgaactggaatttaggaagaagcgctctcagaggccctcacggtgttcaaatccaactcctgggccttag

SEQ ID NO: 43021 - DNA, 1191 bp, Artificial Sequence
  derived and/or modified sequence
atgcccaacccccggcccggcaagcccagcgcccccagcctggccctgggtccaagccccggagcatcacccagctggcgcgccgctccaaaagctagtgatctgttgggggcccgtggtccagggggaaccttccaggggcgtgatctccggggaggcgcgcatgctagctcgagcagcttaaatcccatgccaccctctcagctgcagctgtcaacggtcgatgctcatgccagaacaccggtcttgcaggttcacccactggaaagccctgcaatgatcagtctgactccccctaccacagctacaggggtgtttagcttgaaagctagacccgggttaccacctggaattaatgtcgcctctcttgagtgggtatcgagggagcctgcactgttatgcacattccctaacccctccgctccacggaaggactccacactgtccgcagtgccccagtcctcttaccccctgctcgcgaatggagtttgcaaatggcccggttgcgagaaagtgttcgaagaacccgaggacttccttaagcattgccaagcagatcacttgcttgatgagaagggcagggcccagtgcctgctccaacgtgagatggtccaatccctagaacagcagctcgtgctggaaaaggagaagctcagcgccatgcaggcgcatttagctgggaaaatggctctcaccaaagcgtcatccgtggctagttctgataagggcagttgctgtatcgtggccgcaggaagccaaggccctgtggtgccagcatggtctggtcctcgggaagctccagacagccttttcgccgtgcgaagacatctgtgggggagtcatgggaactcgacgtttccggagttcctgcataatatggactacttcaagttccacaacatgcgcccgccattcacatatgccacactcatccgttgggccatcctggaggcccccgaaaagcagcggacccttaacgagatctatcactggtttacgaggatgttcgcgttcttccggaaccacccggcaacctggaaaaatgctatccgccacaatctgtctctccataagtgctttgtccgggtagagtctgagaagggggcggtgtggactgtggatgagctggagttccgcaaaaagcgctctcaaaggccctctcgctgtagcaaccccactccaggtccctag

SEQ ID NO: 43022 - DNA, 1191 bp, Artificial Sequence
  derived and/or modified sequence
atgcccaacccccggcccggcaagcccagcgcccccagcctggccctgggcccttctccaggcgccagcccatcatggagggcggctcctaaggcatctgatctgctcggcgccaggggaccaggaggaactttccaggggagggacctgcgggggggggcccatgcctcctctagcagtctgaatcccatgcccccttcacagttgcagctgagcaccgttgatgcccatgcccgaacaccagttcttcaggtgcacccgctggagtcccctgccatgatctctttaaccccacccacaactgctactggagtattttccctaaaagctagacctggtttgcccccaggaataaacgtcgcctccctggaatgggtgtccagagagcctgccttgctgtgcacttttcctaacccatctgcccctcggaaggattcaacattaagtgccgtgcctcagtcctcataccccctgctggctaatggtgtttgcaagtggcctggatgtgaaaaggttttcgaagaaccagaagacttcctgaagcactgccaggcagatcatctgcttgatgagaagggccgcgctcagtgtctgctccaacgggagatggtgcagagtctagaacagcaactggtactggagaaggagaaactgagcgctatgcaagcacacctggctggcaaaatggccctgacaaaggcgagctccgttgcatcctcggacaaagggagctgctgtattgtcgccgctgggtctcaaggacccgtcgtgccagcctggtcgggaccacgggaagccccggactctctgtttgcggtcaggaggcacctctggggcagtcacggcaacagcactttccccgagtttttgcataatatggactatttcaaattccataacatgcgacccccattcacctacgccacactcatcaggtgggctattctggaagcgccagaaaaacagcgaaccctgaatgaaatttatcactggttcacccggatgttcgctttcttccggaaccatcctgcgacctggaagaacgctattagacataacctgtccctgcataaatgcttcgtgagggtggagagtgagaagggcgccgtttggaccgtggacgaactcgagtttcggaaaaagcgatcccagcggccttcccgatgctccaatcccacacctggcccttag

SEQ ID NO: 43023 - DNA, 1191 bp, Artificial Sequence
  derived and/or modified sequence
atgcctaaccccagaccaggcaaaccaagtgcgccttcattggctctggggccatctccaggagcttctccctcctggcgcgctgcccctaaagcgtccgaccttctaggtgccagggggcctggaggtacattccaagggagagacctccggggtggtgctcatgcctctagctcttcactaaaccccatgcccccttcccagctccaactaagtaccgtcgatgcgcacgctcggacccctgtgctccaggtgcaccccctagaatctcctgcgatgattagcctgaccccacccacaaccgctacaggcgtgttctcactgaaagctcgccctggcctccccccaggcattaacgttgccagcttggaatgggtgtcaagggagccagcattattgtgcacattccccaacccatcagcccctaggaaagatagcactttgtccgcggtgccgcagagctcttatcctctgctcgctaatggcgtgtgcaagtggcctggatgcgagaaagtcttcgaagagcccgaggacttcctcaaacattgccaagccgatcaccttctcgacgaaaaaggcagggctcaatgtcttctgcagagggagatggtccagtcacttgaacagcaacttgtgctcgaaaaagagaaactgtcagcaatgcaggctcacctggctggtaagatggcacttaccaaggcatccagcgtggccagctcagataagggtagctgctgtatagtggcggcaggcagccaggggccagtggtgcctgcttggagcgggcctagggaagcgcctgattctttgttcgccgtgaggcgacatctctggggtagtcacggcaattccacgttccctgaattcttacataacatggattacttcaaattccacaatatgaggcctcctttcacttacgctacgttgattagatgggccatactggaagcacctgaaaaacagcgcacactgaatgagatttatcattggttcacacgaatgttcgccttcttccggaatcatccagctacatggaaaaacgctatacgacataatctctcccttcacaaatgcttcgttcgagtggagtcggaaaaaggcgcagtgtggactgttgacgagcttgagtttaggaaaaaacggagccagcggccatcgaggtgcagtaatccaacccctggaccttag

SEQ ID NO: 43024 - DNA, 1191 bp, Artificial Sequence
  derived and/or modified sequence
atgcccaatcctaggccaggaaagccctccgccccaagcctagccctgggcccaagtcccggagctagcccttcatggcgcgctgcgcctaaggcctccgacctccttggggctagggggccaggcggtaccttccagggcagagaccttaggggtggggctcatgcctcgtcttcatcgttgaatcctatgcccccaagccagctgcaactgtccacagtggacgcccatgctcgaacccccgttctgcaggtgcaccctctcgagtctcccgcaatgatatcactgactccaccaactaccgctaccggcgttttttctttgaaggccagaccaggcctgccacccggaattaatgtggcctcacttgagtgggtatcacgggagcccgctctcttatgcacctttcccaatccctccgcccctcgaaaggacagtacgctgtcagcagtgcctcaaagctcttatcccctgctcgctaacggcgtgtgcaagtggcctggctgcgaaaaggtttttgaggagcctgaggatttcctgaagcactgccaggcagatcacttgctggacgaaaaaggtcgggcacaatgcctactccagcgggagatggtacagagccttgaacagcagctggtccttgagaaagaaaagctgtccgctatgcaggcccatctggccggaaagatggcactgacaaaggcatcaagcgtggcctcaagtgataaaggtagctgttgcatcgtggccgctggcagtcaggggcctgtcgtgcctgcgtggagtgggccaagggaagcgccagattctctctttgcggttagacgacacctgtgggggagccacggcaatagcacattccctgagttcctccataacatggattattttaaattccacaatatgcgacctcccttcacatacgctacattgatccgctgggccatattagaagccccagagaaacagaggacacttaatgagatctaccattggtttacccggatgttcgcattctttcggaatcaccccgcaacttggaagaatgctattcgccacaacctatctctgcacaagtgcttcgttcgagtagaatcagagaagggtgctgtctggacagtggacgagctggaattcagaaagaagcgctcacagcgcccatcccggtgcagcaaccctactcccggaccttag

SEQ ID NO: 43025 - protein, 1086 aa, Artificial Sequence
  derived and/or modified sequence
MKDSCITVMAMALLSGFFFFAPASSYNLDVRGARSFSPPRAGRHFGYRVLQVGNGVIVGAPGEGNSTGSLYQCQSGTGHCLPVTLRGSNYTSKYLGMTLATDPTDGSILFAAVQFSTSYKTEFDFSDYVKRKDPDALLKHVKHMLLLTNTFGAINYVATEVFREELGARPDATKVLIIITDGEATDSGNIDAAKDIIRYIIGIGKHFQTKESQETLHKFASKPASEFVKILDTFEKLKDLFTELQKKIYVIEGTSKQDLTSFNMELSSSGISADLSRGHAVVGAVGAKDWAGGFLDLKADLQDDTFIGNEPLTPEVRAGYLGYTVTWLPSRQKTSLLASGAPRYQHMGRVLLFQEPQGGGHWSQVQTIHGTQIGSYFGGELCGVDVDQDGETELLLIGAPLFYGEQRGGRVFIYQRRQLGFEEVSELQGDPGYPLGRFGEAITALTDINGDGLVDVAVGAPLEEQGAVYIFNGRHGGLSPQPSQRIEGTQVLSGIQWFGRSIHGVKDLEGDGLADVAVGAESQMIVLSSRPVVDMVTLMSFSPAEIPVHEVECSYSTSNKMKEGVNITICFQIKSLIPQFQGRLVANLTYTLQLDGHRTRRRGLFPGGRHELRRNIAVTTSMSCTDFSFHFPVCVQDLISPINVSLNFSLWEEEGTPRDQRAGKDIPPILRPSLHSETWEIPFEKNCGEDKKCEANLRVSFSPARSRALRLTAFASLSVELSLSNLEEDAYWVQLDLHFPPGLSFRKVEMLKPHSQIPVSCEELPEESRLLSRALSCNVSSPIFKAGHSVALQMMFNTLVNSSWGDSVELHANVTCNNEDSDLLEDNSATTIIPILYPINILIQDQEDSTLYVSFTPKGPKIHQVKHMYQVRIQPSIHDHNIPTLEAVVGVPQPPSEGPITHQWSVQMEPPVPCHYEDLERLPDAAEPCLPGALFRCPVVFRQEILVQVIGTLELVGEIEASSMFSLCSSLSISFNSSKHFHLYGSNASLAQVVMKVDVVYEKQMLYLYVLSGIGGLLLLLLIFIVLYKVGFFKRNLKEKMEAGRGVPNGIPAEDSEQLASGQEAGDPGCLKPLHEKDSESGGGKD

SEQ ID NO: 43026 - protein, 404 aa, Artificial Sequence
  derived and/or modified sequence
MKDSCITVMAMALLSGFFFFAPASSYNLDVRGARSFSPPRAGRHFGYRVLQIKSLIPQFQGRLVANLTYTLQLDGHRTRRRGLFPGGRHELRRNIAVTTSMSCTDFSFHFPMMFNTLVNSSWGDSVELHANVTCNNEDSDLLEDNSATTIIPILYPINILIQDQEDSTLYVSFTPKGPKIHQVKHMYQVRIQPSIHDHNIPTLEAVVGVPQPPSEGPITHQWSVQMEPPVPCHYEDLERLPDAAEPCLPGALFRCPVVFRQEILVQVIGTLELVGEIEASSMFSLCSSLSISFNSSKHFHLYGSNASLAQVVMKVDVVYEKQMLYLYVLSGIGGLLLLLLIFIVLYKVGFFKRNLKEKMEAGRGVPNGIPAEDSEQLASGQEAGDPGCLKPLHEKDSESGGGKD

SEQ ID NO: 43027 - DNA, 3261 bp, Artificial Sequence
  derived and/or modified sequence
atgaaagactcatgcataaccgtgatggcaatggccctcctatcaggattctttttttttgctcccgcgagttcttacaatcttgatgttaggggggctagatccttcagcccccccagagcagggaggcattttggttacagggttctgcaggtgggcaatggggttatcgtaggagcccccggagagggaaactccacagggtccctgtatcaatgtcagtctgggacaggacattgcctgcctgtgactctgcgagggagtaactatactagcaagtacctggggatgacattagcgaccgacccgaccgatggctctatcctgtttgccgcagtccagttctctacatcttacaagacggagtttgactttagcgactatgttaagcgaaaagaccccgatgccctgctgaagcacgttaaacacatgctgctgctgaccaacacatttggagcaattaactatgttgcaaccgaggtattccgggaagaactgggcgccaggcccgatgcaacgaaagtcctcatcattatcacagacggtgaggccactgattccggtaatattgacgctgctaaggatatcatacggtatattatcggtatcggaaagcattttcagacaaaggagtcccaggaaacgctgcacaaatttgcgtccaagcccgcaagcgaatttgtgaaaatactcgacactttcgaaaagctgaaggatctgtttacagagctgcagaagaagatatatgtgattgaggggaccagcaagcaggatctgacttcattcaatatggagctgtcgagctccggtatctctgctgatctgtctcgaggacatgccgtggtcggcgcggtcggcgcaaaggattgggctgggggattccttgaccttaaggcagacctccaggacgatacctttatcgggaacgaacctttgacgcctgaggtgcgcgcagggtacttggggtacaccgtcacctggctgccctctaggcagaagacgtctcttcttgcttctggcgccccccgctatcagcacatgggcagagtactgctcttccaggagccccagggcggcggccattggagtcaggtccagacaatccacgggacccagattggctcatacttcgggggcgaactgtgtggggtcgacgtggaccaggatggcgaaaccgagctgttactgatcggcgcgccactattctatggtgaacagcggggcggccgggtattcatctatcagagacgtcagctcggctttgaggaagtgtccgagctccagggagatcctggctaccccctcgggagattcggggaggccattaccgctctgacagacatcaacggtgatggattagtcgacgtggctgtgggagcacctctcgaggaacagggggccgtttacatatttaatgggcgacatggtggtttgtcaccacagcctagccagcgtattgagggcactcaggtcctgtctggtatccagtggttcggcagatccatacacggggtgaaggaccttgaaggcgatggactcgccgacgttgccgtcggcgctgagtcccaaatgattgtgctgtcctctcgacctgtcgtagacatggtcacactgatgagcttttccccggccgagatcccagtgcatgaggtcgagtgttcttacagcacaagcaacaagatgaaggagggtgtaaacataactatatgtttccaaatcaagtctctgatacctcagttccaaggccgccttgtggcaaacctgacatatacgctccagctcgatggccacaggactaggcgccgaggcctgttccctggaggccgccatgagctgagaagaaacatcgccgttacaacctctatgtcgtgtacagacttctcttttcactttcctgtgtgtgttcaagacctcattagccccatcaacgtgagccttaacttctcactatgggaagaagaagggactccccgggatcaaagagccgggaaggatatcccacctattctccggccttccctgcacagcgaaacctgggaaattccctttgaaaaaaactgtggcgaggataagaaatgtgaagccaacttgcgcgtctcattcagccccgcccggagtagagcattgcggctgacggctttcgcctccctgtccgtggaactctccctctctaatctcgaggaagacgcctactgggttcagctggatctgcactttcctcccgggctgtcttttcgcaaagtggagatgctcaagcctcatagtcagattccggtctcctgtgaagagcttcctgaggagtcccggcttctcagccgcgctttgagctgcaacgtgtccagtcctatcttcaaggcagggcatagcgtggctctgcaaatgatgtttaataccttggtgaattcaagctggggtgacagtgtggaactccacgccaatgtcacatgcaataatgaggattcagacctgctggaggataattctgccaccaccatcatccccattttgtaccccattaacattctgattcaggaccaggaggattccacgctatacgtgtctttcacccccaagggtcctaaaattcaccaggttaagcatatgtaccaggtgcgaatccagcctagcatccatgatcacaatatccctactcttgaagcagtagtgggcgtgccccagcctccaagcgagggccctataacacaccagtggtcagtgcaaatggaaccacctgttccatgtcactacgaggatttggaacggctgccggacgctgccgagccctgcctgcctggagcactctttaggtgtccagttgtttttagacaggagattctggtacaggtgattggcacactggaactggtgggcgaaatcgaggcttctagcatgttcagtttgtgctcatccctgagcattagttttaactcctcaaaacacttccacctctatggtagcaatgcctcactcgctcaggtcgtgatgaaggtagacgtggtgtacgagaagcagatgctgtacttatatgtgttgtcagggatcggggggctgcttttgctcctgttgattttcattgttctgtataaagtgggcttcttcaaaagaaacctgaaggagaaaatggaggctggtcgtggcgtgccgaatgggattcccgctgaagatagcgagcagctggctagcggacaagaggcgggtgatcccggctgcctcaagcccctgcacgagaaagattctgaatcaggaggaggaaaagactag

SEQ ID NO: 43028 - DNA, 4956 bp, Artificial Sequence
  derived and/or modified sequence
acacctccctccccgcctgccagtgtcaccagcctgttgcctctgtgagaaagtaccactgtaagaggccaaagggcatgatcattttcctctttcaccctgtctaggttgccagcaaatcccacgggcctcctgacgctgcccctggggccacaggtccctcgagtgctggaaggatgaaggattcctgcatcactgtgatggccatggcgctgctgtctgggttctttttcttcgcgccggcctcgagctacaacctggacgtgcggggcgcgcggagcttctccccaccgcgcgccgggaggcactttggataccgcgtcctgcaggtcggaaacggggtcatcgtgggagctccaggggaggggaacagcacaggaagcctctatcagtgccagtcgggcacaggacactgcctgccagtcaccctgagaggttccaactatacctccaagtacttgggaatgaccttggcaacagaccccacagatggaagcattttgtttgctgctgttcagttttccacaagctacaaaacagaatttgatttctcagattatgttaaacggaaggaccctgatgctctgctgaagcatgtaaagcacatgttgctgttgaccaatacctttggtgccatcaattatgtcgcgacagaggtgttccgggaggagctgggggcccggccagatgccaccaaagtgcttatcatcatcacggatggggaggccactgacagtggcaacatcgatgcggccaaagacatcatccgctacatcatcgggattggaaagcattttcagaccaaggagagtcaggagaccctccacaaatttgcatcaaaacccgcgagcgagtttgtgaaaattctggacacatttgagaagctgaaagatctattcactgagctgcagaagaagatctatgtcattgagggcacaagcaaacaggacctgacttccttcaacatggagctgtcctccagcggcatcagtgctgacctcagcaggggccatgcagtcgtgggggcagtaggagccaaggactgggctgggggctttcttgacctgaaggcagacctgcaggatgacacatttattgggaatgaaccattgacaccagaagtgagagcaggctatttgggttacaccgtgacctggctgccctcccggcaaaagacttcgttgctggcctcgggagcccctcgataccagcacatgggccgagtgctgctgttccaagagccacagggcggaggacactggagccaggtccagacaatccatgggacccagattggctcttatttcggtggggagctgtgtggcgtcgacgtggaccaagatggggagacagagctgctgctgattggtgccccactgttctatggggagcagagaggaggccgggtgtttatctaccagagaagacagttggggtttgaagaagtctcagagctgcagggggaccccggctacccactcgggcggtttggagaagccatcactgctctgacagacatcaacggcgatgggctggtagacgtggctgtgggggcccctctggaggagcagggggctgtgtacatcttcaatgggaggcacggggggcttagtccccagccaagtcagcggatagaagggacccaagtgctctcaggaattcagtggtttggacgctccatccatggggtgaaggaccttgaaggggatggcttggcagatgtggctgtgggggctgagagccagatgatcgtgctgagctcccggcccgtggtggatatggtcaccctgatgtccttctctccagctgagatcccagtgcatgaagtggagtgctcctattcaaccagtaacaagatgaaagaaggagttaatatcacaatctgtttccagatcaagtctctcatcccccagttccaaggccgcctggttgccaatctcacttacactctgcagctggatggccaccggaccagaagacgggggttgttcccaggagggagacatgaactcagaaggaatatagctgtcaccaccagcatgtcatgcactgacttctcatttcatttcccggtatgtgttcaagacctcatctcccccatcaatgtttccctgaatttctctctttgggaggaggaagggacaccgagggaccaaagggcgggcaaggacataccgcccatcctgagaccctccctgcactcggaaacctgggagatcccttttgagaagaactgtggggaggacaagaagtgtgaggcaaacttgagagtgtccttctctcctgcaagatccagagccctgcgtctaactgcttttgccagcctctctgtggagctgagcctgagtaacttggaagaagatgcttactgggtccagctggacctgcacttccccccgggactctccttccgcaaggtggagatgctgaagccccatagccagatacctgtgagctgcgaggagcttcctgaagagtccaggcttctgtccagggcattatcttgcaatgtgagctctcccatcttcaaagcaggccactcggttgctctgcagatgatgtttaatacactggtaaacagctcctggggggactcggttgaattgcacgccaatgtgacctgtaacaatgaggactcagacctcctggaggacaactcagccactaccatcatccccatcctgtaccccatcaacatcctcatccaggaccaagaagactccacactctatgtcagtttcacccccaaaggccccaagatccaccaagtcaagcacatgtaccaggtgaggatccagccttccatccacgaccacaacatacccaccctggaggctgtggttggggtgccacagcctcccagcgaggggcccatcacacaccagtggagcgtgcagatggagcctcccgtgccctgccactatgaggatctggagaggctcccggatgcagctgagccttgtctccccggagccctgttccgctgccctgttgtcttcaggcaggagatcctcgtccaagtgatcgggactctggagctggtgggagagatcgaggcctcttccatgttcagcctctgcagctccctctccatctccttcaacagcagcaagcatttccacctctatggcagcaacgcctccctggcccaggttgtcatgaaggttgacgtggtgtatgagaagcagatgctctacctctacgtgctgagcggcatcggggggctgctgctgctgctgctcattttcatagtgctgtacaaggttggtttcttcaaacggaacctgaaggagaagatggaggctggcagaggtgtcccgaatggaatccctgcagaagactctgagcagctggcatctgggcaagaggctggggatcccggctgcctgaagcccctccatgagaaggactctgagagtggtggtggcaaggactgagtccaggcctgtgaggtgcagagtgcccagaactggactcaggatgcccagggccactctgcctctgcctgcattctgccgtgtgccctcgggcgagtcactgcctctccctggccctcagtttccctatctcgaacatggaactcattcctgcctgtctcctttgcaggctcatagggaagacctgctgagggaccagccaagagggctgcaaaagtgagggcttgtcattaccagacggttcaccagcctctcttggtttccttccttggaagagaatgtctgatctaaatgtggagaaactgtagtctcaggacctagggatgttctggccctcacccctgccctgggatgtccacagatgcctccaccccccagaacctgtccttgcacactcccctgcactggagtccagtctcttctgctggcagaaagcaaatgtgacctgtgtcactacgtgactgtggcacacgccttgttcttggccaaagaccaaattccttggcatgccttccagcaccctgcaaaatgagaccctcgtggccttccccagcctcttctagagccgtgatgcctccctgttgaagctctggtgacaccagcctttctcccaggccaggctccttcctgtcttcctgcattcacccagacagctccctctgcctgaaccttccatctcgccacccctccttccttgaccagcagatcccagctcacgtcacacttggttgggtcctcacatctttcacacttccaccagcctgcactactccctcaaagcacacgtcatgtttcttcatccggcagcctggatgttttttccctgtttaatgattgacgtacttagcagctatctctcagtgaactgtgagggtaaaggctatacttgtcttgttcaccttgggatgatgcctcatgatatgtcagggcgtgggacatctagtaggtgcttgacataatttcactgaattaatgacagagccagtgggaagatacagaaaaagaggggctgggctgggcgcggtggttcacgcctgtaatcccagcactttgggaggccaaggagggtggatcacctgaggtcaggagttagaggccagcctggcgaaaccccatctctactaaaaatacaaaatccaggcgtggtggcacacacctgtagtcccagctactcaggaggttgaggtaggagaattgcttgaacctgggaggtggaggttgcagtgagccaagattgcgccattgcactccagcctgggcaacacagcgagactccgtctcaaggaaaaaataaaaataaaaagcgggcacgggcccgtgacatccccacccttggaggctgtcttctcaggctctgccctgccctagctccacaccctctcccaggacccatcacgcctgtgcagtggcccccacagaaagactgagctcaaggtgggaaccacgtctgctaacttggagccccagtgccaagcacagtgcctgcatgtatttatccaataaatgtgaaattctgtcc

SEQ ID NO: 43029 - DNA, 3261 bp, Artificial Sequence
  derived and/or modified sequence
atgaaggacagctgcatcaccgtgatggccatggccctgctgagcggcttcttcttctttgccccagccagcagctacaacctggatgtgcggggggcccgctccttcagcccccccagggctggccgccacttcggctacagagtgctgcaggtgggcaatggagtgattgtgggcgcccctggagagggcaacagcacaggcagcctgtaccagtgccagagcggcaccggccactgcctgcctgtgaccctgcggggcagcaactacaccagcaagtacctgggcatgaccctggccacagaccccacagatggcagcatcctgtttgctgctgtgcagttcagcaccagctacaagacagaatttgacttcagtgactatgtgaagaggaaggaccctgatgccctgctgaagcacgtgaagcacatgctgctgctgaccaacacctttggagccatcaactacgtggccacagaggtgttccgggaggagctgggcgcccggccagatgccaccaaggtgctgatcatcatcacagatggagaggccacagattctggcaacattgatgctgccaaggacatcatccgctacatcattggaattggcaagcacttccagaccaaggagagccaggagaccctgcacaagtttgccagcaagccagccagcgagtttgtgaagatcctggacacctttgagaagctgaaggacctcttcacagagctgcagaagaagatctacgtgattgagggcaccagcaagcaggacctgaccagcttcaacatggagctgagcagcagcggcatctctgctgacctgagccggggccatgctgtggtgggcgctgtgggcgccaaggactgggccggcggcttcctggacctgaaggctgacctgcaggatgacaccttcatcggaaatgagcccctgaccccagaggtgcgggccggctacctgggctacacagtgacctggctgcccagccggcagaagaccagcctgctggccagcggggccccccgctaccagcacatgggccgggtgctgctcttccaggagccccagggcggcggccactggagccaggtgcagaccatccacggcacccagatcggcagctactttggaggagagctgtgtggggtggatgtggaccaggatggagaaacagagctgctgctgattggagcccccctcttctatggagagcagaggggcggccgggtcttcatctaccagaggcggcagctgggctttgaggaggtgtctgagctgcagggcgaccccggctaccccctgggccgctttggagaggccatcacagccctgacagacatcaatggagatggcctggtggatgtggccgtgggcgcccccctggaggagcagggcgctgtgtacatcttcaacggcagacatggaggcctgagcccccagcccagccagagaattgagggcacccaggtgctgagcggcatccagtggtttggccgcagcatccatggagtgaaggacctggagggagatggcctggctgatgtggccgtgggcgctgagagccagatgattgtgctgagcagcaggcctgtggtggacatggtgaccctgatgtccttctccccagctgagatccctgtgcatgaggtggagtgcagctacagcaccagcaacaagatgaaggagggcgtgaacatcaccatctgcttccagatcaagagcctcatcccccagttccagggccgcctggtggccaacctgacctacaccctgcagctggatggccacaggaccaggagaagaggcctcttccctgggggcagacatgagctgcggaggaacattgctgtgaccacctccatgagctgcacagacttctccttccacttccctgtgtgtgtgcaggacctgatcagccccatcaacgtgtccctgaacttcagcctgtgggaggaggagggcaccccccgggaccagagagctgggaaggacatcccccccatcctgcggcccagcctgcacagcgagacctgggagatcccctttgagaagaactgtggggaggacaagaagtgtgaggccaacctgcgggtgtccttctccccagcccggagccgggccctgcggctgacagcctttgccagcctgtctgtggagctgagcctgagcaacctggaggaggatgcctactgggtgcagctggacctgcacttccccccaggcctgtccttcaggaaggtggagatgctgaagccccacagccagatccctgtgtcctgtgaggagctgcctgaggagagccggctgctgagccgggccctgagctgcaatgtgagcagccccatcttcaaggccggccacagcgtggccctgcagatgatgttcaacaccctggtgaacagctcctggggagacagcgtggagctgcacgccaacgtgacctgcaacaatgaagattctgacctgctggaggacaacagcgccaccaccatcatccccatcctgtaccccatcaacatcctgatccaggaccaggaggacagcaccctgtatgtgtccttcacccccaagggccccaagatccaccaggtgaagcacatgtaccaggtgcgcatccagcccagcatccatgaccacaacatccccaccctggaggccgtggtgggcgtgccccagccccccagcgagggccccatcacccaccagtggagcgtgcagatggagccccctgtgccctgccactatgaggacctggagcggctgcctgatgctgctgagccctgcctgcccggggccctcttccgctgccctgtggtgttccggcaggagatcctggtgcaggtgattggcaccctggagctggtgggggagattgaggccagctccatgttcagcctgtgcagcagcctgagcatctccttcaacagcagcaagcacttccacctgtatggcagcaatgccagcctggcccaggtggtgatgaaggtggatgtggtgtatgagaagcagatgctgtacctgtatgtgctgagcggcatcggcggcctgctgctgctgctgctgatcttcatcgtgctgtacaaggtgggcttcttcaagaggaacctgaaggagaagatggaggccggccggggcgtgcccaacggcatcccagctgaggacagcgagcagctggccagcggccaggaggccggggaccccggctgcctgaagcccctgcacgagaaggacagcgagagcggcggcggcaaggactag

SEQ ID NO: 43030 - DNA, 3261 bp, Artificial Sequence
  derived and/or modified sequence
atgaaggacagctgcatcaccgtgatggccatggccctgctgagcggcttcttcttcttcgcacctgccagctcatataatctggacgtgcgaggggcgaggtctttctctcctcctagggccgggcgccattttggctacagagttctccaagtcgggaacggagtgattgtgggtgcccctggcgagggcaactctaccggttccttgtatcagtgccagagcggaactgggcactgcctgccagtgaccttgcgaggcagcaactatacaagcaagtatctcggaatgaccctggctaccgaccccaccgacggatcaatcctctttgccgctgtgcagttttctacatcatataagactgaattcgacttcagtgattacgtgaagagaaaggaccccgacgccctgcttaagcacgtcaaacacatgctgctcctgacaaacacttttggagctattaattatgtagctactgaagtgttccgagaggagctgggagcccgaccagatgccactaaggtgttgattattattactgacggagaggctaccgactcaggtaacatcgacgctgcaaaggatatcatccgctatatcatcgggattggcaagcattttcaaactaaggaatcccaggaaacgctgcacaagttcgcatccaaacctgcttcggagttcgtaaagatcctggacactttcgagaaattaaaggacctgtttaccgaactccaaaagaaaatttacgtcattgagggcacttccaagcaggatctaacttcttttaacatggagctctcgagtagcggaatctctgctgacttatctagagggcatgctgtggtaggcgcagtgggcgcgaaggattgggctggggggtttcttgacctaaaagctgatctccaggatgatacttttatcgggaatgagcctctaactcccgaagtgcgtgccggttacctggggtacacagtcacttggctccctagccgccagaagacctctctgttggcctctggcgccccgcggtaccagcacatgggtagggtgctcctgtttcaggagccccaaggcgggggccattggagccaagtccagactattcatggcactcagattgggtcgtactttgggggcgagctgtgcggagtggacgtggaccaagacggcgagacagaactgcttctgattggcgcccctctcttctatggcgagcagcggggtgggcgtgtgttcatctatcagagaaggcagcttgggttcgaggaagtatcagagctccaaggagatcctgggtacccactgggtcgctttggagaggccattacggccctgacagacattaatggggacgggctcgtagatgtcgcggtgggtgccccactggaagagcagggcgccgtttacatctttaatggtaggcacggcggcctttcgccccagcctagccaaagaatcgagggtacccaggtgctttccggaattcagtggtttggcaggtccatccacggagtgaaagacctcgaaggcgacgggctggccgacgtggcggtcggcgcggagtctcaaatgattgtgcttagctcccggcctgtcgtggacatggttacactgatgtctttttcccctgctgagattccagtgcatgaagtggaatgtagctatagcactagtaacaaaatgaaggaaggtgtgaacatcaccatctgttttcagatcaaatcgctgatcccgcagttccagggtcgcctcgtcgctaaccttacttacactttgcaactcgacggccatcgaaccagacgccgagggctgttcccaggcggaaggcacgaattgcgtcgcaacatcgcagttacaacctctatgtcttgtacagacttctcttttcattttccggtgtgcgtgcaagatctgatcagtccaatcaatgtatccctcaatttttccctatgggaagaagaggggactcccagggatcagagggctggtaaggacattccgccaatcctgaggccatccttgcacagtgaaacgtgggagatcccgttcgagaagaattgtggcgaggacaagaagtgtgaggccaatttgagggtgagcttcagcccggctaggtcgcgtgcgctccgcctcaccgccttcgcctctctatctgtcgagttaagcctcagcaatcttgaggaagacgcatactgggtgcagctggacctacacttcccgcccggacttagcttcaggaaggttgaaatgctgaaaccacacagccagatccccgttagctgtgaagaactcccagaggagagcaggctactctcccgcgcactcagctgtaatgtcagcagccctatcttcaaagccggacacagtgttgcattgcagatgatgtttaacacgctcgtaaacagcagttggggtgactccgtagagctccatgctaatgtcacctgtaataacgaagatagtgacctcctggaggacaatagtgcgaccaccatcatacccattttgtacccgattaacatattgatccaggatcaagaagacagtaccctttatgtctctttcacaccgaagggcccaaaaatccaccaggtcaaacatatgtaccaggtccgtatccagccgagtattcatgaccataatatcccaacactggaagctgtcgtcggcgtacctcagccaccgtcggaaggcccaataactcaccagtggtctgtccagatggaacccccagtcccatgccattacgaagatctggagcggctcccggacgctgcagagccatgcctgcccggagcactgttcagatgcccagtggtgttcagacaggagatactggttcaagttatcgggaccctcgagctggtcggagagatcgaggcgagcagcatgttctccctgtgtagctccctgtcaatctccttcaactctagcaaacacttccacctgtatggaagtaacgcaagcctagctcaggtggtgatgaaagtagacgtagtatatgaaaagcagatgctttacttatacgtacttagcggaatcggtggacttctgctgctgttgctcatttttattgtactctacaaggttgggtttttcaaacgtaacctaaaggagaaaatggaagcgggaagaggagttcccaatggcattcctgccgaggactctgaacaattggctagcggacaggaggccggcgaccctggatgcttaaagccactccatgagaaggattctgagtctggcgggggaaaagattag

SEQ ID NO: 43031 - DNA, 3261 bp, Artificial Sequence
  derived and/or modified sequence
atgaaagattcctgtatcacagtcatggccatggctctcctgtcaggattttttttttttgcccctgcttcttcatacaatctggatgttagaggcgctcgatccttttcccctcctcgggctggacgtcatttcggttatcgggtgctccaggtgggtaatggagttatcgtgggcgcacccggagaaggaaatagcactggaagcctttatcagtgtcagagcggcaccggccactgtctgcctgttactctccgcggatccaactacacttctaaatatttaggaatgacgttggccacagatccaacagatggttcgatcttgttcgccgctgttcagttcagtactagttacaaaaccgaatttgatttctctgactatgtcaaaagaaaagatccagatgcccttctgaagcatgtgaagcacatgctgctattgaccaacacctttggagcgataaactacgtggcaactgaggtttttcgcgaggagctgggagctagacccgatgccacaaaggtgctgattataatcactgacggcgaggccactgactcaggtaacatcgacgccgcaaaagacattatccggtatataataggaatcggtaaacactttcagactaaagagtctcaggaaaccctacacaagttcgcctcaaaaccggcttccgagttcgtgaaaattctggacacgtttgaaaaactcaaggatcttttcactgaactccagaagaagatttacgtgatcgaggggaccagcaaacaggacctcacctcttttaatatggagctttcttcctcagggatttccgcagacctttctcgaggacatgcagtcgtaggagcagttggtgcgaaggactgggccggtggatttttggatctcaaagccgacttgcaagacgatacattcatcggcaacgaaccccttacgccagaagtcagagccggatacctgggatataccgttacgtggcttcctagcaggcagaagacgagcctgcttgctagcggcgcacctaggtaccagcatatgggaagggtgttgctgtttcaagagccacaggggggtgggcactggtcacaagtgcagacgatacatggaacgcaaatcggatcttactttgggggtgaactatgcggcgtggatgtggatcaagacggggaaacagaactgctactgatcggagcccctcttttctacggagaacagcgagggggtagggtttttatctaccagaggcgacagttgggttttgaggaggtgtccgagttgcaaggagacccaggctatcccctgggccgatttggcgaagctatcactgccctgacagacatcaacggcgatgggctagtggatgtcgcggtgggtgctcctctcgaggagcagggcgctgtgtacatttttaatgggagacacggcggactgtcaccacagcccagtcagcgcattgagggaacacaagtattatcgggcattcagtggttcgggaggtctatccacggcgtgaaggatctggaaggcgacggactggcagatgtagctgtgggagcagaatcacagatgatcgtgttatcatcccgcccagtggtagatatggtgactttgatgagcttctcccctgcagaaattccagtccatgaagtggaatgtagctatagtaccagcaataagatgaaggaaggggtgaacatcacaatatgtttccagataaaatctctgattccccagttccaaggacgactagtggcaaatctgacatataccctgcagctcgacggccatcggacaaggaggaggggcctctttccgggtgggcgacacgagttaagaagaaacatagccgtcactacatccatgagctgcactgacttctcatttcacttccccgtatgtgtgcaggacctcatctcccccatcaacgtgagtctcaatttcagtctgtgggaggaagaggggactcctcgcgatcagagggctggaaaagacatcccccctattctgcgaccatcattacatagcgaaacttgggagattcccttcgaaaagaactgcggcgaagataagaagtgtgaagcaaatctgagggttagcttttctccagctcgctccagggcactgaggctcacggcgttcgctagcctttccgttgagctcagcttgtcaaatctggaggaggatgcttattgggtgcagctggacctgcacttccctccaggtctttcttttcgcaaggttgagatgctgaaaccacactctcagatacctgtgtcatgtgaggagctgccggaagagagccgactcctatctagagctctctcctgcaatgtgtcaagtcccatattcaaagccggacatagcgttgctttacagatgatgtttaataccttagtaaactcaagctggggggacagtgtggaactacatgccaacgtcacttgtaataatgaagatagcgacttgcttgaagacaacagtgccacaaccattataccgatactctatcctatcaatatcctaatccaggaccaggaagactccaccctgtatgtatcattcacgcctaagggccctaagattcaccaggtgaagcacatgtaccaggtgcggatacagcccagtatccacgaccataacattcctacactggaggctgtagtcggggttcctcaacccccatcagagggccctataacgcatcagtggtcagtccagatggagccacccgtgccttgtcactacgaggacctggagagattgccagacgcagctgaaccttgtttaccaggggcactgttcagatgcccagtcgtatttcgacaagaaatcttagtacaggtcatcggcaccctggagctcgtgggagaaattgaggccagcagcatgttctctttgtgcagcagtcttagcatctccttcaacagctcaaagcactttcacttatatggctcgaacgcctcgctggctcaggtagtgatgaaggtggacgtggtgtatgaaaaacagatgctatacctctacgtgctgtccggtattggcggactcttgctcttgttgttgatctttatcgtgctttataaagtagggtttttcaagcggaatctgaaggagaaaatggaagcagggagaggcgtgccgaacggcatccccgctgaggactctgagcagttagcatccggccaggaggccggagatcccggatgcctgaagcccctgcacgaaaaggactctgagagcggcggaggaaaggattag

SEQ ID NO: 43032 - DNA, 3261 bp, Artificial Sequence
  derived and/or modified sequence
atgaaggacagctgcatcaccgtgatggccatggccctgctgagcggcttcttcttcttcgcccccgccagcagctacaacctggacgtgagaggcgccagaagcttcagcccccccagagccggcagacacttcggctacagagtgctgcaggtgggcaacggcgtgatcgtgggcgcccccggcgagggcaacagcaccggcagcctgtaccagtgccagagcggcaccggccactgcctgcccgtgaccctgagaggcagcaactacaccagcaagtacctgggcatgaccctggccaccgaccccaccgacggcagcatcctgttcgccgccgtgcagttcagcaccagctacaagaccgagttcgacttcagcgactacgtgaagagaaaggaccccgacgccctgctgaagcacgtgaagcacatgctgctgctgaccaacaccttcggcgccatcaactacgtggccaccgaggtgttcagagaggagctgggcgccagacccgacgccaccaaggtgctgatcatcatcaccgacggcgaggccaccgacagcggcaacatcgacgccgccaaggacatcatcagatacatcatcggcatcggcaagcacttccagaccaaggagagccaggagaccctgcacaagttcgccagcaagcccgccagcgagttcgtgaagatcctggacaccttcgagaagctgaaggacctgttcaccgagctgcagaagaagatctacgtgatcgagggcaccagcaagcaggacctgaccagcttcaacatggagctgagcagcagcggcatcagcgccgacctgagcagaggccacgccgtggtgggcgccgtgggcgccaaggactgggccggcggcttcctggacctgaaggccgacctgcaggacgacaccttcatcggcaacgagcccctgacccccgaggtgagagccggctacctgggctacaccgtgacctggctgcccagcagacagaagaccagcctgctggccagcggcgcccccagataccagcacatgggcagagtgctgctgttccaggagccccagggcggcggccactggagccaggtgcagaccatccacggcacccagatcggcagctacttcggcggcgagctgtgcggcgtggacgtggaccaggacggcgagaccgagctgctgctgatcggcgcccccctgttctacggcgagcagagaggcggcagagtgttcatctaccagagaagacagctgggcttcgaggaggtgagcgagctgcagggcgaccccggctaccccctgggcagattcggcgaggccatcaccgccctgaccgacatcaacggcgacggcctggtggacgtggccgtgggcgcccccctggaggagcagggcgccgtgtacatcttcaacggcagacacggcggcctgagcccccagcccagccagagaatcgagggcacccaggtgctgagcggcatccagtggttcggcagaagcatccacggcgtgaaggacctggagggcgacggcctggccgacgtggccgtgggcgccgagagccagatgatcgtgctgagcagcagacccgtggtggacatggtgaccctgatgagcttcagccccgccgagatccccgtgcacgaggtggagtgcagctacagcaccagcaacaagatgaaggagggcgtgaacatcaccatctgcttccagatcaagagcctgatcccccagttccagggcagactggtggccaacctgacctacaccctgcagctggacggccacagaaccagaagaagaggcctgttccccggcggcagacacgagctgagaagaaacatcgccgtgaccaccagcatgagctgcaccgacttcagcttccacttccccgtgtgcgtgcaggacctgatcagccccatcaacgtgagcctgaacttcagcctgtgggaggaggagggcacccccagagaccagagagccggcaaggacatcccccccatcctgagacccagcctgcacagcgagacctgggagatccccttcgagaagaactgcggcgaggacaagaagtgcgaggccaacctgagagtgagcttcagccccgccagaagcagagccctgagactgaccgccttcgccagcctgagcgtggagctgagcctgagcaacctggaggaggacgcctactgggtgcagctggacctgcacttcccccccggcctgagcttcagaaaggtggagatgctgaagccccacagccagatccccgtgagctgcgaggagctgcccgaggagagcagactgctgagcagagccctgagctgcaacgtgagcagccccatcttcaaggccggccacagcgtggccctgcagatgatgttcaacaccctggtgaacagcagctggggcgacagcgtggagctgcacgccaacgtgacctgcaacaacgaggacagcgacctgctggaggacaacagcgccaccaccatcatccccatcctgtaccccatcaacatcctgatccaggaccaggaggacagcaccctgtacgtgagcttcacccccaagggccccaagatccaccaggtgaagcacatgtaccaggtgagaatccagcccagcatccacgaccacaacatccccaccctggaggccgtggtgggcgtgccccagccccccagcgagggccccatcacccaccagtggagcgtgcagatggagccccccgtgccctgccactacgaggacctggagagactgcccgacgccgccgagccctgcctgcccggcgccctgttcagatgccccgtggtgttcagacaggagatcctggtgcaggtgatcggcaccctggagctggtgggcgagatcgaggccagcagcatgttcagcctgtgcagcagcctgagcatcagcttcaacagcagcaagcacttccacctgtacggcagcaacgccagcctggcccaggtggtgatgaaggtggacgtggtgtacgagaagcagatgctgtacctgtacgtgctgagcggcatcggcggcctgctgctgctgctgctgatcttcatcgtgctgtacaaggtgggcttcttcaagagaaacctgaaggagaagatggaggccggcagaggcgtgcccaacggcatccccgccgaggacagcgagcagctggccagcggccaggaggccggcgaccccggctgcctgaagcccctgcacgagaaggacagcgagagcggcggcggcaaggactag

SEQ ID NO: 43033 - protein, 1784 aa, Artificial Sequence
  derived and/or modified sequence
MAKPTSKDSGLKEKFKILLGLGTPRPNPRSAEGKQTEFIITAEILRELSMECGLNNRIRMIGQICEVAKTKKFEEHAVEALWKAVADLLQPERPLEARHAVLALLKAIVQGQGERLGVLRALFFKVIKDYPSNEDLHERLEVFKALTDNGRHITYLEEELADFVLQWMDVGLSSEFLLVLVNLVKFNSCYLDEYIARMVQMICLLCVRTASSVDIEVSLQVLDAVVCYNCLPAESLPLFIVTLCRTINVKELCEPCWKLMRNLLGTHLGHSAIYNMCHLMEDRAYMEDAPLLRGAVFFVGMALWGAHRLYSLRNSPTSVLPSFYQAMACPNEVVSYEIVLSITRLIKKYRKELQVVAWDILLNIIERLLQQLQTLDSPELRTIVHDLLTTVEELCDQNEFHGSQERYFELVERCADQRPESSLLNLISYRAQSIHPAKDGWIQNLQALMERFFRSESRGAVRIKVLDVLSFVLLINRQFYEEELINSVVISQLSHIPEDKDHQVRKLATQLLVDLAEGCHTHHFNSLLDIIEKVMARSLSPPPELEERDVAAYSASLEDVKTAVLGLLVILQTKLYTLPASHATRVYEMLVSHIQLHYKHSYTLPIASSIRLQAFDFLLLLRADSLHRLGLPNKDGVVRFSPYCVCDYMEPERGSEKKTSGPLSPPTGPPGPAPAGPAVRLGSVPYSLLFRVLLQCLKQESDWKVLKLVLGRLPESLRYKVLIFTSPCSVDQLCSALCSMLSGPKTLERLRGAPEGFSRTDLHLAVVPVLTALISYHNYLDKTKQREMVYCLEQGLIHRCASQCVVALSICSVEMPDIIIKALPVLVVKLTHISATASMAVPLLEFLSTLARLPHLYRNFAAEQYASVFAISLPYTNPSKFNQYIVCLAHHVIAMWFIRCRLPFRKDFVPFITKGLRSNVLLSFDDTPEKDSFRARSTSLNERPKSLRIARPPKQGLNNSPPVKEFKESSAAEAFRCRSISVSEHVVRSRIQTSLTSASLGSADENSVAQADDSLKNLHLELTETCLDMMARYVFSNFTAVPKRSPVGEFLLAGGRTKTWLVGNKLVTVTTSVGTGTRSLLGLDSGELQSGPESSSSPGVHVRQTKEAPAKLESQAGQQVSRGARDRVRSMSGGHGLRVGALDVPASQFLGSATSPGPRTAPAAKPEKASAGTRVPVQEKTNLAAYVPLLTQGWAEILVRRPTGNTSWLMSLENPLSPFSSDINNMPLQELSNALMAAERFKEHRDTALYKSLSVPAASTAKPPPLPRSNTDSAVVMEEGSPGEVPVLVEPPGLEDVEAALGMDRRTDAYSRSSSVSSQEEKSLHAEELVGRGIPIERVVSSEGGRPSVDLSFQPSQPLSKSSSSPELQTLQDILGDPGDKADVGRLSPEVKARSQSGTLDGESAAWSASGEDSRGQPEGPLPSSSPRSPSGLRPRGYTISDSAPSRRGKRVERDALKSRATASNAEKVPGINPSFVFLQLYHSPFFGDESNKPILLPNESQSFERSVQLLDQIPSYDTHKIAVLYVGEGQSNSELAILSNEHGSYRYTEFLTGLGRLIELKDCQPDKVYLGGLDVCGEDGQFTYCWHDDIMQAVFHIATLMPTKDVDKHRCDKKRHLGNDFVSIVYNDSGEDFKLGTIKGQFNFVHVIVTPLDYECNLVSLQCRKDMEGLVDTSVAKIVSDRNLPFVARQMALHANMASQVHHSRSNPTDIYPSKWIARLRHIKRLRQRICEEAAYSNPSLPLVHPPSHSKAPAQTPAEPTPGYEVGQRKRLISSVEDFTEFV

SEQ ID NO: 43034 - DNA, 5355 bp, Artificial Sequence
  derived and/or modified sequence
atggccaagcccaccagcaaggacagcggcctgaaggagaagttcaagatcctgctgggcctgggcacccccagacccaaccccagaagcgccgagggcaagcagaccgagttcatcatcaccgccgagatcctgagagagctgagcatggagtgcggcctgaacaacagaatcagaatgatcggccagatctgcgaggtggccaagaccaagaagttcgaggagcacgccgtggaggccctgtggaaggccgtggccgacctgctgcagcccgagagacccctggaggccagacacgccgtgctggccctgctgaaggccatcgtgcagggccagggcgagagactgggcgtgctgagagccctgttcttcaaggtgatcaaggactaccccagcaacgaggacctgcacgagagactggaggtgttcaaggccctgaccgacaacggcagacacatcacctacctggaggaggagctggccgacttcgtgctgcagtggatggacgtgggcctgagcagcgagttcctgctggtgctggtgaacctggtgaagttcaacagctgctacctggacgagtacatcgccagaatggtgcagatgatctgcctgctgtgcgtgagaaccgccagcagcgtggacatcgaggtgagcctgcaggtgctggacgccgtggtgtgctacaactgcctgcccgccgagagcctgcccctgttcatcgtgaccctgtgcagaaccatcaacgtgaaggagctgtgcgagccctgctggaagctgatgagaaacctgctgggcacccacctgggccacagcgccatctacaacatgtgccacctgatggaggacagagcctacatggaggacgcccccctgctgagaggcgccgtgttcttcgtgggcatggccctgtggggcgcccacagactgtacagcctgagaaacagccccaccagcgtgctgcccagcttctaccaggccatggcctgccccaacgaggtggtgagctacgagatcgtgctgagcatcaccagactgatcaagaagtacagaaaggagctgcaggtggtggcctgggacatcctgctgaacatcatcgagagactgctgcagcagctgcagaccctggacagccccgagctgagaaccatcgtgcacgacctgctgaccaccgtggaggagctgtgcgaccagaacgagttccacggcagccaggagagatacttcgagctggtggagagatgcgccgaccagagacccgagagcagcctgctgaacctgatcagctacagagcccagagcatccaccccgccaaggacggctggatccagaacctgcaggccctgatggagagattcttcagaagcgagagcagaggcgccgtgagaatcaaggtgctggacgtgctgagcttcgtgctgctgatcaacagacagttctacgaggaggagctgatcaacagcgtggtgatcagccagctgagccacatccccgaggacaaggaccaccaggtgagaaagctggccacccagctgctggtggacctggccgagggctgccacacccaccacttcaacagcctgctggacatcatcgagaaggtgatggccagaagcctgagccccccccccgagctggaggagagagacgtggccgcctacagcgccagcctggaggacgtgaagaccgccgtgctgggcctgctggtgatcctgcagaccaagctgtacaccctgcccgccagccacgccaccagagtgtacgagatgctggtgagccacatccagctgcactacaagcacagctacaccctgcccatcgccagcagcatcagactgcaggccttcgacttcctgctgctgctgagagccgacagcctgcacagactgggcctgcccaacaaggacggcgtggtgagattcagcccctactgcgtgtgcgactacatggagcccgagagaggcagcgagaagaagaccagcggccccctgagcccccccaccggcccccccggccccgcccccgccggccccgccgtgagactgggcagcgtgccctacagcctgctgttcagagtgctgctgcagtgcctgaagcaggagagcgactggaaggtgctgaagctggtgctgggcagactgcccgagagcctgagatacaaggtgctgatcttcaccagcccctgcagcgtggaccagctgtgcagcgccctgtgcagcatgctgagcggccccaagaccctggagagactgagaggcgcccccgagggcttcagcagaaccgacctgcacctggccgtggtgcccgtgctgaccgccctgatcagctaccacaactacctggacaagaccaagcagagagagatggtgtactgcctggagcagggcctgatccacagatgcgccagccagtgcgtggtggccctgagcatctgcagcgtggagatgcccgacatcatcatcaaggccctgcccgtgctggtggtgaagctgacccacatcagcgccaccgccagcatggccgtgcccctgctggagttcctgagcaccctggccagactgccccacctgtacagaaacttcgccgccgagcagtacgccagcgtgttcgccatcagcctgccctacaccaaccccagcaagttcaaccagtacatcgtgtgcctggcccaccacgtgatcgccatgtggttcatcagatgcagactgcccttcagaaaggacttcgtgcccttcatcaccaagggcctgagaagcaacgtgctgctgagcttcgacgacacccccgagaaggacagcttcagagccagaagcaccagcctgaacgagagacccaagagcctgagaatcgccagaccccccaagcagggcctgaacaacagcccccccgtgaaggagttcaaggagagcagcgccgccgaggccttcagatgcagaagcatcagcgtgagcgagcacgtggtgagaagcagaatccagaccagcctgaccagcgccagcctgggcagcgccgacgagaacagcgtggcccaggccgacgacagcctgaagaacctgcacctggagctgaccgagacctgcctggacatgatggccagatacgtgttcagcaacttcaccgccgtgcccaagagaagccccgtgggcgagttcctgctggccggcggcagaaccaagacctggctggtgggcaacaagctggtgaccgtgaccaccagcgtgggcaccggcaccagaagcctgctgggcctggacagcggcgagctgcagagcggccccgagagcagcagcagccccggcgtgcacgtgagacagaccaaggaggcccccgccaagctggagagccaggccggccagcaggtgagcagaggcgccagagacagagtgagaagcatgagcggcggccacggcctgagagtgggcgccctggacgtgcccgccagccagttcctgggcagcgccaccagccccggccccagaaccgcccccgccgccaagcccgagaaggccagcgccggcaccagagtgcccgtgcaggagaagaccaacctggccgcctacgtgcccctgctgacccagggctgggccgagatcctggtgagaagacccaccggcaacaccagctggctgatgagcctggagaaccccctgagccccttcagcagcgacatcaacaacatgcccctgcaggagctgagcaacgccctgatggccgccgagagattcaaggagcacagagacaccgccctgtacaagagcctgagcgtgcccgccgccagcaccgccaagcccccccccctgcccagaagcaacaccgacagcgccgtggtgatggaggagggcagccccggcgaggtgcccgtgctggtggagccccccggcctggaggacgtggaggccgccctgggcatggacagaagaaccgacgcctacagcagaagcagcagcgtgagcagccaggaggagaagagcctgcacgccgaggagctggtgggcagaggcatccccatcgagagagtggtgagcagcgagggcggcagacccagcgtggacctgagcttccagcccagccagcccctgagcaagagcagcagcagccccgagctgcagaccctgcaggacatcctgggcgaccccggcgacaaggccgacgtgggcagactgagccccgaggtgaaggccagaagccagagcggcaccctggacggcgagagcgccgcctggagcgccagcggcgaggacagcagaggccagcccgagggccccctgcccagcagcagccccagaagccccagcggcctgagacccagaggctacaccatcagcgacagcgcccccagcagaagaggcaagagagtggagagagacgccctgaagagcagagccaccgccagcaacgccgagaaggtgcccggcatcaaccccagcttcgtgttcctgcagctgtaccacagccccttcttcggcgacgagagcaacaagcccatcctgctgcccaacgagagccagagcttcgagagaagcgtgcagctgctggaccagatccccagctacgacacccacaagatcgccgtgctgtacgtgggcgagggccagagcaacagcgagctggccatcctgagcaacgagcacggcagctacagatacaccgagttcctgaccggcctgggcagactgatcgagctgaaggactgccagcccgacaaggtgtacctgggcggcctggacgtgtgcggcgaggacggccagttcacctactgctggcacgacgacatcatgcaggccgtgttccacatcgccaccctgatgcccaccaaggacgtggacaagcacagatgcgacaagaagagacacctgggcaacgacttcgtgagcatcgtgtacaacgacagcggcgaggacttcaagctgggcaccatcaagggccagttcaacttcgtgcacgtgatcgtgacccccctggactacgagtgcaacctggtgagcctgcagtgcagaaaggacatggagggcctggtggacaccagcgtggccaagatcgtgagcgacagaaacctgcccttcgtggccagacagatggccctgcacgccaacatggccagccaggtgcaccacagcagaagcaaccccaccgacatctaccccagcaagtggatcgccagactgagacacatcaagagactgagacagagaatctgcgaggaggccgcctacagcaaccccagcctgcccctggtgcacccccccagccacagcaaggcccccgcccagacccccgccgagcccacccccggctacgaggtgggccagagaaagagactgatcagcagcgtggaggacttcaccgagttcgtgtag

SEQ ID NO: 43035 - DNA, 5355 bp, Artificial Sequence
  derived and/or modified sequence
atggccaagcccacctctaaagactccggactgaaagagaaattcaagatactcctgggtcttggcacccctagacctaatcccagatccgccgagggcaagcagaccgagtttataatcaccgctgaaatcctgcgcgaacttagtatggaatgtggcctgaataacaggatccgaatgatcgggcaaatctgcgaggtggccaagactaagaaatttgaggaacatgccgtcgaagccttgtggaaggccgtcgccgacctcctgcagcccgagagacccctggaggcacgacatgctgtgttggccctgctgaaggcaatcgttcaaggccagggcgagcgactaggcgtactgagggcattattctttaaggtgattaaggactaccctagcaacgaagatttacatgaacgcctcgaggtttttaaggcgcttaccgacaacggccgtcacatcacgtaccttgaagaggaactggctgattttgtcttgcaatggatggacgtgggactgtcgagcgaatttctactggtcctggttaatctcgtgaaatttaactcctgttacttggacgagtatatcgcacgcatggtgcagatgatctgtcttctgtgcgtccgaaccgcatcttccgtagatattgaggtttcactgcaggtactcgatgccgttgtttgttataattgcctgccagcagagagtctgccactgtttatcgtcacactgtgccgcaccattaacgtgaaggagctgtgtgaaccgtgctggaaattaatgcgcaacttgctgggcacgcacttgggccatagcgctatctacaacatgtgccatctaatggaagacagggcctacatggaggatgcgccactcctcaggggagccgtcttctttgtcggtatggccctctggggcgcacaccgactatactctttacggaacagccccacgagtgtgttgcccagcttttaccaggcaatggcttgccccaatgaagtcgtctcctacgagattgtgctaagcatcaccagactgattaagaaatacagaaaggagttgcaggtcgtcgcatgggatattctcctgaatatcatcgagcggttgctacagcagctgcagacgctggactccccggagctgagaactattgtgcacgatcttctgaccaccgtagaggagttgtgcgatcagaatgagttccacggttcccaggaacgctattttgaactggtggaacgctgtgccgatcagcgccctgaaagcagccttctcaacctcataagttacagggcccagtcaatccatccggcaaaagatggatggattcaaaacctgcaggccttgatggaacgtttttttcgtagcgagtccagaggcgctgtgagaatcaaagtgctcgatgtcctgagctttgttctcctcatcaatagacagttctatgaggaagagctaatcaactccgtagtgattagtcagctgagccacattcctgaggataaggaccatcaggtacgcaaactcgcaacacaactgctggtggatctggccgagggctgccacacacatcactttaatagccttctggacattatcgagaaagttatggcaaggtctctttcgccaccacctgaactggaggagcgtgatgtggcggcatacagcgcatcactcgaggacgtaaagacggccgtgctgggtttattagttatcttacagaccaagttgtacaccctccctgcgtcacacgcaacccgggtgtacgaaatgctcgtgtctcatatccagctccattataagcactcttacactctccccatcgccagttctataagactgcaggcttttgacttcctgctacttttgcgagctgactccttacataggcttgggttgcccaacaaagatggagtggtgagattcagcccatactgtgtttgtgactacatggagccagagaggggttcagagaaaaaaacaagcgggccgttatcgcccccaactggccccccagggcccgccccagcaggaccagcggtgagactgggctcagtgccgtattctctgctatttcgagtgctcctccagtgcctgaaacaagaaagtgactggaaagtcctaaagttagttctcggtaggctacccgaatcccttaggtacaaagttctgatctttaccagcccctgtagtgtcgatcaactctgtagcgccctctgttccatgctgagcggtcctaagactctagagcggcttcgcggtgccccagagggctttagtagaactgatcttcacctggctgtcgtacctgtgctgaccgcccttatttcctatcataactacctggacaaaactaaacagcgcgaaatggtgtactgcctggagcaggggttgatccacaggtgtgccagccagtgtgtcgtagccctttctatttgtagcgtcgagatgccagatatcatcatcaaggccttacctgtgctggtcgtgaaattaacccacatttcagcaacggcttccatggcggtcccgcttctagaattcctttccacgctggcccggctcccccacctgtataggaacttcgccgccgagcagtacgccagcgtgttcgccatctcattaccctatacaaatcccagcaaatttaaccaatatatcgtgtgtttagcccaccatgttatagccatgtggttcatcaggtgtcggcttcctttccgaaaggacttcgttccgtttatcacgaagggcctcaggtctaatgttctgttatcgttcgatgataccccagagaaagactcttttcgcgcgcggtctacctccctgaatgaacgccccaagtccctgaggattgctaggccccccaagcaggggcttaataatagcccacctgtgaaggagttcaaagagagctccgcagcagaagctttcaggtgtagatccatctccgtatccgagcatgtcgtccgtagccggattcaaaccagtctgacttccgcatctttaggatccgccgacgaaaatagtgtggctcaggctgacgattcactcaagaacctgcaccttgaacttactgaaacctgcctggatatgatggcgcggtatgttttttccaattttacagccgtccctaagagatcgcccgtgggggaattcctcctggcaggcggcaggacaaagacctggctggtcggaaataagctggtgacggtcaccacttctgtgggcacgggtacgcgcagcctcctcggccttgacagcggggaacttcaatccggccccgagtcatcaagcagccccggtgtgcatgttcgccaaaccaaggaagcaccggctaagctagaatcacaggctggccaacaggtgtccagaggcgctcgggatagagtgcgcagcatgtccggcgggcacggactgagggtaggcgccctcgacgtaccagcctcacagtttctcggctcagccactagtccgggacccagaacggctcccgccgccaagcctgaaaaggcctccgccggtacacgagtacctgtccaggaaaagactaatttagcagcatatgtgccccttctcacacagggttgggctgagatcctggtgcgtcggccaaccggaaatacatcctggctcatgagtctcgaaaacccgctgtcccccttttcttcagacataaataatatgcctcttcaggagctgagtaacgctctaatggcggcggagaggtttaaagagcaccgcgacacagcgttatataagtcactgtcggtgccagcagcgtccacagctaaacccccccctctaccgaggtctaatacagatagcgccgtggtgatggaagagggaagcccaggggaggtcccagtgctggtcgagccccctggtctggaggatgtcgaagccgccctcggaatggacagaagaacggatgcttacagccgcagctcctctgtatccagccaagaggagaagagccttcatgcagaggagctcgtgggccgcgggatcccgatcgagagagtcgtttccagtgagggagggcgcccatctgtggacctgagctttcagcctagccagccactgagtaaatcctccagttccccagaattacagactttacaagatattttgggggatccaggggacaaggctgatgtaggacgtcttagcccagaagtgaaggcgaggtctcaatcaggtaccctggatggggagtcagcagcctggagtgcctccggggaggatagcagaggtcagcccgaggggcctctgccttcatcatcaccacgatctccatctggactacgcccccggggctacacaatctctgattcagccccttcccggcgtggaaaaagagtggagagagacgcactgaagagtagagccacagcatccaatgcggagaaagtgcccggtatcaaccccagcttcgtgttcctccagctgtatcactctcctttcttcggagacgagtcaaataaacccatactgctccccaacgaatcccagtcctttgagaggtcagtacagctgctcgatcagatcccttcatacgacacccacaagattgcggtgctctacgtgggagagggtcaaagcaactcagagctggccatcttgagcaatgaacacggctcttaccgctacactgagtttctgaccgggcttggcaggttgatagagctgaaggattgccagccggacaaagtgtatctcggcggcctcgatgtatgcggggaagatggtcaattcacgtattgctggcacgacgatatcatgcaggcagtgtttcacattgctaccctgatgcctactaaagacgtcgataagcaccgatgcgataagaaacgacatttggggaatgactttgtttccatcgtgtacaatgactcaggagaagactttaagctgggaacgataaaaggccaattcaatttcgtgcacgtgatcgtgacacccctcgactatgaatgtaatctggtgagtctccaatgcagaaaagacatggagggcctcgttgacacttcggttgccaaaatcgtcagtgatcggaacctcccctttgtggctaggcagatggcgttgcacgctaatatggcctcacaagttcaccatagtcggtccaatcccactgacatctatcctagtaaatggatagcccgcctgcggcatattaagcgtcttagacagcgaatctgtgaagaggcagcgtactcgaacccttccctgcccctcgtgcaccctccgagccattccaaggcccccgcccagacacctgccgagccaacgcccggctacgaagtaggccagcgaaagaggctgattagtagcgttgaggatttcacagaattcgtgtag

SEQ ID NO: 43036 - DNA, 5355 bp, Artificial Sequence
  derived and/or modified sequence
atggccaagcccaccagcaaggacagcggcctgaaggagaagttcaagatcctgctgggcctgggcaccccccggcccaaccccaggtctgctgagggcaagcagacagagttcatcatcacagctgagatcctgcgggagctgtccatggagtgtggcctgaacaaccgcatccgcatgattggccagatctgtgaggtggccaagaccaagaagtttgaggagcacgctgtggaggccctgtggaaggctgtggccgacctgctgcagcctgagcggcccctggaggcccggcatgctgtgctggccctgctgaaggccatcgtgcagggccagggcgagcggctgggcgtgctgcgggccctcttcttcaaggtgatcaaggactaccccagcaatgaagacctgcacgagcggctggaggtgttcaaggccctgacagacaatggccgccacatcacctacctggaggaggagctggccgactttgtgctgcagtggatggatgtgggcctgagcagcgagttcctgctggtgctggtgaacctggtgaagttcaacagctgctacctggatgagtacatcgccaggatggtgcagatgatctgcctgctgtgtgtgaggacagccagctctgtggacatcgaggtgtccctgcaggtgctggatgctgtggtgtgctacaactgcctgcctgctgagagcctgcccctcttcatcgtgaccctgtgcaggaccatcaacgtgaaggagctgtgtgagccctgctggaagctgatgaggaacctgctgggcacccacctgggccacagcgccatctacaacatgtgccacctgatggaggaccgggcctacatggaggatgcccccctgctgcggggagctgtgttctttgtgggcatggccctgtggggcgcccaccggctgtacagcctgaggaacagccccacctctgtgctgcccagcttctaccaggccatggcctgccccaatgaggtggtgtcctatgagatcgtgctgagcatcaccaggctcatcaagaagtacaggaaggagctgcaggtggtggcctgggacatcctgctgaacatcatcgagcggctgctgcagcagctgcagaccctggacagccctgagctgcggaccatcgtgcatgacctgctgaccaccgtggaggagctgtgtgaccagaatgagttccacggcagccaggagcgctactttgagctggtggagcgctgtgccgaccagaggcctgagagcagcctgctgaacctgatctcctaccgggcccagagcatccacccagccaaggatggctggatccagaacctgcaggccctgatggagcgcttcttccgctctgagagcagaggagctgtgcgcatcaaggtgctggatgtgctgagctttgtgctgctgatcaaccggcagttctatgaggaggagctgatcaacagcgtggtgatcagccagctgagccacatccctgaggacaaggaccaccaggtgaggaagctggccacccagctgctggtggacctggccgagggctgccacacccaccacttcaacagcctgctggacatcatcgagaaggtgatggcccggagcctgagccccccacctgagctggaggagagagatgtggccgcctacagcgccagcctggaggatgtgaagacagctgtgctgggcctgctggtgatcctgcagaccaagctgtacaccctgcctgccagccacgccaccagggtgtatgagatgctggtgagccacatccagctgcactacaagcacagctacaccctgcccatcgccagcagcatccggctgcaggcctttgacttcctgctgctgctgcgggctgacagcctgcaccggctgggcctgcccaacaaggatggagtggtgcgcttcagcccctactgtgtgtgtgactacatggagcctgagcggggcagcgagaagaagaccagcggccccctgagccccccaactggacctcctggccctgccccagctggccctgctgtgcggctgggctctgtgccctacagcctgctcttccgggtgctgctgcagtgcctgaagcaggagagtgactggaaggtgctgaagctggtgctgggccgcctgcctgagagcctgcgctacaaggtgctgatcttcaccagcccctgcagcgtggaccagctgtgcagcgccctgtgcagcatgctgagcggccccaagaccctggagcggctgcggggggcccctgagggcttcagcaggacagacctgcacctggccgtggtgcctgtgctgacagccctgatctcctaccacaactacctggacaagaccaagcagcgggagatggtgtactgcctggagcagggcctcatccaccgctgtgccagccagtgtgtggtggccctgagcatctgcagcgtggagatgccagacatcatcatcaaggccctgcctgtgctggtggtgaagctgacccacatcagcgccacagcctccatggctgtgcccctgctggagttcctgagcaccctggcccggctgccccacctgtacagaaactttgctgctgagcagtatgcctctgtgtttgccatcagcctgccctacaccaaccccagcaagttcaaccagtacatcgtgtgcctggcccaccacgtgattgccatgtggttcatccgctgccgcctgcccttcaggaaggactttgtgcccttcatcaccaagggcctgcggagcaatgtgctgctgagctttgatgacaccccagagaaggacagcttccgggcccggagcaccagcctgaatgaaagacccaagagcctgagaattgcccggccccccaagcagggcctgaacaacagcccccctgtgaaggagttcaaggagagcagcgctgctgaggccttccgctgccgcagcatctctgtgtctgaacatgtggtgcgcagccgcatccagaccagcctgaccagcgccagcctgggcagcgcagatgaaaattctgtggcccaggctgatgacagcctgaagaacctgcacctggagctgacagagacctgcctggacatgatggcccgctacgtgttcagcaacttcaccgctgtgcccaagaggagccctgtgggggagttcctgctggccggcggccgcaccaagacctggctggtgggcaacaagctggtgacagtgaccacctctgtgggcaccggcaccaggagcctgctgggcctggacagcggggagctgcagagcggccctgagagcagcagcagccctggggtgcacgtgcggcagaccaaggaggccccagccaagctggagagccaggccggccagcaggtgtccagaggagcccgggacagagtgcgctccatgtctgggggccacggcctgcgggtgggcgccctggatgtgcctgccagccagttcctgggcagcgccaccagccctggccccaggacagccccagctgccaagccagagaaggccagcgctggcaccagggtgcctgtgcaggagaagaccaacctggccgcctacgtgcccctgctgacccagggctgggccgagatcctggtgcggcggcccactggaaacacctcctggctgatgagcctggagaaccccctgagccccttcagcagtgacatcaacaacatgcccctgcaggagctgagcaatgccctgatggctgctgagcgcttcaaggagcaccgggacacagccctgtacaagagcctgtctgtgcctgctgccagcacagccaagcccccacccctgcccaggagcaacacagattctgctgtggtgatggaggagggcagccctggagaggtgcctgtgctggtggagcccccaggcctggaggatgtggaggccgccctgggcatggacagaagaacagatgcctacagccgcagcagctctgtgagcagccaggaggagaagagcctgcacgccgaggagctggtgggccggggcatccccatcgagcgggtggtgagcagcgagggcggccggcccagcgtggacctgtccttccagcccagccagcccctgagcaagagcagcagcagccctgagctgcagaccctgcaggacatcctgggggaccccggggacaaggcagatgtgggccgcctgagccctgaggtgaaggcccggagccagagcggcaccctggatggagagagcgctgcctggagcgccagcggggaggacagccggggccagcctgagggccccctgcccagcagcagccccaggagccccagcggcctgcggccccggggctacaccatcagtgacagcgcccccagcagaagaggcaagagggtggagagagatgccctgaagagccgggccacagccagcaatgctgagaaggtgcccggcatcaaccccagctttgtgttcctgcagctgtaccacagccccttctttggagatgagagcaacaagcccatcctgctgcccaatgaaagccagagctttgagaggtctgtgcagctgctggaccagatccccagctatgacacccacaagattgctgtgctgtatgtgggggagggccagagcaacagcgagctggccatcctgagcaatgaacatggcagctaccgctacacagagttcctgaccggcctgggccgcctgattgagctgaaggactgccagcctgacaaggtgtacctgggcggcctggatgtgtgtggagaagatggccagttcacctactgctggcatgatgacatcatgcaggccgtgttccacatcgccaccctgatgcccaccaaggatgtggacaagcaccgctgtgacaagaagaggcacctgggcaatgactttgtgtccatcgtgtacaatgacagcggggaggacttcaagctgggcaccatcaagggccagttcaactttgtgcacgtgattgtgacccccctggactatgagtgcaacctggtgtccctgcagtgcaggaaggacatggagggcctggtggacacctctgtggccaagatcgtgtctgacaggaacctgccctttgtggcccggcagatggccctgcacgccaacatggccagccaggtgcaccacagccgcagcaaccccacagacatctaccccagcaagtggatcgcccggctgcggcacatcaagaggctgcggcagaggatctgtgaggaggccgcctacagcaaccccagcctgcccctggtgcacccccccagccacagcaaggccccagcccagaccccagctgagcccaccccaggctatgaggtgggccagaggaagaggctcatcagctctgtggaggacttcacagaatttgtgtag

SEQ ID NO: 43037 - DNA, 5355 bp, Artificial Sequence
  derived and/or modified sequence
atggccaagcccaccagcaaggacagcggcctgaaggagaagttcaaaatattactcgggttgggaaccccacgtcctaatccccgctcagccgaggggaagcagactgagttcattatcaccgccgaaatcttgcgcgaactcagcatggaatgcggcttaaataatcggattcggatgatcggccagatttgcgaggtagccaaaactaaaaagtttgaggagcacgccgtcgaagctctgtggaaggccgtcgccgatctactccaacccgagcgtcctttagaagcaagacacgctgtgttggcccttctaaaggcaatcgtccagggacagggcgagcgcctgggggtgctgcgggccctgttctttaaagttatcaaagattacccctccaacgaggatctgcatgagaggctggaggtattcaaggcactgaccgacaacggacgccatatcacctacctggaagaggagcttgccgacttcgtgcttcagtggatggacgtgggactgtcatccgaatttttgctcgtgctggtgaatctggtgaaattcaatagttgctatctggacgaatatatcgcccggatggtgcagatgatctgccttctgtgtgtgaggacagcttcaagtgtcgacatcgaggtttcactgcaggtccttgatgctgtggtgtgttataactgtcttcccgcggagtctctgcctttgttcatcgtcaccttgtgccgtacaattaatgtgaaggaactttgcgaaccctgctggaagcttatgagaaatttactcggcacccacttgggacactccgccatctacaacatgtgtcatctcatggaagatcgggcttacatggaggacgcacccctgttaagaggagctgtgttcttcgtcggcatggccctttggggagcccaccggctctatagtttgcgcaactctcccacctcagtcctcccatccttctaccaggctatggcatgcccaaatgaagtcgtgtcgtacgagattgttctctctatcaccagactgatcaaaaagtatagaaaggaactccaagtggtggcttgggacattctgctgaacattatcgagagactcctgcagcaactacaaaccttggattccccagagctgaggaccatcgtgcacgacttgctgaccactgtagaggagctatgtgatcaaaatgaattccacggctcccaagagcggtactttgagctcgtcgagcgttgcgccgaccagagacctgagagctctctgttaaatctgattagctacagagcccaatcaatccacccagcgaaggatgggtggatccaaaacctgcaggccctcatggaaaggtttttccgttcggagtccaggggcgcagtgaggattaaagtattggacgtcctgtctttcgtgctcctgattaaccgtcagttctacgaagaggagctgattaactccgtcgtaattagccagttgtctcacattccggaagataaggatcaccaagtacggaagctagcaacccagctcttggtcgatctcgctgagggttgccacactcatcactttaatagtctccttgatatcatcgaaaaggtgatggcgcgatccctttctccgcctcccgaactggaggaaagggacgtcgccgcctacagcgcatcacttgaagacgtcaaaactgcagtcctggggcttcttgtaattctccagactaagctgtacacgctgcctgcttcgcacgctacgagagtgtacgaaatgttggtatcccacattcagctccactataaacattcctatacgctgcccattgcctcctcaattcgactgcaggctttcgattttctgctgctcctgagagctgactctctccacaggctcgggttgccaaataaggatggcgtcgtccggttcagtccctattgcgtttgcgactacatggagcctgaaaggggttctgagaaaaagaccagcggacccttgtctccacctactgggcccccgggaccagcacctgcgggacccgctgtgcggcttggaagtgtcccatactccctgctctttcgcgtcctgctccagtgtctaaaacaagaatctgattggaaagtcctaaaactagtgctgggacggttacccgagtctctccgctataaggtgctgatcttcaccagcccttgttcggtggatcaactttgtagcgccctgtgcagcatgttgtctggacccaaaaccctggagcgtctgaggggcgcccccgaaggattttccaggacggatctgcacttagctgttgtgccagtccttacagccctgattagttatcacaattacttggacaaaacaaagcagcgagagatggtatattgtctcgagcaggggctcattcacagatgtgcaagccagtgcgttgtggctctgagtatctgctcagtagagatgccagacattataatcaaagccttgcctgtgttggtagtgaagctgacccacatcagcgccacagcatcgatggccgtgcccctgctcgaattccttagcaccctcgctcgattaccccatctctacagaaactttgcggctgagcaatatgccagtgtgttcgccatcagcctcccatacaccaacccctccaaatttaatcagtacattgtatgtcttgctcaccacgtcatcgccatgtggttcatccggtgtcgtcttccttttaggaaggacttcgtgccctttataactaagggcctgcgtagcaatgttctgctgtcttttgacgatacacctgagaaggactcctttcgtgcccgatctacatccctgaatgagagacccaaatctttgcgcattgcccgccccccgaaacaaggcctgaacaactctcctccggtcaaagaatttaaggagtctagcgccgctgaggcttttcgatgccgcagcattagcgttagtgaacatgtcgtgaggtctaggatccagacatctttaacgagcgcttctctcggatcggcagatgaaaacagcgtcgcacaggccgacgatagtctgaaaaacctgcatctcgagctgactgagacatgcttagacatgatggccagatatgtctttagcaactttacagccgtccctaaacgcagtcccgtgggtgaatttctcctggctggcggccgtaccaaaacctggcttgtcggaaataaactggtcaccgtcacaacctctgtcgggacagggacaagatcactccttggattggactcaggagagctgcagagcgggccagagagcagttcgagcccaggcgtgcatgtgcgccagacaaaagaagcccccgccaagctggaaagtcaggccggccagcaggttagtcgtggtgcccgggaccgcgtacgatctatgtctggtgggcacgggctccgagtgggcgctctcgacgtgccagcatcccagttcctcggtagtgccacctccccaggacctagaactgcaccagcagcgaaacccgagaaagcgagtgcgggcacccgggtgcccgtccaggaaaaaaccaatctcgcggcttatgtacccctgctgacccagggctgggcggaaatcctggttagaaggccaaccggcaatacttcttggctcatgagtctggagaacccgctcagcccattttcctcagacatcaacaacatgccactccaagagctctcgaacgcgctgatggctgcagaaaggttcaaagagcatagggacacagcactctataaatctctcagcgtgccagccgctagtacggccaaacctccgcctctgccacgatctaataccgattctgccgtggtgatggaagagggctcgcccggcgaagttcctgttttggtagagcctcctgggctggaggatgtcgaagccgccctggggatggaccgtagaaccgacgcttacagcagaagctcttcggtgtctagccaggaggagaaaagccttcacgcagaggaactggtaggccgaggaattcccatagagagagtggtttctagcgaggggggccgtccttcagttgacctgtccttccagccgtcccagccactctccaagtcttcaagttccccggagctgcagactcttcaggacattttgggggaccctggagataaggccgatgtcggccgactctcccccgaagtaaaggccagaagccagtctggcacactggacggagagtctgccgcctggtcggcgtcaggcgaggattccaggggtcagccagaaggtcctttgccatctagctcccctcggtctccaagcggactccggcctagggggtacaccattagcgactcggctccttctagaaggggtaagagggtcgagcgcgatgctctcaagagtagggctacggcttctaacgctgaaaaggtgcctggcatcaacccctccttcgtctttctccagctctatcactcccccttcttcggcgacgaatccaataaacccatcttgctaccgaacgagtcacagagcttcgagagatccgttcagttgctggaccagattccctcatacgacacccacaagattgcagttctgtatgttggcgagggccaaagcaactcagagctggcaatcctgtcaaatgagcacggcagctaccgctacactgagttcctgaccggcctcggacgtctaatcgaattaaaagactgccagcccgataaggtgtacttgggaggtctggacgtttgcggagaagatggccagttcacatactgctggcatgacgacattatgcaggccgtatttcatatcgccaccctcatgcccaccaaagatgttgacaagcacaggtgcgataagaagcggcacttaggtaacgacttcgtgtccattgtgtacaacgacagcggtgaggattttaagcttggcacaatcaaggggcaatttaatttcgtccatgttatagtgaccccgttagattatgagtgcaatctggtgagcctgcagtgccgcaaagacatggaaggcctggtggatactagcgtcgcaaagatagtcagcgaccggaatctgccattcgtcgcgaggcagatggcactgcatgccaatatggcttcacaggtgcaccactctagaagtaaccctacggatatttacccaagtaagtggattgcccggctgcgccacatcaagagactgagacaaagaatttgcgaagaggctgcatactctaaccccagtctgcctttggtacaccctccatcccacagtaaagcacccgcgcagactcctgcagaacccacacccggttatgaagtggggcagcgaaagcgactgatctcgtctgtcgaagattttaccgaattcgtgtag

SEQ ID NO: 43038 - DNA, 5354 bp, Artificial Sequence
  derived and/or modified sequence
atggcaaagcctacctccaaagactccggactgaaagagaagttcaaaatactgctgggcttaggaacccccaggccaaaccccaggagcgccgaggggaaacaaacagaatttatcattactgcggagatcctgcgagagctgagcatggagtgcggactcaataatcgcatccggatgatagggcaaatttgcgaggtggccaagactaaaaaatttgaagagcacgccgtcgaggccttgtggaaggccgttgctgacctgcttcagcccgaacgaccccttgaggctcggcatgccgttttggctcttttaaaggcaatcgtgcagggccagggagagagattgggtgtgttgcgcgctctgttcttcaaggtgatcaaagactaccctagcaacgaggacttgcacgagcgattggaggttttcaaagcactgacagacaatggaagacatattacctacctcgaggaggaacttgcggactttgtgctccagtggatggatgtgggcctttctagcgagtttcttctggtcctagtgaacctggttaagtttaactcctgctacctcgacgaatacatcgccagaatggtccaaatgatatgcctgctgtgtgtgcggaccgctagtagcgtggatatcgaagtttcactgcaagtcctggatgcagttgtttgttataactgtctgcccgctgaaagtttgccactgtttatagttactctgtgccgtacaatcaatgtcaaggaactgtgcgagccttgttggaaactgatgcggaacctcctcggcacccacctcgggcactctgccatctacaacatgtgtcacctgatggaggatagggcgtacatggaagacgccccactgctcaggggggctgtcttcttcgtgggcatggccctttggggtgctcaccgcctctattctctccgcaatagcccaaccagtgtgctcccaagcttctaccaagccatggcatgtcccaatgaggtggtgtcatacgagatagtgctaagcattactagattaattaagaagtaccgaaaagagctgcaggtagttgcatgggatatcctgctgaacataattgaaagacttctccagcagctgcaaacattggattcaccagagcttcgcacgatcgtgcatgacctgttaacgacagtagaggaattatgtgaccaaaacgagtttcacgggtcacaggagcggtattttgaactggtagagcgctgcgctgaccagcggcctgagagcagccttctgaacctgatcagctatcgtgcccaatccattcacccggcaaaggacgggtggatccagaatcttcaggctttaatggagcgcttctttagatccgaaagccggggtgctgtaagaattaaggttctcgacgtgttgtcatttgtgcttctgattaataggcagttctatgaagaggagctgataaatagtgtcgtaatatcccagcttagccacatacctgaggacaaggaccatcaggttcgtaaattggctacacagctactcgtggacctcgccgaagggtgtcatacccatcacttcaattctctactcgatatcattgaaaaggtgatggcacgctctctctcaccgccacccgaacttgaggagagagacgtcgccgcttactcagcatccctggaggacgtcaaaaccgcagtgctgggactgcttgtcatcttacagacaaaattgtacacactgcctgcttcacacgccacaagggtgtacgaaatgctcgtgagccacattcagctgcactacaagcactcatacacattgcctattgctagcagcatccgcctacaagcattcgactttttgttgctgctgcgcgcagacagcctccataggctgggtttaccaaacaaagacggagtagtgcggtttagcccatactgtgtgtgtgattatatggagcccgagcgtgggtctgagaaaaaaacttccgggccactgagcccccctacaggacctcctggacccgcacctgccggacctgcggttaggctcggcagcgtgccttacagtcttctgttcagggtgttactacagtgcctgaagcaggaaagcgattggaaagtgctgaaacttgtactaggtcggctgccggaatccctgcggtataaggtcctcatcttcacatccccctgttccgtggaccagctttgctccgctttatgttcaatgttaagcggtccgaagacgctggagcgcctacgcggagctcccgagggcttctcccggaccgacttgcacctcgcagtcgtccccgtgctgacagctctgatctcataccataactatttggataagacaaagcagcgggaaatggtttattgtctggagcagggattgatacacaggtgcgcctcccagtgtgtcgttgccttgtcaatttgtagcgtggaaatgccagacatcattatcaaagccctgccggtgttagttgttaagctgacgcacatttctgctaccgctagcatggccgtacctctgcttgagtttctctcaaccttagcccgtctgccccacctgtaccgtaatttcgccgctgagcaatacgcatccgtcttcgccatttccctgccctatactaatccttccaaatttaaccagtatattgtctgcctcgcccaccatgtcattgcgatgtggttcattaggtgccgcctcccctttcgaaaggactttgtaccatttataacaaagggcctgcggtccaacgtcttgttgtctttcgacgatactccagagaaagatagttttagggcacgcagcacttccctcaatgagcgtccaaagtcactgaggatagctcggcctcctaagcaaggtctgaacaattcaccacctgtcaaggaattcaaggagtcaagcgccgctgaggcattcaggtgtcgctctatcagcgtgtctgaacacgttgttaggtcccgcatccaaacatctctgacaagcgctagtttaggatccgctgatgaaaattcggtggcccaagcagacgattcacttaagaacctgcaccttgaactcacagagacatgcctggatatgatggctcgctatgttttttcaaactttactgcagtgccaaaacggagcccagtgggagaattcctcttggccggaggcagaaccaagacctggttggttggtaataaactggtcaccgtcacaactagcgttggtactggcacccgctctctacttggcctggactcgggtgagcttcagtccggcccagagagcagctcgagccctggggttcatgttaggcagacaaaggaggccccagccaaattggagtcacaggccggtcaacaggtttcacgtggagcccgagaccgggttcgcagtatgtctggcggtcatggccttcgggtcggcgcactagatgttcccgcatcacagtttttggggagcgcaacaagtcccggtcctcgtacagcacctgccgctaaacctgagaaggccagcgcgggaacaagagtgcccgtccaagaaaagaccaacctggctgcctacgtgccactactcacccagggatgggccgaaatactggtgcgtaggcccaccggcaacacctcctggctaatgtctctcgagaatcctctttcacccttcagttcggacattaataatatgccccttcaggagctgagtaacgctctgatggccgcagagaggtttaaagaacacagggatactgcactgtacaaaagtctgtctgtccccgctgcgagtactgccaagccgcctcctttgccgaggtcgaacactgacagtgctgtagttatggaagaaggttccccgggtgaggtacccgtccttgtggagccaccgggactggaagatgtagaggctgccctcgggatggatcggaggactgatgcttatagccgttcttcctcggtgtccagccaggaggagaaaagcctgcatgctgaggagctggtgggacgcggtattcctatcgaacgagttgtatccagcgaaggcggtcggccttccgtagaccttagctttcaaccatctcagccactgtcaaagagctcgtctagccctgaactgcaaactctccaggacatcctgggcgatccgggagataaggctgacgtggggaggctgtcccccgaggtcaaagccaggagtcagtcaggcacactggacggagagtctgccgcatggagtgcctccggggaagacagtaggggacagccagaaggcccacttccatcttccagccccagatcaccaagcgggctgaggcctaggggctataccatttcggacagtgcacctagcaggcgaggcaagagagtagagcgggacgccctgaagtccagagcaactgcatctaacgctgagaaagtgcccggaataaatccatctttcgtgtttttacaactttatcattccccgtttttcggtgacgagtccaacaagcccatcttgctgcctaacgaatctcagagcttcgaaaggagcgtacagctcctggaccagataccgagctacgacacccataagattgcagtgctgtatgttggagaaggtcagtcaaacagtgagctggcaatattgtcgaatgagcacggctcataccgatacacagaattcctcacaggcctagggagacttattgaactgaaagactgtcagcctgataaagtgtacttgggcggactcgacgtgtgcggcgaggacggccagttcacgtattgttggcatgacgacattatgcaggccgtgtttcacatcgcaacactcatgcccaccaaagatgtcgacaagcaccgatgtgacaagaaacgacacctcggaaatgactttgtatctatcgtgtacaacgattcgggcgaagacttcaagttggggaccattaaggggcagtttaacttcgtgcatgttatcgtcacacctttggattacgaatgcaatttggtcagcctgcagtgcagaaaggatatggaagggcttgtggacacatcggtggcaaagatcgttagcgatagaaacctgcctttcgtcgcgaggcagatggctcttcacgcaaatatggccagtcaggtacaccactctagatccaatccgactgacatttacccgagcaaatggattgctcggttacgacacattaagcggcttaggcagagaatttgcgaggaagcagcttattccaatccctctctacctctcgtccacccccctagtcatagcaaggcgccagcccagacaccggctgagccaactccgggttacgaagtggggcagagaaaaaggcttatctcgtcagtggaggatttcacagagttcgtgta

SEQ ID NO: 43039 - DNA, 5532 bp, Artificial Sequence
  derived and/or modified sequence
ctttctccgcgtcggggcggcccggagcgcggtggcgcggcgcgggaggggttttctggtgcgtcctggtccaccatggccaaaccaacaagcaaagattcaggcttgaaggagaagtttaagattctgttgggactgggaacaccgaggccaaatcccaggtctgcagagggtaaacagacggagtttatcatcaccgcggaaatactgagagaactgagcatggaatgtggcctcaacaatcgcatccggatgatagggcagatttgtgaagtcgcaaaaaccaagaaatttgaagagcacgcagtggaagcactctggaaggcggtcgcggatctgttgcagccggagcggccgctggaggcccggcacgcggtgctggctctgctgaaggccatcgtgcaggggcagggcgagcgtttgggggtcctcagagccctcttctttaaggtcatcaaggattacccttccaacgaagaccttcacgaaaggctggaggttttcaaggccctcacagacaatgggagacacatcacctacttggaggaagagctggctgactttgtcctgcagtggatggatgttggcttgtcctcggaattccttctggtgctggtgaacttggtcaaattcaatagctgttacctcgacgagtacatcgcaaggatggttcagatgatctgtctgctgtgcgtccggaccgcgtcctctgtggacatagaggtctccctgcaggtgctggacgccgtggtctgctacaactgcctgccggctgagagcctcccgctgttcatcgttaccctctgtcgcaccatcaacgtcaaggagctctgcgagccttgctggaagctgatgcggaacctccttggcacccacctgggccacagcgccatctacaacatgtgccacctcatggaggacagagcctacatggaggacgcgcccctgctgagaggagccgtgttttttgtgggcatggctctctggggagcccaccggctctattctctcaggaactcgccgacatctgtgttgccatcattttaccaggccatggcatgtccgaacgaggtggtgtcctatgagatcgtcctgtccatcaccaggctcatcaagaagtataggaaggagctccaggtggtggcgtgggacattctgctgaacatcatcgaacggctccttcagcagctccagaccttggacagcccggagctcaggaccatcgtccatgacctgttgaccacggtggaggagctgtgtgaccagaacgagttccacgggtctcaggagagatactttgaactggtggagagatgtgcggaccagaggcctgagtcctccctcctgaacctgatctcctatagagcgcagtccatccacccggccaaggacggctggattcagaacctgcaggcgctgatggagagattcttcaggagcgagtcccgaggcgccgtgcgcatcaaggtgctggacgtgctgtcctttgtgctgctcatcaacaggcagttctatgaggaggagctgattaactcagtggtcatctcgcagctctcccacatccccgaggataaagaccaccaggtccgaaagctggccacccagttgctggtggacctggcagagggctgccacacacaccacttcaacagcctgctggacatcatcgagaaggtgatggcccgctccctctccccacccccggagctggaagaaagggatgtggccgcatactcggcctccttggaggatgtgaagacagccgtcctggggcttctggtcatccttcagaccaagctgtacaccctgcctgcaagccacgccacgcgtgtgtatgagatgctggtcagccacattcagctccactacaagcacagctacaccctgccaatcgcgagcagcatccggctgcaggcctttgacttcctgttgctgctgcgggccgactcactgcaccgcctgggcctgcccaacaaggatggagtcgtgcggttcagcccctactgcgtctgcgactacatggagccagagagaggctctgagaagaagaccagcggccccctttctcctcccacagggcctcctggcccggcgcctgcaggccccgccgtgcggctggggtccgtgccctactccctgctcttccgcgtcctgctgcagtgcttgaagcaggagtctgactggaaggtgctgaagctggttctgggcaggctgcctgagtccctgcgctataaagtgctcatctttacttccccttgcagtgtggaccagctgtgctctgctctctgctccatgctttcaggcccaaagacactggagcggctccgaggcgccccagaaggcttctccagaactgacttgcacctggccgtggttccagtgctgacagcattaatctcttaccataactacctggacaaaaccaaacagcgcgagatggtctactgcctggagcagggcctcatccaccgctgtgccagccagtgcgtcgtggccttgtccatctgcagcgtggagatgcctgacatcatcatcaaggcgctgcctgttctggtggtgaagctcacgcacatctcagccacagccagcatggccgtcccactgctggagttcctgtccactctggccaggctgccgcacctctacaggaactttgccgcggagcagtatgccagtgtgttcgccatctccctgccgtacaccaacccctccaagtttaatcagtacatcgtgtgtctggcccatcacgtcatagccatgtggttcatcaggtgccgcctgcccttccggaaggattttgtccctttcatcactaagggcctgcggtccaatgtcctcttgtcttttgatgacacccccgagaaggacagcttcagggcccggagtactagtctcaacgagagacccaagagtctgaggatagccagaccccccaaacaaggcttgaataactctccacccgtgaaagaattcaaggagagctctgcagccgaggccttccggtgccgcagcatcagtgtgtctgaacatgtggtccgcagcaggatacagacgtccctcaccagtgccagcttggggtctgcagatgagaactccgtggcccaggctgacgatagcctgaaaaacctccacctggagctcacggaaacctgtctggacatgatggctcgatacgtcttctccaacttcacggctgtcccgaagaggtctcctgtgggcgagttcctcctagcgggtggcaggaccaaaacctggctggttgggaacaagcttgtcactgtgacgacaagcgtgggaaccgggacccggtcgttactaggcctggactcgggggagctgcagtccggcccggagtcgagctccagccccggggtgcatgtgagacagaccaaggaggcgccggccaagctggagtcccaggctgggcagcaggtgtcccgtggggcccgggatcgggtccgttccatgtcggggggccatggtcttcgagttggcgccctggacgtgccggcctcccagttcctgggcagtgccacttctccaggaccacggactgcaccagccgcgaaacctgagaaggcctcagctggcacccgggttcctgtgcaggagaagacgaacctggcggcctatgtgcccctgctgacccagggctgggcggagatcctggtccggaggcccacagggaacaccagctggctgatgagcctggagaacccgctcagccctttctcctcggacatcaacaacatgcccctgcaggagctgtctaacgccctcatggcggctgagcgcttcaaggagcaccgggacacagccctgtacaagtcactgtcggtgccggcagccagcacggccaaaccccctcctctgcctcgctccaacacagactccgccgtggtcatggaggagggaagtccgggcgaggttcctgtgctggtggagcccccagggttggaggacgttgaggcagcgctaggcatggacaggcgcacggatgcctacagcaggtcgtcctcagtctccagccaggaggagaagtcgctccacgcggaggagctggttggcaggggcatccccatcgagcgagtcgtctcctcggagggtggccggccctctgtggacctctccttccagccctcgcagcccctgagcaagtccagctcctctcccgagctgcagactctgcaggacatcctcggggaccctggggacaaggccgacgtgggccggctgagccctgaggttaaggcccggtcacagtcagggaccctggacggggaaagtgctgcctggtcggcctcgggcgaagacagtcggggccagcccgagggtcccttgccttccagctccccccgctcgcccagtggcctccggccccgaggttacaccatctccgactcggccccatcacgcaggggcaagagagtagagagggacgccttaaagagcagagccacagcctccaatgcagagaaagtgccaggcatcaaccccagtttcgtgttcctgcagctctaccattcccccttctttggcgacgagtcaaacaagccaatcctgctgcccaatgagtcacagtcctttgagcggtcggtgcagctcctcgaccagatcccatcatacgacacccacaagatcgccgtcctgtatgttggagaaggccagagcaacagcgagctcgccatcctgtccaatgagcatggctcctacaggtacacggagttcctgacgggcctgggccggctcatcgagctgaaggactgccagccggacaaggtgtacctgggaggcctggacgtgtgtggtgaggacggccagttcacctactgctggcacgatgacatcatgcaagccgtcttccacatcgccaccctgatgcccaccaaggacgtggacaagcaccgctgcgacaagaagcgccacctgggcaacgactttgtgtccattgtctacaatgactccggtgaggacttcaagcttggcaccatcaagggccagttcaactttgtccacgtgatcgtcaccccgctggactacgagtgcaacctggtgtccctgcagtgcaggaaagacatggagggccttgtggacaccagcgtggccaagatcgtgtctgaccgcaacctgcccttcgtggcccgccagatggccctgcacgcaaatatggcctcacaggtgcatcatagccgctccaaccccaccgatatctacccctccaagtggattgcccggctccgccacatcaagcggctccgccagcggatctgcgaggaagccgcctactccaaccccagcctacctctggtgcaccctccgtcccatagcaaagcccctgcacagactccagccgagcccacacctggctatgaggtgggccagcggaagcgcctcatctcctcggtggaggacttcaccgagtttgtgtgaggccggggccctccctcctgcactggccttggacggtattgcctgtcagtgaaataaataaagtcctgaccccagtgcacagacatagaggcacagattgca

SEQ ID NO: 43040 - protein, 418 aa, Artificial Sequence
  derived and/or modified sequence
MMYRTVGFGTRSRNLKPWMIAVLIVLSLTVVAVTIGLLVHFLVFDQKKEYYHGSFKILDPQINNNFGQSNTYQLKDLRETTENLVDEIFIDSAWKKNYIKNQVVRLTPEEDGVKVDVIMVFQFPSTEQRAVREKKIQSILNQKIRNLRALPINASSVQVNAMSSSTGELTVQASCGKRVVPLNVNRIASGVIAPKAAWPWQASLQYDNIHQCGATLISNTWLVTAAHCFQKYKNPHQWTVSFGTKINPPLMKRNVRRFIIHEKYRSAAREYDIAVVQVSSRVTFSDDIRQICLPEASASFQPNLTVHITGFGALYYGGESQNDLREARVKIISDDVCKQPQVYGNDIKPGMFCAGYMEGIYDACRGDSGGPLVTRDLKDTWYLIGIVSWGDNCGQKDKPGVYTQVTYYRNWIASKTGI

SEQ ID NO: 43041 - protein, 417 aa, Artificial Sequence
  derived and/or modified sequence
MYRTVGFGTRSRNLKPWMIAVLIVLSLTVVAVTIGLLVHFLVFDQKKEYYHGSFKILDPQINNNFGQSNTYQLKDLRETTENLVDEIFIDSAWKKNYIKNQVVRLTPEEDGVKVDVIMVFQFPSTEQRAVREKKIQSILNQKIRNLRALPINASSVQVNAMSSSTGELTVQASCGKRVVPLNVNRIASGVIAPKAAWPWQASLQYDNIHQCGATLISNTWLVTAAHCFQKYKNPHQWTVSFGTKINPPLMKRNVRRFIIHEKYRSAAREYDIAVVQVSSRVTFSDDIRQICLPEASASFQPNLTVHITGFGALYYGGESQNDLREARVKIISDDVCKQPQVYGNDIKPGMFCAGYMEGIYDACRGDSGGPLVTRDLKDTWYLIGIVSWGDNCGQKDKPGVYTQVTYYRNWIASKTGI

SEQ ID NO: 43042 - DNA, 1257 bp, Artificial Sequence
  derived and/or modified sequence
atgatgtacagaaccgtgggcttcggcaccagaagcagaaacctgaagccctggatgatcgccgtgctgatcgtgctgagcctgaccgtggtggccgtgaccatcggcctgctggtgcacttcctggtgttcgaccagaagaaggagtactaccacggcagcttcaagatcctggacccccagatcaacaacaacttcggccagagcaacacctaccagctgaaggacctgagagagaccaccgagaacctggtggacgagatcttcatcgacagcgcctggaagaagaactacatcaagaaccaggtggtgagactgacccccgaggaggacggcgtgaaggtggacgtgatcatggtgttccagttccccagcaccgagcagagagccgtgagagagaagaagatccagagcatcctgaaccagaagatcagaaacctgagagccctgcccatcaacgccagcagcgtgcaggtgaacgccatgagcagcagcaccggcgagctgaccgtgcaggccagctgcggcaagagagtggtgcccctgaacgtgaacagaatcgccagcggcgtgatcgcccccaaggccgcctggccctggcaggccagcctgcagtacgacaacatccaccagtgcggcgccaccctgatcagcaacacctggctggtgaccgccgcccactgcttccagaagtacaagaacccccaccagtggaccgtgagcttcggcaccaagatcaacccccccctgatgaagagaaacgtgagaagattcatcatccacgagaagtacagaagcgccgccagagagtacgacatcgccgtggtgcaggtgagcagcagagtgaccttcagcgacgacatcagacagatctgcctgcccgaggccagcgccagcttccagcccaacctgaccgtgcacatcaccggcttcggcgccctgtactacggcggcgagagccagaacgacctgagagaggccagagtgaagatcatcagcgacgacgtgtgcaagcagccccaggtgtacggcaacgacatcaagcccggcatgttctgcgccggctacatggagggcatctacgacgcctgcagaggcgacagcggcggccccctggtgaccagagacctgaaggacacctggtacctgatcggcatcgtgagctggggcgacaactgcggccagaaggacaagcccggcgtgtacacccaggtgacctactacagaaactggatcgccagcaagaccggcatctag

SEQ ID NO: 43043 - DNA, 1254 bp, Artificial Sequence
  derived and/or modified sequence
atgtacagaaccgtgggcttcggcaccagaagcagaaacctgaagccctggatgatcgccgtgctgatcgtgctgagcctgaccgtggtggccgtgaccatcggcctgctggtgcacttcctggtgttcgaccagaagaaggagtactaccacggcagcttcaagatcctggacccccagatcaacaacaacttcggccagagcaacacctaccagctgaaggacctgagagagaccaccgagaacctggtggacgagatcttcatcgacagcgcctggaagaagaactacatcaagaaccaggtggtgagactgacccccgaggaggacggcgtgaaggtggacgtgatcatggtgttccagttccccagcaccgagcagagagccgtgagagagaagaagatccagagcatcctgaaccagaagatcagaaacctgagagccctgcccatcaacgccagcagcgtgcaggtgaacgccatgagcagcagcaccggcgagctgaccgtgcaggccagctgcggcaagagagtggtgcccctgaacgtgaacagaatcgccagcggcgtgatcgcccccaaggccgcctggccctggcaggccagcctgcagtacgacaacatccaccagtgcggcgccaccctgatcagcaacacctggctggtgaccgccgcccactgcttccagaagtacaagaacccccaccagtggaccgtgagcttcggcaccaagatcaacccccccctgatgaagagaaacgtgagaagattcatcatccacgagaagtacagaagcgccgccagagagtacgacatcgccgtggtgcaggtgagcagcagagtgaccttcagcgacgacatcagacagatctgcctgcccgaggccagcgccagcttccagcccaacctgaccgtgcacatcaccggcttcggcgccctgtactacggcggcgagagccagaacgacctgagagaggccagagtgaagatcatcagcgacgacgtgtgcaagcagccccaggtgtacggcaacgacatcaagcccggcatgttctgcgccggctacatggagggcatctacgacgcctgcagaggcgacagcggcggccccctggtgaccagagacctgaaggacacctggtacctgatcggcatcgtgagctggggcgacaactgcggccagaaggacaagcccggcgtgtacacccaggtgacctactacagaaactggatcgccagcaagaccggcatctag

SEQ ID NO: 43044 - DNA, 1257 bp, Artificial Sequence
  derived and/or modified sequence
atgatgtaccggacggtgggattcggcacacggtcccgaaatttgaaaccttggatgatcgctgttctcatagtgctgagtctcacagtagtcgccgtcaccatcggactgttggtgcatttccttgtttttgatcagaagaaagaatattaccacggaagttttaagatactggatccccagattaacaataattttggtcaatcaaacacctaccagctaaaagatcttagagagaccacggagaacctggttgatgagatatttatcgacagcgcatggaaaaagaactatatcaaaaatcaggtcgtgcggctgacccccgaggaagatggagtaaaggtggatgtgatcatggtgttccagttcccgtccactgaacagagggccgtacgcgaaaaaaaaatacagtcgatcctcaaccagaagatacggaacctcagagcgttgcctatcaacgcaagctcagtgcaagtaaacgccatgtcttcatccacgggagagctgaccgtgcaggctagctgcgggaagcgcgtggtacccctcaacgtgaaccgcatcgccagtggggttattgcaccaaaagccgcttggccctggcaggcttccttgcagtacgacaacattcatcagtgcggcgctactctgatctccaacacgtggctcgttaccgctgctcactgctttcagaaatacaagaatccacaccaatggacagtcagttttggcacaaaaatcaatcccccattaatgaagcgaaatgtaaggaggttcatcattcacgagaagtacaggtctgctgcccgcgaatatgacatcgcagtggtgcaagtgtcaagcagagttacgttctcagatgatattcgccagatatgcttaccagaggctagcgcttcttttcagccgaatctcactgtgcatattaccggattcggggccctgtactacgggggagagagccagaatgatctgcgggaggctagggtcaaaattatatccgacgatgtatgcaaacagccccaggtttacggaaacgatattaaacctggtatgttttgcgcgggttacatggaaggaatctatgatgcctgtaggggtgattcaggcgggcccctggtgacccgcgacctgaaggatacatggtacttgataggtatagtgtcctggggagacaactgtggccagaaagataagccaggcgtgtacactcaggtgacctactaccggaattggattgcttccaagacaggaatctag

SEQ ID NO: 43045 - DNA, 1254 bp, Artificial Sequence
  derived and/or modified sequence
atgtacaggaccgttggctttgggacccgctcaagaaacttgaaaccatggatgatcgcggtgttgatcgtgttgagtctcaccgtcgtcgccgttactattggtcttctcgtacactttctggtgtttgatcagaagaaggagtattaccacgggtccttcaagattctggacccccagattaataataattttggccagtcaaacacttatcagctgaaggacttaagggagactaccgagaacttagtagacgagatctttatcgatagtgcctggaagaaaaattacataaagaaccaggtcgtcagacttacccctgaggaagacggggtaaaagtggatgtaattatggtgtttcaatttccctcgactgagcagagagcagtgagagaaaagaagatccaatcgatcctcaaccagaaaattcggaacctacgggccctgccaattaacgcctcttcagtgcaggttaacgctatgagctcatccactggtgagcttacagttcaagcgtcctgtggcaagagggtcgtgcctctcaatgttaatcggattgcgagcggggtaatcgcccccaaagccgcctggccctggcaggccagtttgcagtatgacaacatccaccagtgtggagcaaccctaatctctaatacttggttagtgacagccgcccactgctttcaaaagtataagaacccccatcaatggacggtttctttcggaaccaaaatcaaccccccacttatgaagcgtaacgtgcgaagattcatcatccatgaaaaatatcgatccgctgcccgggaatacgatattgccgtggttcaggtgtcctcgagagtcaccttcagtgacgacatccgccagatttgcctccccgaagcctctgcatctttccagcctaacttaactgtacacataactggatttggagccctgtattacggaggtgaatcacagaatgacctgcgggaagcacgggttaaaattattagcgatgatgtgtgcaaacagccacaggtctacggaaacgacatcaagcccggtatgttctgtgccggatatatggaaggcatttatgacgcttgccgaggcgacagtggtggcccactagtgacacgcgacctaaaagacacttggtacttgatcggaattgtctcatggggcgacaactgcggacagaaggacaaaccaggagtgtatacacaggtgacgtattataggaattggatcgcatctaagactggcatttag

SEQ ID NO: 43046 - DNA, 1257 bp, Artificial Sequence
  derived and/or modified sequence
atgatgtacagaacagtgggcttcggcaccaggagcaggaacctgaagccctggatgattgctgtgctgattgtgctgagcctgactgtggtggccgtgaccatcggcctgctggtgcacttcctggtgtttgaccagaagaaggagtactaccacggcagcttcaagatcctggacccccagatcaacaacaactttggccagagcaacacctaccagctgaaggacctgcgggagaccacagagaacctggtggatgagatcttcatcgacagcgcctggaagaagaactacatcaagaaccaggtggtgcggctgaccccagaggaggatggagtgaaggtggatgtgatcatggtgttccagttccccagcacagagcagagagctgtgcgggagaagaagatccagagcatcctgaaccagaagatccggaacctgcgggccctgcccatcaatgccagctctgtgcaggtgaatgccatgagcagcagcactggagagctgactgtgcaggccagctgtgggaagagggtggtgcccctgaatgtgaacagaattgccagcggggtcatcgcccccaaggccgcctggccctggcaggccagcctgcagtatgacaacatccaccagtgtggggccaccctcatcagcaacacctggctggtgacagctgcccactgcttccagaagtacaagaacccccaccagtggacagtgtcctttggcaccaagatcaacccccccctgatgaagagaaatgtgcggcgcttcatcatccacgagaagtacagatctgctgcccgggagtatgacattgctgtggtgcaggtgagcagccgggtgaccttcagtgatgacatccggcagatctgcctgcctgaggccagcgccagcttccagcccaacctgactgtgcacatcactggatttggagccctgtactacggcggggagagccagaatgacctgcgggaggcccgggtgaagatcatcagtgatgatgtgtgcaagcagccccaggtgtatggaaatgacatcaagccaggcatgttctgtgccggctacatggagggcatctatgatgcctgccgcggggacagcggcggccccctggtgacccgggacctgaaggacacctggtacctgattggcatcgtgtcctggggagacaactgtggccagaaggacaagccaggagtgtacacccaggtgacctactacagaaactggatcgccagcaagacaggcatctag

SEQ ID NO: 43047 - DNA, 1254 bp, Artificial Sequence
  derived and/or modified sequence
atgtacagaacagtgggcttcggcaccaggagcaggaacctgaagccctggatgattgctgtgctgattgtgctgagcctgactgtggtggccgtgaccatcggcctgctggtgcacttcctggtgtttgaccagaagaaggagtactaccacggcagcttcaagatcctggacccccagatcaacaacaactttggccagagcaacacctaccagctgaaggacctgcgggagaccacagagaacctggtggatgagatcttcattgattctgcctggaagaagaactacatcaagaaccaggtggtgcggctgaccccagaagaagatggagtgaaggtggatgtgatcatggtgttccagttccccagcacagagcagagagctgtgcgggagaagaagatccagagcatcctgaaccagaagatccggaacctgcgggccctgcccatcaatgccagctctgtgcaggtgaatgccatgagcagcagcactggagagctgactgtgcaggccagctgtgggaagagggtggtgcccctgaatgtgaaccgcatcgccagcggcgtgattgcccccaaggccgcctggccctggcaggccagcctgcagtatgacaacatccaccagtgtggggccaccctcatcagcaacacctggctggtgacagctgcccactgcttccagaagtacaagaacccccaccagtggacagtgtcctttggcaccaagatcaacccccccctgatgaagagaaatgtgcggcgcttcatcatccacgagaagtacagatctgctgcccgggagtatgacattgctgtggtgcaggtgagcagccgggtgaccttcagtgatgacatccggcagatctgcctgcctgaggccagcgccagcttccagcccaacctgactgtgcacatcaccggctttggagccctgtactatggaggagagagccagaatgacctgcgggaggcccgggtgaagatcatcagtgatgatgtgtgcaagcagccccaggtgtatggaaatgacatcaagccaggcatgttctgtgccggctacatggagggcatctatgatgcctgccgcggggacagcggcggccccctggtgacccgggacctgaaggacacctggtacctgattggaattgtgtcctggggagacaactgtggccagaaggacaagccaggagtgtacacccaggtgacctactacagaaactggatcgccagcaagacaggcatctag

SEQ ID NO: 43048 - DNA, 1257 bp, Artificial Sequence
  derived and/or modified sequence
atgatgtaccggaccgtgggcttcggcacccggagccggaacctgaagccttggatgatagcagtcttgatcgtgcttagcttaactgtcgtcgccgtgacaattggactgttagtccacttccttgtgtttgaccagaaaaaagaatactaccatggctcattcaagattctggacccacagattaacaacaatttcggccaatctaatacgtatcagctgaaagacctgagagagacaacagagaacctagttgatgaaatattcatagattcagcctggaagaagaattacatcaagaaccaggtcgtgcggttgactccagaagaggacggcgtgaaggtagacgtcataatggtcttccaatttccatctacagagcaacgtgctgttcgcgagaagaagattcaatctatcttgaaccagaaaatcaggaatctgcgcgcactcccaatcaatgctagcagcgtgcaagtgaatgctatgagcagctcaacaggagaactgaccgttcaagcctcctgcggcaagcgcgttgttcctctgaacgtgaacaggatcgcaagtggagttatcgctcctaaagctgcgtggccttggcaggctagtctgcaatatgacaatattcaccagtgtggcgctactctaatttctaatacctggctggttaccgccgctcactgcttccaaaaatataaaaatcctcaccagtggaccgtatccttcggcactaaaatcaacccaccccttatgaagagaaatgtgaggcggttcataatccacgagaaataccggtccgccgccagggaatacgatatcgccgtcgtgcaggtgtcgtccagagtgacgttttcggatgacatcagacaaatctgtcttcccgaagccagtgcttcttttcagcccaatctgactgttcacattacaggctttggcgctctgtattatggcggggaatcccaaaatgatcttcgggaagccagagtgaaaatcatctctgatgacgtctgtaaacagcctcaggtttatggtaacgatattaagcccgggatgttttgcgccgggtatatggagggcatctacgacgcatgcaggggggattctggcggcccactcgtaacaagagatttgaaggatacttggtacctgatcggaatagtgagctggggagataactgcggccagaaggataagcctggggtatacacacaagtcacctattataggaactggattgcttccaagaccggtatttag

SEQ ID NO: 43049 - DNA, 1254 bp, Artificial Sequence
  derived and/or modified sequence
atgtaccggaccgtgggcttcggcacccggagccggaacctgaagccatggatgatcgcagtgctcatcgtactgtctctgaccgtggtggctgtaaccatcggattactcgttcatttccttgtcttcgatcagaagaaggaatactatcatgggtcatttaaaattctggacccccagatcaacaacaatttcgggcaatctaatacataccagttgaaggacctacgcgagaccaccgagaacctggtggatgagatttttatagactctgcctggaagaagaattatattaaaaaccaggttgtgcggctcacacccgaggaggatggagttaaggtcgatgtaatcatggtgtttcaatttccaagtaccgagcaacgcgctgtccgggaaaagaagatccagtcaatcctgaaccaaaagattaggaatttaagggcacttccaataaatgcttccagcgtacaagtcaacgccatgagttccagtacgggtgagctgactgtccaagcttcctgcggcaaaagagtcgtccccttgaatgtgaatcgcatcgcatcaggcgtgatcgcccccaaagcagcttggccttggcaggccagcctccagtacgataacatccatcagtgtggcgctacactcatctccaacacgtggctcgtaacagccgcgcactgtttccagaaatacaaaaacccccatcagtggactgtttcctttggaactaagatcaacccacccctgatgaagaggaacgtgcgccgctttattatccatgagaaatatcgctctgctgcacgggaatacgacatcgccgtggtacaggttagcagtcgcgtgaccttctccgatgacattagacagatctgtctgcccgaggcatctgctagtttccaaccaaatcttactgtgcatatcacaggtttcggggccctgtattacggcggtgagtcccaaaacgacctgcgtgaagctagggtgaagattatctcagacgacgtctgcaagcagccacaagtttacggtaatgacatcaagcctgggatgttttgcgccgggtatatggaaggtatctacgacgcttgtcggggtgattccggtggccccctcgtgactcgggacctaaaagacacatggtacctgatcggaattgtgagctggggcgacaactgcgggcaaaaagacaagccaggagtgtacacgcaggtgacttactatcgtaactggattgcttccaaaacagggatttag

SEQ ID NO: 43050 - DNA, 1257 bp, Artificial Sequence
  derived and/or modified sequence
atgatgtacagaacagttggctttgggacaagatccagaaacttgaaaccctggatgatcgccgtgctgattgtgctcagtctgacagtagttgccgtgaccatcgggctgcttgtccactttctggtgttcgaccaaaaaaaggaatattaccacggctcctttaagatcctggaccctcaaatcaataataatttcggacagtctaatacttatcagctgaaggatttaagggaaaccacagaaaatctcgtggacgagatcttcatcgactccgcatggaagaagaattacataaagaaccaggtggtgaggctgacacctgaggaggatggggtaaaggtggacgtgatcatggtattccagtttcctagcacagagcagagggcagtgagggagaagaagattcaaagtatattgaaccagaagatccgcaatctcagagcgctaccaattaatgctagttccgtgcaggtgaacgcaatgtcctcttccactggcgagcttacagtgcaagcaagctgtggaaagcgggtcgtccccctaaatgtcaaccgaatagcatcaggtgtgatcgctccaaaggccgcatggccctggcaagcatctctccagtatgataacattcaccagtgtggggcaacactaatcagcaatacctggctggtgacagccgctcactgtttccagaagtataagaaccctcaccagtggaccgtgtcatttggaacaaaaataaatccaccactgatgaagcgtaacgtccggagattcatcatacatgaaaagtaccggtcagctgcccgtgagtacgacatcgctgtcgtgcaggtgtcgagtcgagtcaccttcagtgacgacatcaggcagatttgcttaccggaggcaagtgccagctttcaacctaatctcacggtgcacattacaggattcggcgcactttactatggaggggaatctcaaaacgaccttcgcgaggcacgcgtgaagattatttccgatgatgtctgcaaacaaccgcaagtgtatggcaacgacatcaaaccgggtatgttctgtgccggatatatggagggcatttatgacgcatgccgtggggattcggggggtcccctcgtgacaagagatttaaaagacacctggtacctaattggcatcgtgagctggggagataactgcgggcagaaagacaaaccaggggtgtatacacaagttacctactatagaaattggatcgcttcaaaaaccggtatctag

SEQ ID NO: 43051 - DNA, 1254 bp, Artificial Sequence
  derived and/or modified sequence
atgtaccggacagtagggttcggcactcgcagccgtaacctgaaaccttggatgatcgcggttctgatcgtgctgtccttgacagtcgtggctgtcacaatagggttattggttcattttctggtgttcgaccagaagaaggaatactatcatggctcattcaaaatcctcgaccctcagatcaacaacaactttggccaaagcaacacctatcagctaaaagacctccgagaaaccaccgagaaccttgtggatgaaatcttcatcgattctgcttggaaaaagaactacatcaaaaatcaagtggtccggctgacccccgaagaggatggtgtcaaggtggatgttattatggtttttcagttcccctctaccgagcagagggctgttagggagaaaaagatccaaagtatcctcaatcagaaaatccggaacctgcgcgcactgcctatcaacgctagctctgtccaggtgaatgcgatgagctcctccaccggggaactgaccgtccaggcaagctgcggcaaaagagtcgtgccgcttaatgtgaataggatcgccagcggcgtgattgctcccaaagccgcatggccctggcaggcaagcctgcagtacgacaacattcatcagtgcggagctaccctgataagtaacacctggcttgttaccgccgcacactgcttccagaagtacaaaaacccacatcagtggacagtaagctttggcacaaagattaaccccccattaatgaaacggaacgtgcgcagattcataattcacgagaaatacagaagtgctgcacgcgagtatgatatcgctgtggtacaggtgtcatcaagggtgaccttctctgacgatatccgacagatttgccttcctgaagcatccgcctcctttcagcctaatctcactgtccacatcaccggattcggcgcactatactacggcggtgaatctcagaacgacctgagggaagctcgtgttaagattatttcagacgacgtctgtaaacagcctcaggtgtacgggaacgacatcaagccagggatgttttgcgcagggtatatggaaggcatttatgatgcctgcaggggcgactctgggggtcctctggtgaccagggacttgaaagatacctggtaccttattggaattgtcagctggggcgacaactgtggacagaaagacaagccaggcgtgtacacccaagttacatattatcgcaattggatcgcaagcaagacaggcatctag

SEQ ID NO: 43052 - DNA, 2419 bp, Artificial Sequence
  derived and/or modified sequence
aatttgtttccttatttctttgagccgtagacttctaatacatctagagatgtcatatagttgattagaaagttgagttcagtgggtgcagacctgcaagatcatattcttcctcctgtacatgatgtatcggacagtgggatttggcacccgaagcagaaatctgaagccatggatgattgccgttctcattgtgttgtccctgacagtggtggcagtgaccataggtctcctggttcacttcctagtatttgaccaaaaaaaggagtactatcatggctcctttaaaattttagatccacaaatcaataacaatttcggacaaagcaacacatatcaacttaaggacttacgagagacgaccgaaaatttggtggatgagatatttatagattcagcctggaagaaaaattatatcaagaaccaagtagtcagactgactccagaggaagatggtgtgaaagtagatgtcattatggtgttccagttcccctctactgaacaaagggcagtaagagagaagaaaatccaaagcatcttaaatcagaagataaggaatttaagagccttgccaataaatgcctcatcagttcaagttaatgcaatgagctcatcaacaggggagttaactgtccaagcaagttgtggtaaacgagttgttccattaaacgtcaacagaatagcatctggagtcattgcacccaaggcggcctggccttggcaagcttcccttcagtatgataacatccatcagtgtggggccaccttgattagtaacacatggcttgtcactgcagcacactgcttccagaagtataaaaatccacatcaatggactgttagttttggaacaaaaatcaaccctcccttaatgaaaagaaatgtcagaagatttattatccatgagaagtaccgctctgcagcaagagagtacgacattgctgttgtgcaggtctcttccagagtcaccttttcggatgacatacgccagatttgtttgccagaagcctctgcatccttccaaccaaatttgactgtccacatcacaggatttggagcactttactatggtggggaatcccaaaatgatctccgagaagccagagtgaaaatcataagtgatgatgtctgcaagcaaccacaggtgtatggcaatgatataaaacctggaatgttctgtgccggatatatggaaggaatttatgatgcctgcaggggtgattctgggggacctttagtcacaagggatctgaaagatacgtggtatctcattggaattgtaagctggggagataactgtggtcaaaaggacaagcctggagtctacacacaagtgacttattaccgaaactggattgcttcaaaaacaggcatctaattcacgataaaagttaaacaaagaaagctgtatgcaggtcatatatgcatgagaattcaactatttagtgggtgtagtacaacaaagtgatattaaattactggatctagtaacatgaaacacacaacgtaagttatttagaatcactttaatcaaccaataatccttagccaatttataagggacttttatttgtaaagtaatggatctggcttgaaaaatacggtagagatacttagctctttaaatcacgaatgttgaagtaccagtgagactcaatacatatttttgaagatagtccatgggatttttagaatgtcgttgtcaagggtctccttttaactgagaaactttttgaactcacaaagtgttcaagaaacccttgtataattccctacatttctctcgagctcacaaatacttttttttctttttccttattcaatcagattttccaaagtacctttccaccataagaaatgaattttctacttctacacccatttgagagacaccaataaaagaaagtcatatgtaggaaacaaagtctgatagtaaaacaagccagagatcttctaactttttttagttataaaacctctaatttttggtgacttttctacacacacacacacatacagtcacatagatattcttatcctacagatataatcagaaaaatcccgattaatgaattatatatagatagatagagtgattagttaatcaaaactatatatttgttaaaaatttgggagaaggtgatggtaatttcattagtcccaaaacaccggcataagaaatttgacatttcacagatgcacttacatattttgaccacaagggggaaattttgtgcattattattgtagggttaaatgcctgaaaaaaataagcatttactaataccttgaaaaatcaaagaacattatgttcctccgtagcaagaaaaattttatgccctcgcattgctacagccaaatagcttataaggcttatggcaatgtcccaactattgcaatcataaaaccctagttttag

SEQ ID NO: 43053 - DNA, 3247 bp, Artificial Sequence
  derived and/or modified sequence
cagacctgcaagatcatattcttcctcctgtacatgatgtatcggacagtgggatttggcacccgaagcagaaatctgaagccatggatgattgccgttctcattgtgttgtccctgacagtggtggcagtgaccataggtctcctggttcacttcctagtatttgaccaaaaaaaggagtactatcatggctcctttaaaattttagatccacaaatcaataacaatttcggacaaagcaacacatatcaacttaaggacttacgagagacgaccgaaaatttggtggatgagatatttatagattcagcctggaagaaaaattatatcaagaaccaagtagtcagactgactccagaggaagatggtgtgaaagtagatgtcattatggtgttccagttcccctctactgaacaaagggcagtaagagagaagaaaatccaaagcatcttaaatcagaagataaggaatttaagagccttgccaataaatgcctcatcagttcaagttaatgcaatgagctcatcaacaggggagttaactgtccaagcaagttgtggtaaacgagttgttccattaaacgtcaacagaatagcatctggagtcattgcacccaaggcggcctggccttggcaagcttcccttcagtatgataacatccatcagtgtggggccaccttgattagtaacacatggcttgtcactgcagcacactgcttccagaagtataaaaatccacatcaatggactgttagttttggaacaaaaatcaaccctcccttaatgaaaagaaatgtcagaagatttattatccatgagaagtaccgctctgcagcaagagagtacgacattgctgttgtgcaggtctcttccagagtcaccttttcggatgacatacgccagatttgtttgccagaagcctctgcatccttccaaccaaatttgactgtccacatcacaggatttggagcactttactatggtggggaatcccaaaatgatctccgagaagccagagtgaaaatcataagtgatgatgtctgcaagcaaccacaggtgtatggcaatgatataaaacctggaatgttctgtgccggatatatggaaggaatttatgatgcctgcaggggtgattctgggggacctttagtcacaagggatctgaaagatacgtggtatctcattggaattgtaagctggggagataactgtggtcaaaaggacaagcctggagtctacacacaagtgacttattaccgaaactggattgcttcaaaaacaggcatctaattcacgataaaagttaaacaaagaaagctgtatgcaggtcatatatgcatgagaattcaactatttagtgggtgtagtacaacaaagtgatattaaattactggatctagtaacatgaaacacacaacgtaagttatttagaatcactttaatcaaccaataatccttagccaatttataagggacttttatttgtaaagtaatggatctggcttgaaaaatacggtagagatacttagctctttaaatcacgaatgttgaagtaccagtgagactcaatacatatttttgaagatagtccatgggatttttagaatgtcgttgtcaagggtctccttttaactgagaaactttttgaactcacaaagtgttcaagaaacccttgtataattccctacatttctctcgagctcacaaatacttttttttctttttccttattcaatcagattttccaaagtacctttccaccataagaaatgaattttctacttctacacccatttgagagacaccaataaaagaaagtcatatgtaggaaacaaagtctgatagtaaaacaagccagagatcttctaactttttttagttataaaacctctaatttttggtgacttttctacacacacacacacatacagtcacatagatattcttatcctacagatataatcagaaaaatcccgattaatgaattatatatagatagatagagtgattagttaatcaaaactatatatttgttaaaaatttgggagaaggtgatggtaatttcattagtcccaaaacaccggcataagaaatttgacatttcacagatgcacttacatattttgaccacaagggggaaattttgtgcattattattgtagggttaaatgcctgaaaaaaataagcatttactaataccttgaaaaatcaaagaacattatgttcctccgtagcaagaaaaattttatgccctcgcattgctacagccaaatagcttataaggcttatggcaatgtcccaactattgcaatcataaaaccctagttttagaaaaatttgaaaataaatataaaatttgagcacctactgcatataacacatggggctataacatataacatatagtatgttttctcttttggaccactttgttatatgtggtccacaagagaaaacatactccatcagcaacgtgtctcctgaagtcattaggagagtaaggctcatgtatttcgtaatacaattaaattaaggctttatggaagcaattattctgcttggcaatgcctgtgaaatattatggtctgcaggctggggagtcatttactcatttagcccaaatataagacaaatcattggaacgatgaacttgctttataataatttccctcacatgctattgagaaggcatgaaaataatcctaaaatatctaaaagagatatgcagttcactcataaaacacttgattcataatttagactcatagaattttaaagctgagaagagattgcatgtcacataggccaatatacttatgttatgtttaagaatatgagtatattcttaactatttttattgaattcttaactatttttattgaatcatcagatctgtaaaattttaagtgagagctattgaacctgtattaagatagaaaactcttaagataagaattttaaatgacgagattcatttaggcagctggctgccaattctctgaattcacttcaagacaaagtttcttcttcatatataaatatacataggcatataaattattctatattatggtggtaaaacttaatgctgactttggatgttcagattcaggaaatgatcttagaattatgaactttgtatttttaaactatttggtgcagcatttcattttgggtcacatgtaagcagatattgatatgtcatttttaatctaataaagttggtgatcagagcattctacaaac

SEQ ID NO: 43054 - protein, 391 aa, Artificial Sequence
  derived and/or modified sequence
MAARSPPSPHPSPPARQLGPRSPRVGRGAEVHAMRSEASGFAGAAREVVADESDKIWVGEEGSGGRRGPGGAAPAHAPLLSAPMGSRRLEGISVEEAMVTRTQLLEEELSSLKEELALCQADKEFVWSLWKRLQVTNPDLTQVVSLVVEREKQKSEAKDRKVLEILQVKDAKIQEFEQRESVLKQEINDLVKRKIAVDEENAFLRKEFSDLEKKFKDKSQEIKDTKECVQNKEEQNRLVIKNLEEENKKLSTRCTDLLNDLEKLRKQEAHLRKEKYSTDAKIKTFEDNLIEARKEVEVSQSKYNALSLQLSNKQTELIQKDMDITLVRKELQELQNLYKQNSTHTAQQAELIQQLQVLNMDTQKVLRNQEDVHTAESISYQKVCFYSVIKM

SEQ ID NO: 43055 - DNA, 1176 bp, Artificial Sequence
  derived and/or modified sequence
atggccgcccgaagccccccatccccacacccttccccaccagcgcggcagctgggacctaggagccctagagtcggcagaggcgcagaggtgcatgcgatgcggtccgaggcttccggctttgccggagctgcccgcgaagtggtagcagacgagtctgacaagatatgggtgggcgaggaaggctcgggcggacgaagaggcccggggggggcagctcctgcccacgcccccttactctcggcccccatgggaagcaggagacttgaagggatctcggtggaagaggccatggtgacgagaacacagctcctggaggaggagctgagctctctaaaagaggagctggcgctgtgccaggcggacaaggaattcgtctggtcattgtggaagcggctccaagttacaaatcctgatctgactcaggtggtgtcgctggtggtggagagggaaaagcagaagtctgaggctaaggacagaaaggtgctggaaatattacaggtgaaagacgccaagatacaggagttcgagcaacgggaatctgtgctgaaacaagagataaacgatctcgtcaaaagaaagatcgcagtggacgaggagaatgccttcctgaggaaggaattcagcgacttggaaaaaaagtttaaggataaaagtcaggagataaaagatacaaaggagtgcgtgcaaaacaaggaagagcagaatagactcgttatcaaaaatctagaggaggagaataagaaattatctactcggtgtactgacctgttgaacgatttagagaagttgcgaaagcaagaggcccacctccggaaagagaagtactctaccgacgcgaagatcaagacttttgaagacaacctcattgaggcccgcaaggaggttgaggtttcccagtccaagtacaacgcactgagtctccagctgtccaataagcagacagagttgatacagaaagacatggatattaccctggtgaggaaggagctgcaagagctacagaacctgtataagcagaattctacccacactgcccagcaggcggagctcatccagcagctgcaagtactaaatatggatacgcagaaagtactgaggaaccaggaagacgtacatactgcagaatcaatcagctatcagaaggtgtgtttctactctgtgattaagatgtag

SEQ ID NO: 43056 - DNA, 1176 bp, Artificial Sequence
  derived and/or modified sequence
atggccgcccggagcccccccagcccccaccccagccccccagcccggcagctgggccccaggagcccccgggtgggcagaggagctgaggtgcacgccatgaggtctgaggccagcggctttgctggggccgcccgggaggtggtggctgatgaaagtgacaagatctgggtgggggaggagggcagcggcggccggcggggccctggaggagctgccccagcccacgcccccctgctgagcgcccccatgggcagccggcggctggagggcatctctgtggaggaggccatggtgaccaggacccagctgctggaggaggagctgagcagcctgaaggaggagctggccctgtgccaggccgacaaggagtttgtgtggagcctgtggaagaggctgcaggtgaccaacccagacctgacccaggtggtgtccctggtggtggagcgggagaagcagaagtctgaggccaaggacaggaaggtgctggagatcctgcaggtgaaggatgccaagatccaggagtttgagcagcgggagagcgtgctgaagcaggagatcaatgacctggtgaagaggaagattgctgtggatgaggagaatgccttcctgaggaaggagttcagtgacctggagaagaagttcaaggacaagagccaggagatcaaggacaccaaggaatgtgtgcagaacaaggaggagcagaaccggctggtgatcaagaacctggaggaggagaacaagaagctgagcacccgctgcacagacctgctgaatgacctggagaagctgaggaagcaggaggcccacctgaggaaggagaagtacagcacagatgccaagatcaagacctttgaggacaacctgattgaggccaggaaggaggtggaggtgtcccagagcaagtacaatgccctgagcctgcagctgagcaacaagcagacagagctgatccagaaggacatggacatcaccctggtgaggaaggagctgcaggagctgcagaacctgtacaagcagaacagcacccacacagcccagcaggccgagctgatccagcagctgcaggtgctgaacatggacacccagaaggtgctgaggaaccaggaggatgtgcacacagctgagagcatctcctaccagaaggtgtgcttctacagcgtcatcaagatgtag

SEQ ID NO: 43057 - DNA, 1176 bp, Artificial Sequence
  derived and/or modified sequence
atggccgcccggagcccccccagcccccaccccagcccccccgcccgccagctgggtcccagatctccacgagtgggaagaggagcggaggtgcatgctatgcgttctgaagcatctggatttgccggggcagccagggaggtggttgccgacgagtctgataagatctgggtgggcgaggagggctcaggtggccggcgagggcccgggggggctgcacccgcccatgcacctctccttagcgccccaatggggagcaggaggcttgaaggaatctccgtggaggaggccatggtaacccgcacccagttgctcgaggaggaactgtctagcctaaaggaagaactggcactgtgtcaggccgataaagagttcgtgtggagtctttggaaacgcctacaggtgacaaatcccgacttaacacaggtggtttcccttgtcgttgaacgggagaaacaaaagtctgaagcaaaagaccggaaggtgcttgagatccttcaggtcaaggatgctaagattcaggagtttgagcaacgggagtcggtgctgaagcaagagatcaacgatttggtgaagaggaagattgccgtcgatgaggagaatgctttcctcaggaaagaattcagtgatctcgaaaaaaaattcaaggataaatcacaggagatcaaggatacgaaggaatgcgtgcaaaacaaggaggagcagaacaggttggtgattaagaacttggaagaggaaaataaaaagctgtcaacaagatgtactgacctcttgaacgatctcgagaaactgcggaagcaggaggcgcaccttcgcaaggaaaagtactccacagacgcgaaaattaagacatttgaggataacctcatcgaagcccggaaggaagttgaagtcagtcagagcaagtacaacgccttgagtctgcagctcagcaacaagcagacggagctcatccagaaggacatggatatcactctggtgagaaaagagctccaggaactgcaaaatctgtacaaacagaactcaacccatacagctcagcaggcagagcttattcaacaactgcaggtgctgaacatggacactcaaaaggtgttgcgaaaccaggaggacgtccatactgccgaaagcatttcctaccagaaagtctgcttttattccgtgattaaaatgtag

SEQ ID NO: 43058 - DNA, 1176 bp, Artificial Sequence
  derived and/or modified sequence
atggctgcgagatctcccccttccccccatcctagtcctcccgcaagacagcttgggcctcgctctccgagagtcgggagaggcgctgaagtgcacgctatgaggtccgaggcaagcggtttcgcgggagctgctagagaggtagtagccgatgaatctgataagatctgggtaggcgaggaggggagcggcggtcgcaggggcccaggcggtgcagctcctgctcacgcccctctgctgtctgcccctatggggagtcgcaggctggaaggcattagcgttgaagaggcaatggtgactcgcacgcagctgctggaagaggagctctcttccttaaaagaggaactagcactgtgccaagccgacaaagaattcgtgtggtcactgtggaagagactgcaggtgacaaaccctgatctcacccaggtggtgagtctggtcgtggagagggagaagcaaaaatccgaagcaaaggataggaaggtcctggagattctacaggtgaaagatgctaaaattcaggagttcgagcagagggagagcgtcctgaaacaggagattaacgatctggtcaagagaaagattgccgtagacgaagagaatgcttttctcaggaaagaattcagcgacttagagaaaaaatttaaggataaatcccaggagataaaagatactaaagagtgcgtgcagaataaagaagagcagaaccggctcgtgatcaaaaacttggaagaagagaacaaaaagttgtcaactaggtgtactgatctcctcaacgatctggagaagttgcggaagcaggaggcccatctgcgaaaggagaagtactcgacagacgcaaagattaaaacattcgaggacaaccttattgaggctagaaaagaggtcgaggtgtctcagtctaaatataacgcgctctcattgcagctctctaataagcaaactgagctcatacagaaagatatggatatcactctggtgcgcaaagaattgcaggagctgcagaatttatataagcaaaattctacccataccgctcagcaagccgagcttattcagcaactgcaggtgctgaatatggacacccagaaagtgttgcgcaatcaggaagatgttcacaccgcagaatctatctcctatcagaaagtctgtttttacagcgtgatcaagatgtag

SEQ ID NO: 43059 - DNA, 2061 bp, Artificial Sequence
  derived and/or modified sequence
aacttgacccgttagcagccgcagccatggcggcgcgttcgcctccctcaccgcacccttcgcccccagcgcgacagctgggccccaggtccccacgtgttgggcggggagctgaagtacacgcaatgcgcagcgaggcctcgggttttgccggcgcagcgcgggaggtggtcgcggacgaaagtgataaaatctgggtgggtgaagaagggtcagggggccggcgagggcctgggggggcagctccggctcatgctcccctcctcagcgcgcccatggggtccagacggctagagggcatctcggtagaggaggcgatggtgacccggacgcagctgctggaggaagagctgagcagcctaaaggaggagttggccctgtgtcaggctgataaagaatttgtatggtctttgtggaaacgtctccaggttacaaacccagatctcacacaagtggtcagtttggttgtggaaagagaaaaacagaaatctgaagctaaagacagaaaagttctagaaattctgcaagtcaaggatgccaaaatacaagaatttgaacagagagagtcagtactgaaacaggaaataaatgaccttgtaaaacggaaaattgcagtagatgaagaaaatgctttcttaaggaaagaattcagtgacttggagaagaaatttaaagataaaagtcaagaaattaaggacactaaggagtgtgtacagaacaaagaagagcaaaacagactagttataaaaaatctggaggaggaaaacaagaaattaagtacccgctgcactgacctgctaaatgacctggagaaattgaggaagcaggaagcacatttgagaaaagaaaaatatagcactgatgcaaaaataaagacctttgaagacaatttaattgaagcaaggaaagaagttgaagtatcacagagtaaatacaatgctctatcattacagttgagtaataaacagactgaacttatccagaaggatatggatattaccctggtcaggaaggaactgcaggagctgcagaatctttacaaacagaacagtacacatacagcccagcaagcagagctgatccagcagcttcaggttctcaatatggacacacaaaaagtactgagaaatcaggaagatgttcacacagctgaaagtatatcatatcaaaaagtatgcttttattctgtaataaagatgtaaatgtttatgtatgaacttatgaacatatatagaattcagattttttcaaatttcagcatttaatttttacttccttttacatgtgtttcctcaaaatttagaagtgaaggatggttcaatttgataacatttaaaattttttgaattttctttatggtaattagagctgaatcacttaaaatatagatacaaacttactctatagggtattatttttataaattggcattcagacagcttctgtgaaacatactaggagtatagtctcaaaactggaatggaattcctcggcctgctattacaagaaattattttgtcaagtatggcagactttcattgtaaaatttgtacattatttttcggcaaatcttcacaaatacaaaggggattgctgaggagggctttaggatcaatattttccaggatttttctctgtttattttgtgtgtttctgttcagtagtcttttactttacagttgttttaggagcctttcaagaaggtttacccaagtatttaggtgtgctaactgactcagcagcaataatttaatctactaattaaaaaaaatacctttattggccgggcatggtggctcatgcctgtaatcccagcactttgggaggctgaggcgggcgaatcacaaggtcaagagatcgagaccatcctggccaacatgatgaaaccctgtttctactaaaaatacaaaaagttagctgagcatggtggttcatgcctgtagtcccagctacttgggaggctgaggcaggagaatcacttgaacctgggaggcggaggtcgcagtgagccaagatcgcaccattgcactccagccaggcgacagggggagacaacgtctc

SEQ ID NO: 43060 - DNA, 1176 bp, Artificial Sequence
  derived and/or modified sequence
atggccgccagaagcccccccagcccccaccccagcccccccgccagacagctgggccccagaagccccagagtgggcagaggcgccgaggtgcacgccatgagaagcgaggccagcggcttcgccggcgccgccagagaggtggtggccgacgagagcgacaagatctgggtgggcgaggagggcagcggcggcagaagaggccccggcggcgccgcccccgcccacgcccccctgctgagcgcccccatgggcagcagaagactggagggcatcagcgtggaggaggccatggtgaccagaacccagctgctggaggaggagctgagcagcctgaaggaggagctggccctgtgccaggccgacaaggagttcgtgtggagcctgtggaagagactgcaggtgaccaaccccgacctgacccaggtggtgagcctggtggtggagagagagaagcagaagagcgaggccaaggacagaaaggtgctggagatcctgcaggtgaaggacgccaagatccaggagttcgagcagagagagagcgtgctgaagcaggagatcaacgacctggtgaagagaaagatcgccgtggacgaggagaacgccttcctgagaaaggagttcagcgacctggagaagaagttcaaggacaagagccaggagatcaaggacaccaaggagtgcgtgcagaacaaggaggagcagaacagactggtgatcaagaacctggaggaggagaacaagaagctgagcaccagatgcaccgacctgctgaacgacctggagaagctgagaaagcaggaggcccacctgagaaaggagaagtacagcaccgacgccaagatcaagaccttcgaggacaacctgatcgaggccagaaaggaggtggaggtgagccagagcaagtacaacgccctgagcctgcagctgagcaacaagcagaccgagctgatccagaaggacatggacatcaccctggtgagaaaggagctgcaggagctgcagaacctgtacaagcagaacagcacccacaccgcccagcaggccgagctgatccagcagctgcaggtgctgaacatggacacccagaaggtgctgagaaaccaggaggacgtgcacaccgccgagagcatcagctaccagaaggtgtgcttctacagcgtgatcaagatgtag

SEQ ID NO: 43061 - protein, 179 aa, Artificial Sequence
  derived and/or modified sequence
MAVFKTTLWRLISGTLGIICLSLMSTLGILLKNSFTKLSIEPAFTPGPNIELQKDSDCCSCQEKWVGYRCNCYFISSEQKTWNESRHLCASQKSSLLQLQNTDELDFMSSSQQFYWIGLSYSEEHTAWLWENGSALSQYLFPSFETFNTKNCIAYNPNGNALDESCEDKNRYICKQQLI

SEQ ID NO: 43062 - DNA, 540 bp, Artificial Sequence
  derived and/or modified sequence
atggcggtctttaagaccactctgtggcgattgatatcaggcaccctaggcataatctgtctaagccttatgtccacccttggtattctgctcaaaaacagctttaccaagctgtcaatcgaaccagcatttaccccgggacccaatatcgaactgcagaaggactccgattgctgctcttgccaggagaagtgggttgggtataggtgcaattgctatttcatctccagcgagcagaagacctggaatgagtctcggcacctttgtgccagccaaaaaagttccttactgcagctgcagaacaccgacgaactggatttcatgagcagttctcaacagttctactggatcgggctgagttatagtgaggagcacactgcctggctctgggagaatggcagcgctttatcccaatatctgttccccagttttgaaacattcaacacaaagaattgcattgcctataatccaaatggcaacgcacttgatgaaagttgtgaagataagaaccgatatatttgtaagcagcagctcatctag

SEQ ID NO: 43063 - DNA, 540 bp, Artificial Sequence
  derived and/or modified sequence
atggctgtgtttaaaaccaccttgtggaggcttatttctggcacactggggattatatgcctaagtctgatgtctacacttggaatcttgcttaagaatagtttcaccaaattgtctatcgagcccgcatttaccccaggccctaacatcgagctgcagaaagattccgactgttgctcgtgccaagaaaagtgggttggctacagatgcaactgctatttcatcagctccgaacagaagacatggaatgaatcccgtcacttgtgcgctagtcagaagagcagtctgttacaactccagaacactgatgaacttgactttatgtcttcctcacagcaattttactggatagggctgtcctattcagaagaacataccgcctggctgtgggagaacggctctgctttgtcccagtatctctttccctcatttgagacttttaacacgaaaaactgcattgcctacaatcccaatgggaacgcactggatgaaagctgtgaagataagaatagatacatttgtaaacagcagctgatttag

SEQ ID NO: 43064 - DNA, 543 bp, Artificial Sequence
  derived and/or modified sequence
atggccgtgtttaaaactacgctgtggcgtttgatctccggcaccctggggatcatctgcctgtctctaatgagtaccctcggcatccttctgaagaacagcttcactaagctgtccattgagccagcattcactcctggccctaatatcgaactgcagaaggacagtgactgctgttcgtgccaggagaaatgggttggctacagatgtaactgctattttatctcttccgagcagaagacatggaatgaaagcagacatctttgcgccagtcagaagagtagcttacttcaactgcagaacaccgacgagctgcaagacttcatgtcctcctcacaacagttttactggattggcctgagctacagcgaggagcacacagcatggttgtgggaaaacggcagtgcactgagtcaatacctgtttccaagcttcgagacttttaacaccaaaaactgtatcgcttataatccaaacggaaacgcgcttgatgagtcttgtgaggacaagaacaggtacatctgcaaacagcagctcatttag

SEQ ID NO: 43065 - DNA, 3258 bp, Artificial Sequence
  derived and/or modified sequence
ctgtattgtggttcctggaacacttcagaggcttgtgattctactgcttcttattcacactataatacatgtctcaccaatagatgattcaagaacatcatttaaatacacaatttttcattctctatttttgctaaatttcttcatactcaactttcagattctttaatctccagctcagcttcaacaattcaacgctgttctttctgaaaaagtacacatcgtgccttctctacttcgctcttggaacataatttctcatggcagtgtttaagaccactctgtggaggttaatttctgggaccttagggataatatgcctttcgttgatgtctacgttgggaattttgttgaaaaattcttttactaaactgagtattgagccagcatttactccaggacccaacatagaactccagaaagactctgactgctgttcttgccaagaaaaatgggttgggtaccggtgcaactgttacttcatttccagtgaacagaaaacttggaacgaaagtcggcatctctgtgcttctcagaaatccagcctgcttcagcttcaaaacacagatgaactggattttatgagctccagtcaacaattttactggattggactctcttacagtgaggagcacaccgcctggttgtgggagaatggctctgcactctcccagtatctatttccatcatttgaaacttttaatacaaagaactgcatagcgtataatccaaatggaaatgctttagatgaatcctgtgaagataaaaatcgttatatctgtaagcaacagctcatttaaatgtttcttggggcagagaaggtggagagtaaagacccaacattactaacaatgatacagttgcatgttatattattactaattgtctacttctggagtctataaaatgtttttaaacagtgtcatatacaattgtcatgtatgtgaaacaatgtgttttaaaattgatgaaattcgttcacctacatttgagaattataaaattaacataaagaattttgtattttcatttaatgtatatatttaatgttaaattcaatgtagttttattacacatttatgtaattttatttacattcttgctaattctcagcagaaatttaaataagatttaattcacatcaaataaaatttagaaaataaaatttaactcacactgcccaggctggagcatagtggcaagatcatagctcattgcaagctcaagtgatcctcctgactcagcctcccaagtagctaggactgcaggcaccatgtcactatgcccgactaatttttaatttttaattttttgtcaagacaaggtcttgctatgttgcccaggctggtcttgaactcctggcctcaagggattctcccaccttggattcccaaagtgctgggattataggtgtgaaccaccatccctggccctcttcacattcttgtatgaagattgatttgggaaaaatgcatttcaggtaactgacaaaagatataggatgaaaaataatatctttcaaatgtttaatttgaactaagagagcttatgcattgcactttctggagatttgtaatgttttggttttgttgtccatgtgactacaaaataatatattttttaattaaaaaatttaaaataatacaggcaagcatgtaatgattatcaatatttttttccaccaactatcctatacccctgacctcctttcattaggcattatcttctgttttgattttaacacttagagtggttttctctgttatgaatcaaagctgatctattttcatcatttttgtgatgaaaaaattaattttgattgacttaggatggaaggatttggactgggtgtggtggtttatgcctgtaatcgcagcactttgggaggccaaggcgggtggatcacttgaggtcaggagtttgagaccagcctggccaacatggtgaaaccctgtctctactaaaaatacaaaaattggctgggtgtggtagtgcacacctgtaatcccagctatttgggaggctgagtcgagaggatcgcttgaacctaggaggtggaggttgcagtgagtcgagattgcaccactgcactccagcctgggtgacagagccagactcctctccaaaaaaaaaaaaaaaaaaaaaagatgaaaggatttggaaccttaattgcatctgaaaaactgcctcacctttgttatttagtgtactccaaccacggagtaacatcccatcataatcccaaatcctactcaaacaaaaggggaagggattatgcaggtgtacactaggccactggtgtaccaattagaaaccactttagagttatgcctactgtacccacataatcctaaaaatatgttacaactgctacttcatagtttatgccacttattttattttttacttttattatttttttttctgagacacggtttcattcccattgcccaggctgtagtgcaatgatgcaatcatggttcactgcagcttcaacttcccaggctcaagggatcctcccacctcagccttctgagtacttgggactcaggtgcgagccatcatgctcagctaattttttgtatcatttgtagaaatggggttttgtattgttgcccaggctgatcttgaactcctggggtcaaggattctgcccgccttggcctcctaaagggctggaattacaggcataagccactgtgcccggccagtttatataatttaaacactgccttttggttccttgattcccatatgctaggacaagtaattattattttattttattttactttaagttctgggttacatgtgcagaacctgcaggtttgttacataggtatacatgttccaaggtggtttgctgcacctattgacccatcatctaggttttaagtcccacatgcattaggtatttgtcctaatgctcttcctccccttgccccccaccccccgacaggccttggtctgtgatgttcacctccctgtgtccatgtgttctcattgttcaactcccacttattagtaagaacatgtggtgtttggttttctgttcctgtgttagtttgctgagaatgatggtttccagcttcatccatgtcgctgcaaaggacatgaactcattctttttatggctgcatagtattccatggtgtatatgtgccatattttctttatccagtctatcactgatgggcatttgggttggttccaagtctttgctatggtaaatagtgctgcaataaacatacgtgtgca

SEQ ID NO: 43066 - DNA, 2088 bp, Artificial Sequence
  derived and/or modified sequence
gttttgctcttgtcacccaggctggagtgcaatggtgcgatctcagctcatcaagttcaagagactctaatgcctcagcctcccaagtagcaggggttacagattctttaatctccagctcagcttcaacaattcaacgctgttctttctgaaaaagtacacatcgtgccttctctacttcgctcttggaacataatttctcatggcagtgtttaagaccactctgtggaggttaatttctgggaccttagggataatatgcctttcgttgatgtctacgttgggaattttgttgaaaaattcttttactaaactgagtattgagccagcatttactccaggacccaacatagaactccagaaagactctgactgctgttcttgccaagaaaaatgggttgggtaccggtgcaactgttacttcatttccagtgaacagaaaacttggaacgaaagtcggcatctctgtgcttctcagaaatccagcctgcttcagcttcaaaacacagatgaactggattttatgagctccagtcaacaattttactggattggactctcttacagtgaggagcacaccgcctggttgtgggagaatggctctgcactctcccagtatctatttccatcatttgaaacttttaatacaaagaactgcatagcgtataatccaaatggaaatgctttagatgaatcctgtgaagataaaaatcgttatatctgtaagcaacagctcatttaaatgtttcttggggcagagaaggtggagagtaaagacccaacattactaacaatgatacagttgcatgttatattattactaattgtctacttctggagtctataaaatgtttttaaacagtgtcatatacaattgtcatgtatgtgaaacaatgtgttttaaaattgatgaaattcgttcacctacatttgagaattataaaattaacataaagaattttgtattttcatttaatgtatatatttaatgttaaattcaatgtagttttattacacatttatgtaattttatttacattcttgctaattctcagcagaaatttaaataagatttaattcacatcaaataaaatttagaaaataaaatttaactcacactgcccaggctggagcatagtggcaagatcatagctcattgcaagctcaagtgatcctcctgactcagcctcccaagtagctaggactgcaggcaccatgtcactatgcccgactaatttttaatttttaattttttgtcaagacaaggtcttgctatgttgcccaggctggtcttgaactcctggcctcaagggattctcccaccttggattcccaaagtgctgggattataggtgtgaaccaccatccctggccctcttcacattcttgtatgaagattgatttgggaaaaatgcatttcaggtaactgacaaaagatataggatgaaaaataatatctttcaaatgtttaatttgaactaagagagcttatgcattgcactttctggagatttgtaatgttttggttttgttgtccatgtgactacaaaataatatattttttaattaaaaaatttaaaataatacaggcaagcatgtaatgattatcaatatttttttccaccaactatcctatacccctgacctcctttcattaggcattatcttctgttttgattttaacacttagagtggttttctctgttatgaatcaaagctgatctattttcatcatttttgtgatgaaaaaattaattttgattgacttaggatggaaggatttggactgggtgtggtggtttatgcctgtaatcgcagcactttgggaggccaaggcgggtggatcacttgaggtcaggagtttgagaccagcctggccaacatggtgaaaccctgtctctactaaaaatacaaaaattggctgggtgtggtagtgcacacctgtaatcccagctatttgggaggctgagtcgagaggatcgcttgaacctaggaggtggaggttgcagtgagtcgagattgcaccactgcactccagcctgggtgacagagccagactcctctccaaaaaaaaaaaaaaaaaaaaaa

SEQ ID NO: 43067 - DNA, 3261 bp, Artificial Sequence
  derived and/or modified sequence
ctgtattgtggttcctggaacacttcagaggcttgtgattctactgcttcttattcacactataatacatgtctcaccaatagatgattcaagaacatcatttaaatacacaatttttcattctctatttttgctaaatttcttcatactcaactttcagattctttaatctccagctcagcttcaacaattcaacgctgttctttctgaaaaagtacacatcgtgccttctctacttcgctcttggaacataatttctcatggcagtgtttaagaccactctgtggaggttaatttctgggaccttagggataatatgcctttcgttgatgtctacgttgggaattttgttgaaaaattcttttactaaactgagtattgagccagcatttactccaggacccaacatagaactccagaaagactctgactgctgttcttgccaagaaaaatgggttgggtaccggtgcaactgttacttcatttccagtgaacagaaaacttggaacgaaagtcggcatctctgtgcttctcagaaatccagcctgcttcagcttcaaaacacagatgaactgcaggattttatgagctccagtcaacaattttactggattggactctcttacagtgaggagcacaccgcctggttgtgggagaatggctctgcactctcccagtatctatttccatcatttgaaacttttaatacaaagaactgcatagcgtataatccaaatggaaatgctttagatgaatcctgtgaagataaaaatcgttatatctgtaagcaacagctcatttaaatgtttcttggggcagagaaggtggagagtaaagacccaacattactaacaatgatacagttgcatgttatattattactaattgtctacttctggagtctataaaatgtttttaaacagtgtcatatacaattgtcatgtatgtgaaacaatgtgttttaaaattgatgaaattcgttcacctacatttgagaattataaaattaacataaagaattttgtattttcatttaatgtatatatttaatgttaaattcaatgtagttttattacacatttatgtaattttatttacattcttgctaattctcagcagaaatttaaataagatttaattcacatcaaataaaatttagaaaataaaatttaactcacactgcccaggctggagcatagtggcaagatcatagctcattgcaagctcaagtgatcctcctgactcagcctcccaagtagctaggactgcaggcaccatgtcactatgcccgactaatttttaatttttaattttttgtcaagacaaggtcttgctatgttgcccaggctggtcttgaactcctggcctcaagggattctcccaccttggattcccaaagtgctgggattataggtgtgaaccaccatccctggccctcttcacattcttgtatgaagattgatttgggaaaaatgcatttcaggtaactgacaaaagatataggatgaaaaataatatctttcaaatgtttaatttgaactaagagagcttatgcattgcactttctggagatttgtaatgttttggttttgttgtccatgtgactacaaaataatatattttttaattaaaaaatttaaaataatacaggcaagcatgtaatgattatcaatatttttttccaccaactatcctatacccctgacctcctttcattaggcattatcttctgttttgattttaacacttagagtggttttctctgttatgaatcaaagctgatctattttcatcatttttgtgatgaaaaaattaattttgattgacttaggatggaaggatttggactgggtgtggtggtttatgcctgtaatcgcagcactttgggaggccaaggcgggtggatcacttgaggtcaggagtttgagaccagcctggccaacatggtgaaaccctgtctctactaaaaatacaaaaattggctgggtgtggtagtgcacacctgtaatcccagctatttgggaggctgagtcgagaggatcgcttgaacctaggaggtggaggttgcagtgagtcgagattgcaccactgcactccagcctgggtgacagagccagactcctctccaaaaaaaaaaaaaaaaaaaaaagatgaaaggatttggaaccttaattgcatctgaaaaactgcctcacctttgttatttagtgtactccaaccacggagtaacatcccatcataatcccaaatcctactcaaacaaaaggggaagggattatgcaggtgtacactaggccactggtgtaccaattagaaaccactttagagttatgcctactgtacccacataatcctaaaaatatgttacaactgctacttcatagtttatgccacttattttattttttacttttattatttttttttctgagacacggtttcattcccattgcccaggctgtagtgcaatgatgcaatcatggttcactgcagcttcaacttcccaggctcaagggatcctcccacctcagccttctgagtacttgggactcaggtgcgagccatcatgctcagctaattttttgtatcatttgtagaaatggggttttgtattgttgcccaggctgatcttgaactcctggggtcaaggattctgcccgccttggcctcctaaagggctggaattacaggcataagccactgtgcccggccagtttatataatttaaacactgccttttggttccttgattcccatatgctaggacaagtaattattattttattttattttactttaagttctgggttacatgtgcagaacctgcaggtttgttacataggtatacatgttccaaggtggtttgctgcacctattgacccatcatctaggttttaagtcccacatgcattaggtatttgtcctaatgctcttcctccccttgccccccaccccccgacaggccttggtctgtgatgttcacctccctgtgtccatgtgttctcattgttcaactcccacttattagtaagaacatgtggtgtttggttttctgttcctgtgttagtttgctgagaatgatggtttccagcttcatccatgtcgctgcaaaggacatgaactcattctttttatggctgcatagtattccatggtgtatatgtgccatattttctttatccagtctatcactgatgggcatttgggttggttccaagtctttgctatggtaaatagtgctgcaataaacatacgtgtgca

SEQ ID NO: 43068 - DNA, 540 bp, Artificial Sequence
  derived and/or modified sequence
atggctgtgttcaagaccaccctgtggaggctcatcagcggcaccctgggcatcatctgcctgagcctgatgagcaccctgggcatcctgctgaagaacagcttcaccaagctgagcattgagcccgccttcaccccaggccccaacatcgagctgcagaaggacagcgactgctgcagctgccaggagaagtgggtgggctaccgctgcaactgctacttcatcagcagcgagcagaagacctggaatgaaagccgccacctgtgtgccagccagaagagcagcctgctgcagctgcagaacacagatgagctggacttcatgagcagcagccagcagttctactggattggcctgagctacagcgaggagcacacagcctggctgtgggagaatggcagcgccctgagccagtacctgttccccagctttgagaccttcaacaccaagaactgcatcgcctacaaccccaatggaaatgccctggatgagagctgtgaggacaagaaccgctacatctgcaagcagcagctgatctag

SEQ ID NO: 43069 - DNA, 543 bp, Artificial Sequence
  derived and/or modified sequence
atggctgtgttcaagaccaccctgtggaggctcatcagcggcaccctgggcatcatctgcctgagcctgatgagcaccctgggcatcctgctgaagaacagcttcaccaagctgagcattgagcccgccttcaccccaggccccaacatcgagctgcagaaggacagcgactgctgcagctgccaggagaagtgggtgggctaccgctgcaactgctacttcatcagcagcgagcagaagacctggaatgaaagccgccacctgtgtgccagccagaagagcagcctgctgcagctgcagaacacagatgagctgcaggacttcatgagcagcagccagcagttctactggattggcctgagctacagcgaggagcacacagcctggctgtgggagaatggaagtgccctgagccagtacctgttccccagctttgagaccttcaacaccaagaactgcatcgcctacaaccccaatggaaatgccctggatgagagctgtgaggacaagaaccgctacatctgcaagcagcagctgatctag

SEQ ID NO: 43070 - DNA, 540 bp, Artificial Sequence
  derived and/or modified sequence
atggccgtgttcaagaccaccctgtggcggctgatcagcggcaccctgggaatcatctgtctgagcttaatgtccactctcgggatcctgctgaagaacagctttactaaattatccatcgaaccagccttcacccccggtcccaatatcgaattacagaaagatagcgactgctgttcttgccaggagaagtgggtggggtaccggtgcaattgttatttcatcagctccgaacaaaaaacctggaacgaatcgcgccacttgtgcgccagtcaaaagagctcactgttacagttgcagaacaccgacgaactggactttatgtcctctagccaacagttttactggatcggtctgagttattctgaggagcacaccgcttggctctgggagaatggcagtgctctgagccagtacctctttccatctttcgagacatttaataccaaaaattgtatcgcttataatccaaatggcaacgctctcgatgagtcctgtgaggataagaatcggtatatttgcaagcagcagctaatctag

SEQ ID NO: 43071 - DNA, 540 bp, Artificial Sequence
  derived and/or modified sequence
atggccgtgttcaagaccaccctgtggcggctgatcagcggcaccctcggcatcatttgcctctcattgatgtccaccctcgggatactcctcaaaaacagctttaccaaacttagcatcgagccagcattcacaccaggacctaacatcgagctccagaaggattcagactgttgtagctgtcaggagaagtgggtgggctacagatgtaactgttattttataagctccgagcagaagacctggaatgaaagtcgccacctgtgtgcgtctcagaagtcatccctgctacaactccaaaatactgacgaattggactttatgtcatcttctcagcaattttattggattgggctcagttactctgaggagcatactgcctggttatgggagaatgggtcggcgttgtcgcagtacctttttccctcgtttgaaacatttaatacaaaaaactgcatcgcttacaacccgaatggcaatgcactggacgagtcatgtgaggacaaaaatcggtatatctgtaagcagcaattaatctag

SEQ ID NO: 43072 - DNA, 543 bp, Artificial Sequence
  derived and/or modified sequence
atggccgtgttcaagaccaccctgtggcggctgatcagcggcaccctgggcatcatatgtctgtcactaatgtccacactgggaatcttactgaagaatagctttactaagctgagtatcgaacccgccttcactcccggacccaacatcgagctgcaaaaggattccgactgttgctcttgtcaggagaaatgggtcggataccgttgcaactgctacttcatcagctccgagcaaaagacatggaatgagtctaggcacctttgcgcatcgcaaaaatcctcactcttgcagcttcaaaatacggacgagctgcaggatttcatgtcaagctctcagcaattctactggatcggcttgagctacagcgaggagcacacagcctggctttgggaaaacggcagtgcactctctcagtacctttttccgagctttgagacattcaacacaaagaattgcattgcttataatcccaatggcaatgccctggatgaaagttgcgaagataagaaccggtatatctgcaagcaacagctgatttag

SEQ ID NO: 43073 - DNA, 540 bp, Artificial Sequence
  derived and/or modified sequence
atggcagtgttcaagacgaccctctggaggctcatcagtggcacactcggaataatttgcctgtcactaatgagcaccttgggaattttgctgaaaaatagcttcaccaaattgagcattgaacccgctttcacccctggcccaaatattgagcttcagaaagacagcgattgttgtagctgtcaagagaaatgggttgggtatcgctgcaattgctattttatcagttcagaacaaaagacttggaatgagtctcgccacctgtgtgcttctcaaaagtcttccctgctccaactgcaaaacacagatgagctcgacttcatgtcgagctcccagcaattctattggattggcctgagttatagcgaagaacacactgcctggctatgggagaacgggtccgctctctcccagtatcttttccccagctttgaaaccttcaacacgaagaactgcatagcctataaccctaatggcaacgcactggacgaaagctgcgaagacaaaaaccggtacatttgcaaacagcagctgatttag

SEQ ID NO: 43074 - DNA, 540 bp, Artificial Sequence
  derived and/or modified sequence
atggccgtttttaagactacgctgtggcgacttatctccgggacactggggatcatttgcctgtctctgatgagcaccctgggtatactactgaagaactccttcaccaaattgtcaattgagcccgctttcacccctggaccaaatattgaactacagaaggactccgattgctgttcctgccaggaaaagtgggtgggctatcgttgcaattgctacttcatatcttcagagcaaaaaacttggaatgagtctaggcatctgtgcgcttcccagaaatcaagtctgctgcagcttcagaatacagacgaactggacttcatgagctccagtcaacagttctattggattggattgagctactccgaggaacacaccgcgtggttgtgggagaacggatccgccctctcccagtacttgttccctagcttcgagacttttaataccaaaaactgcatcgcttataatccaaatgggaatgcactggatgaatcttgcgaggataagaaccggtacatctgtaagcagcagctgatctag

SEQ ID NO: 43075 - DNA, 543 bp, Artificial Sequence
  derived and/or modified sequence
atggcagttttcaaaactactttgtggcggttaatttcaggaacactgggaataatttgcctgagcctgatgagcacactgggtattctgttaaaaaattcctttacaaagctgagcatcgaacctgcgtttaccccagggcctaatatagagctccaaaaagacagtgactgttgtagttgtcaagagaaatgggtcgggtaccgttgtaattgctactttatcagcagtgagcagaagacctggaatgaatcccggcacctgtgcgcttctcagaaatctagtttactccagctgcagaacaccgacgagcttcaggatttcatgagctcatctcagcagttctactggatcgggctttcatactcagaggagcacacggcatggctatgggagaacgggagtgccttgtcccagtacttgtttcctagcttcgaaacattcaacacaaagaactgtattgcctacaatcctaatggaaacgctctcgatgaatcatgtgaagacaaaaaccgttacatctgtaagcagcaactgatatag

SEQ ID NO: 43076 - DNA, 540 bp, Artificial Sequence
  derived and/or modified sequence
atggccgtgttcaagaccaccctgtggagactgatcagcggcaccctgggcatcatctgcctgagcctgatgagcaccctgggcatcctgctgaagaacagcttcaccaagctgagcatcgagcccgccttcacccccggccccaacatcgagctgcagaaggacagcgactgctgcagctgccaggagaagtgggtgggctacagatgcaactgctacttcatcagcagcgagcagaagacctggaacgagagcagacacctgtgcgccagccagaagagcagcctgctgcagctgcagaacaccgacgagctggacttcatgagcagcagccagcagttctactggatcggcctgagctacagcgaggagcacaccgcctggctgtgggagaacggcagcgccctgagccagtacctgttccccagcttcgagaccttcaacaccaagaactgcatcgcctacaaccccaacggcaacgccctggacgagagctgcgaggacaagaacagatacatctgcaagcagcagctgatctag

SEQ ID NO: 43077 - DNA, 543 bp, Artificial Sequence
  derived and/or modified sequence
atggccgtgttcaagaccaccctgtggagactgatcagcggcaccctgggcatcatctgcctgagcctgatgagcaccctgggcatcctgctgaagaacagcttcaccaagctgagcatcgagcccgccttcacccccggccccaacatcgagctgcagaaggacagcgactgctgcagctgccaggagaagtgggtgggctacagatgcaactgctacttcatcagcagcgagcagaagacctggaacgagagcagacacctgtgcgccagccagaagagcagcctgctgcagctgcagaacaccgacgagctgcaggacttcatgagcagcagccagcagttctactggatcggcctgagctacagcgaggagcacaccgcctggctgtgggagaacggcagcgccctgagccagtacctgttccccagcttcgagaccttcaacaccaagaactgcatcgcctacaaccccaacggcaacgccctggacgagagctgcgaggacaagaacagatacatctgcaagcagcagctgatctag

SEQ ID NO: 43078 - protein, 994 aa, Artificial Sequence
  derived and/or modified sequence
MSYDYHQNWGRDGGPRSSGGGYGGGPAGGHGGNRGSGGGGGGGGGGRGGRGRHPGHLKGREIGMWYAKKQGQKNKEAERQERAVVHMDERREEQIVQLLNSVQAKNDKESEAQISWFAPEDHGYGTEVSTKNTPCSENKLDIQEKKLINQEKKMFRIRNRSYIDRDSEYLLQENEPDGTLDQKLLEDLQKKKNDLRYIEMQHFREKLPSYGMQKELVNLIDNHQVTVISGETGCGKTTQVTQFILDNYIERGKGSACRIVCTQPRRISAISVAERVAAERAESCGSGNSTGYQIRLQSRLPRKQGSILYCTTGIILQWLQSDPYLSSVSHIVLDEIHERNLQSDVLMTVVKDLLNFRSDLKVILMSATLNAEKFSEYFGNCPMIHIPGFTFPVVEYLLEDVIEKIRYVPEQKEHRSQFKRGFMQGHVNRQEKEEKEAIYKERWPDYVRELRRRYSASTVDVIEMMEDDKVDLNLIVALIRYIVLEEEDGAILVFLPGWDNISTLHDLLMSQVMFKSVNQTQVFKRTPPGVRKIVIATNIAETSITIDDVVYVIDGGKIKETHFDTQNNISTMSAEWVSKANAKQRKGRAGRVQPGHCYHLYNGLRASLLDDYQLPEILRTPLEELCLQIKILRLGGIAYFLSRLMDPPSNEAVLLSIRHLMELNALDKQEELTPLGVHLARLPVEPHIGKMILFGALFCCLDPVLTIAASLSFKDPFVIPLGKEKIADARRKELAKDTRSDHLTVVNAFEGWEEARRRGFRYEKDYCWEYFLSSNTLQMLHNMKGQFAEHLLGAGFVSSRNPKDPESNINSDNEKIIKAVICAGLYPKVAKIRLNLGKKRKMVKVYTKTDGLVAVHPKSVNVEQTDFHYNWLIYHLKMRTSSIYLYDCTEVSPYCLLFFGGDISIQKDNDQETIAVDEWIVFQSPARIAHLVKELRKELDILLQEKIESPHPVDWNDTKSRDCAVLSAIIDLIKTQEKATPRNFPPRFQDGYYS

SEQ ID NO: 43079 - protein, 994 aa, Artificial Sequence
  derived and/or modified sequence
MSYDYHQNWGRDGGPRSSGGGYGGGPAGGHGGNRGSGGGGGGGGGGRGGRGRHPGHLKGREIGMWYAKKQGQKNKEAERQERAVVHMDERREEQIVQLLNSVQAKNDKESEAQISWFAPEDHGYGTEVSTKNTPCSENKLDIQEKKLINQEKKMFRIRNRSYIDRDSEYLLQENEPDGTLDQKLLEDLQKKKNDLRYIEMQHFREKLPSYGMQKELVNLIDNHQVTVISGETGCGKTTQVTQFILDNYIERGKGSACRIVCTQPRRISAISVAERVAAERAESCGSGNSTGYQIRLQSRLPRKQGSILYCTTGIILQWLQSDPYLSSVSHIVLDEIHERNLQSDVLMTVVKDLLNFRSDLKVILMSATLNAEKFSEYFGNCPMIHIPGFTFPVVEYLLEDVIEKIRYVPEQKEHRSQFKRGFMQGHVNRQEKEEKEAIYKERWPDYVRELRRRYSASTVDVIEMMEDDKVDLNLIVALIRYIVLEEEDGAILVFLPGWDNISTLHDLLMSQVMFKSGTMSQVFKRTPPGVRKIVIATNIAETSITIDDVVYVIDGGKIKETHFDTQNNISTMSAEWVSKANAKQRKGRAGRVQPGHCYHLYNGLRASLLDDYQLPEILRTPLEELCLQIKILRLGGIAYFLSRLMDPPSNEAVLLSIRHLMELNALDKQEELTPLGVHLARLPVEPHIGKMILFGALFCCLDPVLTIAASLSFKDPFVIPLGKEKIADARRKELAKDTRSDHLTVVNAFEGWEEARRRGFRYEKDYCWEYFLSSNTLQMLHNMKGQFAEHLLGAGFVSSRNPKDPESNINSDNEKIIKAVICAGLYPKVAKIRLNLGKKRKMVKVYTKTDGLVAVHPKSVNVEQTDFHYNWLIYHLKMRTSSIYLYDCTEVSPYCLLFFGGDISIQKDNDQETIAVDEWIVFQSPARIAHLVKELRKELDILLQEKIESPHPVDWNDTKSRDCAVLSAIIDLIKTQEKATPRNFPPRFQDGYYS

SEQ ID NO: 43080 - DNA, 2985 bp, Artificial Sequence
  derived and/or modified sequence
atgagctacgactaccaccagaattggggacgggacgggggccctagatcctctgggggcggctatggcggcgggccagccggggggcatggcggtaatcgggggtctggcgggggaggaggtggcgggggtgggggcaggggcggacgcggtcgacacccaggtcatctgaagggcagggagatcggcatgtggtacgctaaaaaacaaggccagaagaataaggaggcagaacgccaggaaagggcggtggtgcacatggatgagagaagggaagaacagatcgtgcagctgctgaactcagttcaggccaaaaacgacaaggaatctgaggcacaaataagttggttcgctcccgaagatcacggctacgggactgaggtaagcaccaaaaacactccctgctccgagaacaaactcgatatccaggagaagaagttgatcaatcaggagaagaaaatgtttcgaataagaaatcgcagctacattgatagggacagcgaatacctgctgcaggaaaatgagcctgacggaaccctagatcagaagctgctggaggacctgcaaaagaaaaaaaacgacctgcggtacatagaaatgcaacattttcgggaaaagctacctagctacggcatgcagaaagagttagtgaacctcatagacaaccaccaggtgaccgttatttctggcgagaccggctgcggcaaaaccacacaggtgacacagtttattctagataactatatcgagcgggggaaaggcagtgcctgcaggattgtgtgcacccagcccagacgaatctccgccatctcagttgcagagagggtcgccgccgaacgagcggagtcatgcggctctggaaactctaccggctatcagatccggcttcagagcaggctgcctagaaagcaaggctccatcttatattgtacaaccgggatcattctgcagtggctacagagcgatccttacctaagctcggtttcacatattgtactggatgaaatccatgaaagaaacttgcagagtgatgttctgatgacggtggtcaaggacctgttgaactttagatcagatctcaaggtcattttaatgtccgcaactctgaacgccgagaaattttccgagtattttgggaactgtcccatgattcacataccaggatttacgttccctgtggtggagtacctgctggaggacgtgatcgaaaagatcaggtacgtgcccgaacagaaagagcaccggtcacagttcaaacgcggcttcatgcaagggcatgtcaacaggcaagagaaagaggaaaaggaggctatctacaaggagcgctggcctgattacgtgcgggaactccgacgtcggtattctgcgtccaccgtcgatgtgattgagatgatggaagacgataaagtggatctgaacctgatcgtggctttgatcagatatatagtgcttgaggaagaagacggtgccattttggtgttcctgccaggatgggacaacataagcaccttacatgacttgttaatgagccaggttatgtttaagagcgtaaatcagactcaggtgttcaaacggacaccaccaggagtgagaaaaatcgtgatcgctaccaatattgcggaaaccagtatcacaatagatgacgttgtctatgtgatcgatggaggcaagattaaggagacccatttcgacacacaaaataacattagcactatgtctgccgaatgggtgtccaaggctaacgccaagcagcgaaagggcagggccggccgggtccagcctggccactgctatcatctctataacggcctgcgagctagtcttctggacgactaccaattgcccgaaattctgcgaacacccctcgaagagctttgtcttcaaatcaaaattctgagactaggaggtatcgcatatttcctgtcccgccttatggaccccccttctaatgaagcagtgctcctgtccattcgacaccttatggaattgaatgcccttgataagcaagaagagctgacacctctgggcgttcacctggcccgcttgccagtggagcctcacatcgggaagatgatactgtttggagccctcttctgctgccttgacccagtccttactatcgccgcgtctttatccttcaaggacccctttgtgattcctctgggaaaagaaaaaattgcggacgctcggagaaaggagctcgcgaaagatacacgatcagatcacctgaccgttgtgaatgctttcgaggggtgggaagaagcgagaaggcggggatttcggtatgagaaggattactgctgggagtatttcctcagctctaacacgctgcagatgctccataacatgaaggggcaatttgcagagcacctattgggagctggcttcgtgtcatcccggaaccccaaggaccccgaaagcaatatcaactccgataacgagaaaattatcaaggctgtgatctgtgcaggcctgtaccctaaggtcgcaaagatacgtctcaacctgggcaaaaaacgaaagatggtgaaggtgtataccaagaccgacggcctagtagccgtgcatccgaagtcagtgaacgtggagcagacagattttcactataactggctcatctatcatctcaaaatgcggacctctagtatctacctgtacgattgtaccgaagtctctccttactgtcttctctttttcggcggggatatcagcatacaaaaagacaatgatcaagagaccatagctgtcgacgagtggattgttttccagtccccagcccgaatcgctcacctggtcaaagagttacgcaaggagctcgatatcctgctccaggaaaaaattgaatcaccacatcctgttgactggaacgacactaagagccgggattgtgccgtcctctcagctatcatcgaccttatcaagacccaggagaaggcaactcctagaaactttccccccaggtttcaggatggttattatagctag

SEQ ID NO: 43081 - DNA, 2985 bp, Artificial Sequence
  derived and/or modified sequence
atgtcttacgactaccaccagaactgggggagggatggaggaccacggtctagtggggggggctacgggggtggcccagctggtgggcacggagggaaccgcggttcaggcgggggggggggagggggcggcggaggccgaggtgggagagggcggcaccccgggcacctgaagggaagggagatcggaatgtggtatgcaaagaagcaggggcagaaaaacaaagaagcagagagacaggaaagagccgttgtacacatggacgagcgaagagaggaacagattgtgcagctgctaaactctgtacaggccaagaatgacaaggagtcagaagctcaaatctcttggttcgcgccagaagaccacggctacggtaccgaagtgagcaccaagaatacaccttgcagtgagaataagctggacattcaggagaaaaagctcatcaaccaggagaagaagatgtttcgcattcgcaatcgcagttacatagaccgggattctgaataccttcttcaagaaaatgaacctgacggcaccctggatcagaagctgctggaagatctgcaaaaaaagaagaatgatctcagatacatagagatgcagcactttcgtgagaagctacctagctacggtatgcagaaggaactcgttaacttgatagataaccatcaagtcacagttatatcgggtgaaacgggttgcggaaagacaacgcaggttacccagtttattttagacaactatattgagcggggtaagggaagcgcctgtagaatcgtgtgcactcagccccgcaggatctccgcaataagcgttgcagagcgggttgccgcggagcgggccgagtcctgcgggtccgggaattccactgggtatcagatccgcctgcagagtcggttgcctcgcaaacagggcagtattctgtattgcacaactggcatcatcctacaatggctgcagtccgacccctacctctcctccgtctcccacatagtcctggatgagattcatgaacgcaacttgcagtcagacgtgctcatgacagtggtgaaggaccttctgaattttagatcagatttgaaggtgatactcatgtcggctactctaaatgcagagaaattcagcgagtattttggtaactgcccgatgatccacatacccggattcacctttcccgtggttgaatatttgctggaagatgtgatcgagaagattcgctacgtccctgagcagaaggagcacagatctcagttcaagcggggatttatgcagggacacgtgaatagacaagagaaggaggagaaagaggccatttataaggagcgctggcccgactatgtgcgtgagctcagaaggcgctatagcgcctctacagtcgacgtaatcgaaatgatggaggacgataaggttgatctgaacttaattgttgcactcatccggtacattgtgctggaggaggaagatggtgcgatacttgttttcctccctggctgggataatatatcgaccctgcacgacttgctaatgtcccaggtgatgttcaaaagtgggaccatgtctcaggtgtttaaaaggacccctccgggggtgcgcaagattgtgatcgctacaaatatcgccgagacttccattaccatcgacgacgtggtttacgtgatcgacggtggcaaaatcaaggagacccacttcgacactcaaaataatatctctactatgtcggctgaatgggtatctaaggccaacgcgaaacagcgcaaaggaagagcagggagagttcagccggggcactgctaccacctgtataatggcttgagggccagcctgctggatgattatcagctaccggaaatcctgaggaccccgttggaagagctatgccttcagatcaagatcctcagactgggaggcatcgcatatttccttagcagattgatggacccccccagtaatgaagcggtgctcctgagcatccgacatttgatggagcttaacgctcttgataagcaggaagagctgacacctttgggtgtgcaccttgcaaggctgccagtggaaccccatataggcaagatgatcctgtttggggccttgttttgctgcctagaccccgttctgaccatcgcagcctcactatcttttaaagacccgttcgtgatcccactggggaaggaaaagatcgcggatgcccggcggaaggaactagccaaggataccaggtccgatcatttaacagttgtgaacgctttcgaaggctgggaggaagcccggaggagaggttttcggtacgagaaggactattgttgggagtacttcctaagcagcaatactctgcagatgctgcataatatgaaaggccagtttgctgagcacctgttaggggcggggtttgtgtcatcccggaatcctaaagatccagagtctaacatcaacagtgataacgaaaagatcatcaaggcggtcatttgcgctggtctctatcccaaagtcgctaagattcgtctgaacctgggcaaaaagagaaaaatggtgaaagtatacacaaagaccgatggattggttgcagtgcacccgaaatcagtcaacgtagagcaaacggattttcattacaattggttgatctaccatcttaagatgcgaacctcaagcatctacctatacgattgtacagaagttagtccgtactgtctgttgtttttcgggggagacatatcgattcagaaggacaacgatcaggaaaccatagcagttgatgagtggatcgtttttcagtcgccggctcgcatcgctcacctggttaaggaactcagaaaggagttagacattctcctccaggagaaaatcgaatctccacaccctgtggactggaatgacactaaaagcagggactgtgccgtgctttccgctattatcgacctgatcaaaactcaggaaaaagccaccccaaggaactttccacctcggtttcaggatggatattattcctag

SEQ ID NO: 43082 - DNA, 2985 bp, Artificial Sequence
  derived and/or modified sequence
atgtcctatgactaccaccagaactggggcagagatggcggccccaggagcagcggcggcggctacggcggcggccctgctgggggccacggcggcaacagaggcagcggcggcggcggcggcggcggcggcggcggccggggcggccggggccgccaccctggccacctgaagggccgggagatcggcatgtggtacgccaagaagcagggccagaagaacaaggaggccgagcggcaggagagagctgtggtgcacatggatgagcggcgggaggagcagatcgtgcagctgctgaacagcgtgcaggccaagaatgacaaggagagcgaggcccagatctcctggtttgcccctgaggaccacggctacggcacagaggtgtccaccaagaacaccccctgcagcgagaacaagctggacatccaggagaagaagctgatcaaccaggagaagaagatgttccgcatccggaacagaagctacatcgaccgggacagcgagtacctgctgcaggagaatgaaccagatggcaccctggaccagaagctgctggaggacctgcagaagaagaagaatgacctgcgctacatcgagatgcagcacttccgggagaagctgcccagctatggcatgcagaaggagctggtgaacctgattgacaaccaccaggtgaccgtcatctctggagagaccggctgtgggaagaccacccaggtgacccagttcatcctggacaactacatcgagcggggcaaaggaagtgcctgcagaattgtgtgcacccagccccggcgcatcagcgccatctctgtggccgagcgggtggccgctgagagagctgagagctgtggcagcggcaacagcacaggctaccagatccggctgcagagccggctgcccaggaagcagggcagcatcctgtactgcaccaccggcatcatcctgcagtggctgcagagcgacccctacctgagctctgtgagccacatcgtgctggatgagatccatgaaagaaacctgcagagtgatgtgctgatgacagtggtgaaggacctgctgaacttcagaagtgacctgaaggtgatcctgatgtctgccaccctgaatgctgagaagttcagcgagtacttcggcaactgccccatgatccacatccctggcttcaccttccctgtggtggagtacctgctggaggatgtgattgagaagatccgctacgtgcctgagcagaaggagcacaggagccagttcaagaggggcttcatgcagggccacgtgaaccggcaggagaaggaggagaaggaggccatctacaaggagcgctggccagactatgtgcgggagctgcggcggcgctacagcgccagcacagtggatgtgattgagatgatggaggatgacaaggtggacctgaacctgattgtggccctgatccgctacatcgtgctggaggaggaggatggagccatcctggtgttcctgcccggctgggacaacatcagcaccctgcatgacctgctgatgagccaggtgatgttcaagtctgtgaaccagacccaggtgttcaagaggaccccacctggggtgaggaagatcgtgattgccaccaacattgctgagaccagcatcaccattgatgatgtggtgtatgtgattgatggcggcaagatcaaggagacccactttgacacccagaacaacatcagcaccatgtctgctgagtgggtgtccaaggccaatgccaagcagaggaagggccgggccggccgggtgcagcccggccactgctaccacctgtacaacggcctgcgggccagcctgctggatgactaccagctgcctgagatcctgcggacccccctggaggagctgtgcctgcagatcaagatcctgcggctgggcggcatcgcctacttcctgagccggctgatggacccccccagcaatgaggccgtgctgctgagcatccgccacctgatggagctgaatgccctggacaagcaggaggagctgacccccctgggcgtgcacctggcccggctgcctgtggagccccacatcggcaagatgatcctgtttggagccctcttctgctgcctggaccctgtgctgaccatcgccgccagcctgtccttcaaggacccctttgtgatccccctgggcaaggagaagattgctgatgcccggaggaaggagctggccaaggacaccaggagtgaccacctgactgtggtgaatgcctttgagggctgggaggaggccaggagaagaggcttccgctatgagaaggactactgctgggagtacttcctgagcagcaacaccctgcagatgctgcacaacatgaagggccagtttgctgagcacctgctgggcgccggctttgtgagcagcaggaaccccaaggaccctgagagcaacatcaacagcgacaatgagaagatcatcaaggctgtgatctgtgccggcctgtaccccaaggtggccaagatccggctgaacctgggcaagaagaggaagatggtgaaggtgtacaccaagacagatggcctggtggccgtgcaccccaagtctgtgaatgtggagcagacagacttccactacaactggctgatctaccacctgaagatgaggaccagcagcatctacctgtatgactgcacagaggtgagcccctactgcctgctcttctttggaggagacatcagcatccagaaggacaatgaccaggagaccatcgctgtggatgagtggatcgtgttccagagccctgcccgcatcgcccacctggtgaaggagctgaggaaggagctggacatcctgctgcaggagaagattgagagcccccaccctgtggactggaatgacaccaagagccgggactgtgctgtgctgagcgccatcatcgacctgatcaagacccaggagaaggccacccccaggaacttccccccacgcttccaggacggctactacagctag

SEQ ID NO: 43083 - DNA, 2985 bp, Artificial Sequence
  derived and/or modified sequence
atgtcctatgactaccaccagaactggggcagagatggcggccccaggagcagcggcggcggctacggcggcggccctgctgggggccacggcggcaacagaggcagcggcggcggcggcggcggcggcggcggcggccggggcggccggggccgccaccctggccacctgaagggccgggagatcggcatgtggtacgccaagaagcagggccagaagaacaaggaggccgagcggcaggagagagctgtggtgcacatggatgagcggcgggaggagcagatcgtgcagctgctgaacagcgtgcaggccaagaatgacaaggagagcgaggcccagatctcctggtttgcccctgaggaccacggctacggcacagaggtgtccaccaagaacaccccctgcagcgagaacaagctggacatccaggagaagaagctgatcaaccaggagaagaagatgttccgcatccggaacagaagctacatcgaccgggacagcgagtacctgctgcaggagaatgaaccagatggcaccctggaccagaagctgctggaggacctgcagaagaagaagaatgacctgcgctacatcgagatgcagcacttccgggagaagctgcccagctatggcatgcagaaggagctggtgaacctgattgacaaccaccaggtgaccgtcatctctggagagaccggctgtgggaagaccacccaggtgacccagttcatcctggacaactacatcgagcggggcaaaggaagtgcctgcagaattgtgtgcacccagccccggcgcatcagcgccatctctgtggccgagcgggtggccgctgagagagctgagagctgtggcagcggcaacagcacaggctaccagatccggctgcagagccggctgcccaggaagcagggcagcatcctgtactgcaccaccggcatcatcctgcagtggctgcagagcgacccctacctgagctctgtgagccacatcgtgctggatgagatccatgaaagaaacctgcagagtgatgtgctgatgacagtggtgaaggacctgctgaacttcagaagtgacctgaaggtgatcctgatgtctgccaccctgaatgctgagaagttcagcgagtacttcggcaactgccccatgatccacatccctggcttcaccttccctgtggtggagtacctgctggaggatgtgattgagaagatccgctacgtgcctgagcagaaggagcacaggagccagttcaagaggggcttcatgcagggccacgtgaaccggcaggagaaggaggagaaggaggccatctacaaggagcgctggccagactatgtgcgggagctgcggcggcgctacagcgccagcacagtggatgtgattgagatgatggaggatgacaaggtggacctgaacctgattgtggccctgatccgctacatcgtgctggaggaggaggatggagccatcctggtgttcctgcccggctgggacaacatcagcaccctgcatgacctgctgatgagccaggtgatgttcaagagcggcaccatgagccaggtgttcaagaggaccccacctggggtgaggaagatcgtgattgccaccaacattgctgagaccagcatcaccattgatgatgtggtgtatgtgattgatggcggcaagatcaaggagacccactttgacacccagaacaacatcagcaccatgtctgctgagtgggtgtccaaggccaatgccaagcagaggaagggccgggccggccgggtgcagcccggccactgctaccacctgtacaacggcctgcgggccagcctgctggatgactaccagctgcctgagatcctgcggacccccctggaggagctgtgcctgcagatcaagatcctgcggctgggcggcatcgcctacttcctgagccggctgatggacccccccagcaatgaggccgtgctgctgagcatccgccacctgatggagctgaatgccctggacaagcaggaggagctgacccccctgggcgtgcacctggcccggctgcctgtggagccccacatcggcaagatgatcctgtttggagccctcttctgctgcctggaccctgtgctgaccatcgccgccagcctgtccttcaaggacccctttgtgatccccctgggcaaggagaagattgctgatgcccggaggaaggagctggccaaggacaccaggagtgaccacctgactgtggtgaatgcctttgagggctgggaggaggccaggagaagaggcttccgctatgagaaggactactgctgggagtacttcctgagcagcaacaccctgcagatgctgcacaacatgaagggccagtttgctgagcacctgctgggcgccggctttgtgagcagcaggaaccccaaggaccctgagagcaacatcaacagcgacaatgagaagatcatcaaggctgtgatctgtgccggcctgtaccccaaggtggccaagatccggctgaacctgggcaagaagaggaagatggtgaaggtgtacaccaagacagatggcctggtggccgtgcaccccaagtctgtgaatgtggagcagacagacttccactacaactggctgatctaccacctgaagatgaggaccagcagcatctacctgtatgactgcacagaggtgagcccctactgcctgctcttctttggaggagacatcagcatccagaaggacaatgaccaggagaccatcgctgtggatgagtggatcgtgttccagagccctgcccgcatcgcccacctggtgaaggagctgaggaaggagctggacatcctgctgcaggagaagattgagagcccccaccctgtggactggaatgacaccaagagccgggactgtgctgtgctgagcgccatcatcgacctgatcaagacccaggagaaggccacccccaggaacttccccccacgcttccaggacggctactacagctag

SEQ ID NO: 43084 - DNA, 2985 bp, Artificial Sequence
  derived and/or modified sequence
atgagctacgactaccaccagaactggggccgggacggcggcccccgaagctcaggcggcggatatggcggcggtccagcggggggtcacggcggtaatcgaggctccggcggaggcggaggtggtggtgggggtggacgcggcgggcggggtcggcaccctgggcatctcaaaggcagagagataggcatgtggtacgcaaagaaacagggccagaagaataaagaggccgaacggcaagagagagcagtggttcatatggacgagagacgcgaagagcagatagtgcaactgctcaacagcgtccaggccaagaacgataaggaaagtgaggctcaaatatcttggtttgcgcctgaggatcatggctacggaacggaagtcagcacaaagaatacgccatgtagcgagaacaagttggatattcaggagaagaagctgattaatcaggagaagaaaatgttcagaattcgaaaccgctcatatattgaccgtgatagtgagtaccttctgcaagaaaacgaacctgacgggactctcgaccaaaaactcctcgaggatctgcaaaagaaaaagaacgatctgcgctacatcgaaatgcagcacttcagggaaaaactgccatcttacggcatgcagaaggaactggtgaacctcattgacaatcatcaagtgacagtaattagcggggaaacgggatgtgggaaaaccacacaagtcactcagtttattctggacaactatattgagcgcgggaaggggtctgcctgtcgtattgtttgtacccagcctagacgtatcagcgcaatttctgtcgcagagcgggtggccgcagagagggcagagtcctgtgggagtgggaacagcaccgggtaccagataagactgcagtctaggctcccacggaagcagggtagtatcctctattgtacaactggcattattctgcagtggttgcagagcgacccctatctgagtagcgtctctcacatcgtcctggatgagatccatgagagaaaccttcagtccgacgtcctcatgactgtagtgaaggatctcctcaactttaggagcgatctgaaagtcatccttatgtcagctactcttaacgctgagaagttttctgagtattttggaaattgtcctatgattcatattccaggctttaccttccctgtggtcgaatatctgctggaggacgtgatcgagaagatacgatacgtgcctgaacagaaagagcatcgtagccagtttaagagaggctttatgcagggccacgtgaaccgccaggagaaagaagagaaggaagcgatctataaggagcgatggccagactatgtaagggaattgcggcgccgctattctgcgagcacagtggacgtcattgaaatgatggaagatgacaaagttgacctcaatctgatcgtggcgctgattaggtacatcgtattggaggaagaagacggagccatcctggtcttcctgccaggatgggacaatatttctaccctgcatgaccttttaatgagtcaggtcatgttcaagtccgtgaatcagacccaggtattcaagcggacccccccgggcgttaggaagatagtgatcgccactaatattgctgagacttccattactatcgatgatgtggtgtacgtgatcgacgggggaaagattaaggagacgcactttgacacccaaaataacattagcacaatgtctgcagagtgggtgtcaaaggccaacgccaagcagcggaaagggcgcgctggccgggtgcagccaggccactgctatcatctatacaacgggctcagggccagcctgttggatgattatcagctccccgagatccttagaacccctcttgaagagctgtgtctgcagatcaaaattctgcgactcggcgggattgcctactttctgtcacgtctgatggaccccccatcgaatgaagcagtgctgttgtccattcgacatttgatggagttgaatgccttggacaagcaggaggagctgaccccactaggtgttcatctcgccagactcccagtggagccacacatcggtaagatgattcttttcggtgcattattttgctgtctggatccagtcctgactatagctgccagcctgagctttaaggacccctttgtgatcccactgggtaaggaaaaaattgccgacgcacgtaggaaggagcttgcaaaagatacaagatccgatcacctaacagtcgtgaacgccttcgagggctgggaggaggcgcgcaggagaggctttagatacgagaaggactattgctgggaatacttcttgtcaagcaatacgctgcaaatgctgcacaatatgaaagggcaattcgctgaacaccttctgggagctggattcgtttctagtcggaacccaaaggatccggagagtaacattaattcggacaatgaaaagataatcaaagccgtcatatgcgccggcctttatcccaaggtggctaaaatcagactcaacctgggaaagaagcggaaaatggtaaaggtgtatacgaagactgatggcctggttgcggtgcacccgaaatctgtcaatgtagaacagactgactttcactacaattggctgatataccatctgaagatgagaacatcttctatttacttgtatgactgtacagaagtatcgccctactgtttgctcttttttggcggagatatatctatacagaaggacaacgaccaggaaaccatagcggttgacgaatggatcgtttttcagtcccccgcccgtatcgcccacctcgtgaaagaactccgcaaggagctggatattctcctacaggagaaaattgagagtccccatccagtggattggaatgataccaaatcacgtgattgcgccgtcctgtccgccattatcgacctgatcaaaacacaggaaaaagctacccctaggaactttccccctcgattccaagacggatactattcctag

SEQ ID NO: 43085 - DNA, 2985 bp, Artificial Sequence
  derived and/or modified sequence
atgagctacgactaccaccagaactggggccgggacggcggcccccgctcctccggagggggatatggaggggggcccgccggcggacacggagggaacagaggttccggagggggggggggcggcgggggaggcggccggggggggcggggacgccatcctgggcacctgaaaggtcgcgaaataggcatgtggtatgcaaagaaacagggccaaaagaataaggaggcagaacggcaagagcgtgccgtggtccatatggacgagagacgggaagaacagatagtgcagctgctcaactctgtccaggctaagaacgataaagaatccgaggcccagatcagctggtttgcacctgaagaccacggctacggaacagaagtctccactaaaaataccccttgcagcgagaataagctggatatccaagaaaaaaagctgatcaatcaggaaaagaagatgtttagaatacgtaatcggtcctacatcgatcgcgacagtgagtacctgttacaagaaaacgagccagacgggaccctggaccagaagcttcttgaggacctgcagaagaaaaagaacgatctgagatatatcgaaatgcagcattttagggagaaactcccgtcatacggaatgcaaaaagaactggtcaatctcatcgacaatcaccaagtcacggtgatctcaggggagaccggatgcgggaaaactacacaggtcactcaattcatcctggacaactacatagagcgggggaagggcagtgcatgtcgtattgtgtgcacgcagccacgcagaatctccgctatatctgtagctgaaagggtggcagccgagagggccgagtcatgtggtagcggaaatagtaccggatatcagattcgtctgcagtcccgcttgccaagaaagcagggaagcattctttactgcactacaggaatcatcctccagtggctccagtccgacccctacttgtcttctgtgagccatatcgtgctggacgaaatacacgagcggaatctccagtcggatgtattaatgaccgttgttaaagatctgttaaactttcgcagcgatttgaaggtaatcctgatgagtgctacacttaacgctgaaaagttttccgaatattttggcaactgtcccatgatccatattcccggatttaccttccccgttgtcgagtacttgctcgaggatgtgatcgagaaaatacgttatgtgccagagcagaaagagcacagaagccagttcaaacgcggattcatgcaggggcatgtgaaccgccaggaaaaggaagaaaaagaggccatttacaaggaaagatggccagactatgtgcgtgaactccgacgccgctactcagcttccacggtcgacgttattgagatgatggaagatgacaaggtggatttaaatctgattgtcgcgttgattcggtacatcgtgttagaggaggaagacggggctattctggtttttttacctgggtgggacaatatctctacactgcatgatctgctcatgtctcaagttatgtttaagagtgggaccatgagccaggtgtttaagagaacgccacctggtgtcagaaaaattgtgattgcaaccaatattgcagaaacaagcatcacaatcgacgatgtggtctacgtaattgacgggggtaaaattaaagagacccacttcgatactcagaataacatctccacaatgagtgccgagtgggtttctaaggccaacgcgaaacaacggaagggccgggctgggcgggtgcagccaggacattgctaccatctgtacaacggccttcgggccagcttgttggacgattaccagctacccgaaatactgcgaacacccctcgaagagctatgcctgcagataaagattctgcgcctcgggggaatcgcgtacttcctgagtcggctcatggacccaccttctaacgaggccgtcttactctccattcgacatctgatggaactgaacgcgcttgacaaacaggaagagctgactcccttaggtgttcatctggcccgtctgccagtagaaccccatatcggaaagatgatcctctttggtgccctattctgctgcttggacccagtgttaactattgccgcttcgctgtcatttaaagacccattcgtgatccccctggggaaagagaaaatagcggacgcacgcaggaaggagttggcgaaagacactaggtcggaccacctgactgttgtgaacgcatttgagggatgggaggaggcacgcagacgcggattcagatacgaaaaggactattgttgggaatacttcctgtccagcaatacactgcagatgctccataatatgaaagggcagttcgcagaacatctactgggggccgggttcgtgagcagtcggaatccaaaggacccagaatctaacattaactctgacaatgagaagatcatcaaagctgtcatttgtgcaggtctgtatccaaaggtggcgaaaatccgactgaatcttggaaaaaagaggaaaatggttaaggtgtataccaaaacagatgggctggtggccgtgcatccaaagagcgtaaatgtggaacaaactgatttccactacaactggctgatctatcacttaaaaatgaggaccagtagcatatacctctacgactgtaccgaagtctctccatactgcctactgttctttgggggcgacatttccattcaaaaagataatgaccaggagactatcgccgtggacgagtggatcgtgttccaaagccccgctagaattgcccacctggtcaaggaactcaggaaggaactggatattctgttacaggagaagatcgaatccccacacccagtcgattggaacgacaccaaatcccgcgactgtgcagtcctgtctgccataatcgatctaattaagacccaggaaaaggctactcctcggaatttcccgcctcggtttcaggatgggtactattcctag

SEQ ID NO: 43086 - DNA, 2985 bp, Artificial Sequence
  derived and/or modified sequence
atgtcttatgactatcatcagaattggggtcgtgatggcggaccaagatcaagcggcggagggtatggaggaggcccagccggtggtcacgggggaaaccgcggaagcgggggtgggggaggcggtggtggtggaggtagaggcggaagggggagacaccctgggcacctgaagggacgggaaatcgggatgtggtatgccaagaaacagggccagaagaacaaggaagctgagcggcaggaacgggcagtagtccatatggatgaacgcagagaggaacagattgtgcagctgctgaatagtgtgcaagccaagaacgacaaagagagcgaggcccagatttcatggtttgcgcctgaagatcacggatatggtacagaagtatcaactaagaacactccgtgctccgagaataaactggatatccaggaaaaaaagctcattaaccaggagaagaaaatgtttcgaatcagaaatagaagctacatcgatcgcgatagtgagtacctacttcaagaaaacgaacccgacggaacactcgaccagaagctcctcgaggacctgcagaagaagaagaatgacttgcgatacatcgagatgcagcactttcgcgagaaactgcctagttacggcatgcaaaaggaactcgttaacctcattgacaaccaccaggtcaccgtgatttctggggaaactgggtgtggcaaaaccacacaggtcacgcagttcatcctcgataattacattgaaagggggaaaggatcagcctgccggatcgtttgcacccagccacggaggatttcagccataagtgtcgcagaacgtgtcgctgccgaaagagcagagagctgcggaagtggcaactctacgggttatcagattcgtctgcagtcccgactcccacgcaaacaagggtccattctgtactgcaccacgggtatcatcctgcagtggctgcaaagtgacccctacctgagttctgtgagccacatcgtactagatgaaatccacgaaaggaatctccagtctgatgtcctgatgactgtcgtaaaggatcttcttaacttccggtcagacctaaaggtgatcctgatgtctgcaaccttgaacgccgaaaagttctctgagtatttcggtaattgtccaatgatccacatcccaggcttcaccttcccagttgtggaatatctgcttgaagacgtcattgagaagattcgttacgtacccgagcaaaaagagcataggagccagtttaagcgagggtttatgcagggccacgtaaaccgccaggagaaagaagagaaagaggccatttacaaggaaagatggccagactacgtgagggagctgagacgccgatacagcgcatcgaccgtcgacgttattgaaatgatggaggacgataaggtagaccttaacctaatcgtcgcacttattcggtacattgtgttggaggaagaggacggcgcaatcctggtgtttctccctggctgggacaacatatcaacattgcacgacctgctgatgagccaagtgatgtttaagagcgttaaccagacacaggtcttcaaacgaactcccccaggcgtgcggaagatagtaattgcaacaaacattgctgaaaccagcataactatcgatgatgtggtctacgttatagacgggggaaaaatcaaggagactcactttgacacacagaataatatcagcaccatgtctgccgagtgggtatcaaaagctaacgccaagcagaggaaaggtcgggctggtcgcgtacagcctggccactgttaccacctgtacaacggtcttcgagccagcctgctcgacgattatcagctgccagagattcttaggaccccccttgaggagttgtgcttgcagattaaaatcctccgcttaggcggaattgcgtattttctgtcccggcttatggatcctcccagcaacgaagccgtgttgctgagtattcgtcatctgatggagcttaatgccctcgacaaacaggaggagctcaccccactgggagtgcatctcgctcggctgccagttgaaccacatatcggaaagatgatattgttcggcgcactgttttgctgtctggacccagtcctgactatcgctgcaagtctgagcttcaaagatccctttgtgatccctctgggaaaggaaaagatagccgatgcccgaagaaaagaattggccaaagatactagaagcgatcatctgaccgtcgtcaatgcgttcgaaggatgggaagaagccagacgaagggggttcagatacgaaaaggactactgttgggagtactttctgagttccaatacactccagatgctgcacaacatgaaaggacaattcgccgagcacctgcttggcgctggcttcgtctcttcgaggaacccaaaagatcctgaaagcaacataaatagtgataacgagaaaattataaaggccgtcatctgcgctggtttgtatcctaaggtcgctaagatccgactgaacttaggcaaaaaacgcaagatggtgaaagtgtacaccaagacggatggcctggtagctgttcatccaaaatcggtaaacgtggagcaaacagacttccactacaattggctcatttatcacctaaagatgagaaccagctctatttatctgtatgattgcaccgaggtgagtccttactgcctcctcttcttcgggggagatatatcgatccaaaaagacaatgaccaggagacaattgccgtggatgaatggatagttttccagtcccccgcacgaattgcccacttggtgaaagagcttcggaaggagttggacatcctcctacaggagaaaatcgagtcaccccaccccgttgactggaatgatacaaaatcgcgggactgtgctgtgctatccgccatcatcgacctcattaaaacccaggagaaggccacccctcgaaattttccccctcggttccaggacggatattatagttag

SEQ ID NO: 43087 - DNA, 2985 bp, Artificial Sequence
  derived and/or modified sequence
atgagttatgactaccaccaaaattggggacgggacggcggtccaaggtcaagtgggggtgggtacgggggtggtccagccggaggtcacggagggaatcgtggatccggaggcggtgggggaggcggtggtggcggaagaggtgggagaggcaggcatccagggcatctcaagggcagggagatcggaatgtggtatgccaaaaagcagggccagaaaaacaaggaggctgaaagacaggagagagccgttgtgcacatggatgaacggagggaggaacaaatcgtgcagctgcttaactctgtccaggccaagaatgacaaggagtcggaggctcaaatttcatggtttgcacccgaagaccatggctacggcactgaggtttccactaagaacacaccatgtagcgagaataagctggacattcaagagaagaagctcatcaaccaagagaaaaagatgttccgaatacggaatagatcctacattgatcgggacagtgagtacctccttcaggagaacgaacccgacgggactctcgaccaaaaactgttggaagaccttcagaaaaagaaaaacgacctgagatacatcgaaatgcagcattttcgagagaagctcccctcctatgggatgcaaaaggaactggtcaatctcatcgacaatcatcaagttactgtcatcagcggcgaaaccgggtgcgggaaaactactcaggtgacccagtttattctcgacaattacatagagcgcggtaaaggctccgcctgccgcattgtgtgtacacagccgagacgaatcagcgccatttctgtcgcggaacgggtggctgctgaaagggctgagagttgtggatccggaaactccactggctatcagatccgcctgcaaagcaggctgccacgcaaacagggttccatactgtactgcactactggtattattctgcagtggctgcagagtgatccatatctatcatcagtgagccatattgtgctggatgagatccacgagagaaatcttcagtctgatgtgcttatgacagtggtgaaggacctcttgaacttcagaagcgatttgaaggtaatccttatgagcgcaactctcaacgccgaaaagttttctgagtatttcggcaactgtcccatgatacatatcccagggtttacctttcctgttgtcgaatacttgctcgaggacgtcatcgagaagatcagatatgtgccagagcaaaaggagcacaggtctcagttcaagagagggtttatgcaaggacatgtcaacagacaggaaaaggaagaaaaggaggccatctacaaagagagatggccagattatgtgcgcgagcttcgcaggcggtactccgcaagtacagtggatgttattgagatgatggaggacgacaaagtggatctcaacctgattgtggctcttatcagatacatcgtgctggaggaggaggatggggctattttagttttcctcccaggctgggacaacatatcgacactccacgacctcttaatgtcccaggtcatgtttaagagcggaaccatgagtcaggtgttcaaaagaactccgcctggcgtgaggaagatcgtgattgcgacaaacattgccgaaacgtccatcacaatcgacgacgtagtttatgtaatcgatggcggaaaaattaaggagactcatttcgacacacagaataatatctccactatgtccgcggaatgggtgagtaaagcaaatgctaagcagagaaaaggtagggcagggagggtgcagccagggcactgctatcacctctacaatggactgcgcgcttcactgcttgatgactatcagcttcctgaaatccttaggacccccttggaagagctctgcctgcagatcaaaatcctacggttggggggaatcgcttacttcctctcccgtctcatggatccgccttcgaatgaggccgttctcctctcaattcgacacctcatggagctgaacgccctggacaaacaagaagaactcactcctctgggcgttcatctggccaggctgccagtggagccccacataggcaagatgattcttttcggtgccctgttttgttgcttggatcccgtgttgacaatcgccgctagtctcagcttcaaggaccccttcgtgattccacttgggaaggaaaagatcgccgacgccaggagaaaggaactggccaaagatactagatctgaccacctcactgttgtgaacgcctttgagggctgggaggaagccaggagacggggttttaggtacgaaaaagattactgctgggagtactttctgtccagtaacacactgcagatgctgcataacatgaagggtcagtttgctgagcacctgctcggagcgggatttgtgagctctcgcaatcccaaggatccagagtcgaacattaacagtgacaacgaaaagatcatcaaagccgttatatgtgccggactctatcctaaggtcgctaaaatcaggctgaacttagggaagaaacgaaagatggtgaaagtgtataccaaaacagacggcctggtggccgtccaccccaagtccgtcaatgttgagcagaccgatttccattacaactggctgatctatcaccttaaaatgagaacttcaagcatttatctttacgattgcactgaggtctccccatactgcttgcttttctttgggggagacatctccatacaaaaagataacgaccaagagacaatagcagttgatgaatggatcgtcttccaatcacctgcaaggattgcccaccttgtgaaggagctcaggaaagagttagacattctgttacaggaaaaaatagaatctcctcatccagtcgactggaatgacaccaagagcagggactgcgctgttctgtctgcaatcattgatctgatcaaaactcaggagaaagccacaccacgaaacttcccaccgcgattccaggacgggtattacagctag

SEQ ID NO: 43088 - DNA, 2985 bp, Artificial Sequence
  derived and/or modified sequence
atgagctacgactaccaccagaactggggcagagacggcggccccagaagcagcggcggcggctacggcggcggccccgccggcggccacggcggcaacagaggcagcggcggcggcggcggcggcggcggcggcggcagaggcggcagaggcagacaccccggccacctgaagggcagagagatcggcatgtggtacgccaagaagcagggccagaagaacaaggaggccgagagacaggagagagccgtggtgcacatggacgagagaagagaggagcagatcgtgcagctgctgaacagcgtgcaggccaagaacgacaaggagagcgaggcccagatcagctggttcgcccccgaggaccacggctacggcaccgaggtgagcaccaagaacaccccctgcagcgagaacaagctggacatccaggagaagaagctgatcaaccaggagaagaagatgttcagaatcagaaacagaagctacatcgacagagacagcgagtacctgctgcaggagaacgagcccgacggcaccctggaccagaagctgctggaggacctgcagaagaagaagaacgacctgagatacatcgagatgcagcacttcagagagaagctgcccagctacggcatgcagaaggagctggtgaacctgatcgacaaccaccaggtgaccgtgatcagcggcgagaccggctgcggcaagaccacccaggtgacccagttcatcctggacaactacatcgagagaggcaagggcagcgcctgcagaatcgtgtgcacccagcccagaagaatcagcgccatcagcgtggccgagagagtggccgccgagagagccgagagctgcggcagcggcaacagcaccggctaccagatcagactgcagagcagactgcccagaaagcagggcagcatcctgtactgcaccaccggcatcatcctgcagtggctgcagagcgacccctacctgagcagcgtgagccacatcgtgctggacgagatccacgagagaaacctgcagagcgacgtgctgatgaccgtggtgaaggacctgctgaacttcagaagcgacctgaaggtgatcctgatgagcgccaccctgaacgccgagaagttcagcgagtacttcggcaactgccccatgatccacatccccggcttcaccttccccgtggtggagtacctgctggaggacgtgatcgagaagatcagatacgtgcccgagcagaaggagcacagaagccagttcaagagaggcttcatgcagggccacgtgaacagacaggagaaggaggagaaggaggccatctacaaggagagatggcccgactacgtgagagagctgagaagaagatacagcgccagcaccgtggacgtgatcgagatgatggaggacgacaaggtggacctgaacctgatcgtggccctgatcagatacatcgtgctggaggaggaggacggcgccatcctggtgttcctgcccggctgggacaacatcagcaccctgcacgacctgctgatgagccaggtgatgttcaagagcgtgaaccagacccaggtgttcaagagaaccccccccggcgtgagaaagatcgtgatcgccaccaacatcgccgagaccagcatcaccatcgacgacgtggtgtacgtgatcgacggcggcaagatcaaggagacccacttcgacacccagaacaacatcagcaccatgagcgccgagtgggtgagcaaggccaacgccaagcagagaaagggcagagccggcagagtgcagcccggccactgctaccacctgtacaacggcctgagagccagcctgctggacgactaccagctgcccgagatcctgagaacccccctggaggagctgtgcctgcagatcaagatcctgagactgggcggcatcgcctacttcctgagcagactgatggacccccccagcaacgaggccgtgctgctgagcatcagacacctgatggagctgaacgccctggacaagcaggaggagctgacccccctgggcgtgcacctggccagactgcccgtggagccccacatcggcaagatgatcctgttcggcgccctgttctgctgcctggaccccgtgctgaccatcgccgccagcctgagcttcaaggaccccttcgtgatccccctgggcaaggagaagatcgccgacgccagaagaaaggagctggccaaggacaccagaagcgaccacctgaccgtggtgaacgccttcgagggctgggaggaggccagaagaagaggcttcagatacgagaaggactactgctgggagtacttcctgagcagcaacaccctgcagatgctgcacaacatgaagggccagttcgccgagcacctgctgggcgccggcttcgtgagcagcagaaaccccaaggaccccgagagcaacatcaacagcgacaacgagaagatcatcaaggccgtgatctgcgccggcctgtaccccaaggtggccaagatcagactgaacctgggcaagaagagaaagatggtgaaggtgtacaccaagaccgacggcctggtggccgtgcaccccaagagcgtgaacgtggagcagaccgacttccactacaactggctgatctaccacctgaagatgagaaccagcagcatctacctgtacgactgcaccgaggtgagcccctactgcctgctgttcttcggcggcgacatcagcatccagaaggacaacgaccaggagaccatcgccgtggacgagtggatcgtgttccagagccccgccagaatcgcccacctggtgaaggagctgagaaaggagctggacatcctgctgcaggagaagatcgagagcccccaccccgtggactggaacgacaccaagagcagagactgcgccgtgctgagcgccatcatcgacctgatcaagacccaggagaaggccacccccagaaacttcccccccagattccaggacggctactacagctag

SEQ ID NO: 43089 - DNA, 2985 bp, Artificial Sequence
  derived and/or modified sequence
atgagctacgactaccaccagaactggggcagagacggcggccccagaagcagcggcggcggctacggcggcggccccgccggcggccacggcggcaacagaggcagcggcggcggcggcggcggcggcggcggcggcagaggcggcagaggcagacaccccggccacctgaagggcagagagatcggcatgtggtacgccaagaagcagggccagaagaacaaggaggccgagagacaggagagagccgtggtgcacatggacgagagaagagaggagcagatcgtgcagctgctgaacagcgtgcaggccaagaacgacaaggagagcgaggcccagatcagctggttcgcccccgaggaccacggctacggcaccgaggtgagcaccaagaacaccccctgcagcgagaacaagctggacatccaggagaagaagctgatcaaccaggagaagaagatgttcagaatcagaaacagaagctacatcgacagagacagcgagtacctgctgcaggagaacgagcccgacggcaccctggaccagaagctgctggaggacctgcagaagaagaagaacgacctgagatacatcgagatgcagcacttcagagagaagctgcccagctacggcatgcagaaggagctggtgaacctgatcgacaaccaccaggtgaccgtgatcagcggcgagaccggctgcggcaagaccacccaggtgacccagttcatcctggacaactacatcgagagaggcaagggcagcgcctgcagaatcgtgtgcacccagcccagaagaatcagcgccatcagcgtggccgagagagtggccgccgagagagccgagagctgcggcagcggcaacagcaccggctaccagatcagactgcagagcagactgcccagaaagcagggcagcatcctgtactgcaccaccggcatcatcctgcagtggctgcagagcgacccctacctgagcagcgtgagccacatcgtgctggacgagatccacgagagaaacctgcagagcgacgtgctgatgaccgtggtgaaggacctgctgaacttcagaagcgacctgaaggtgatcctgatgagcgccaccctgaacgccgagaagttcagcgagtacttcggcaactgccccatgatccacatccccggcttcaccttccccgtggtggagtacctgctggaggacgtgatcgagaagatcagatacgtgcccgagcagaaggagcacagaagccagttcaagagaggcttcatgcagggccacgtgaacagacaggagaaggaggagaaggaggccatctacaaggagagatggcccgactacgtgagagagctgagaagaagatacagcgccagcaccgtggacgtgatcgagatgatggaggacgacaaggtggacctgaacctgatcgtggccctgatcagatacatcgtgctggaggaggaggacggcgccatcctggtgttcctgcccggctgggacaacatcagcaccctgcacgacctgctgatgagccaggtgatgttcaagagcggcaccatgagccaggtgttcaagagaaccccccccggcgtgagaaagatcgtgatcgccaccaacatcgccgagaccagcatcaccatcgacgacgtggtgtacgtgatcgacggcggcaagatcaaggagacccacttcgacacccagaacaacatcagcaccatgagcgccgagtgggtgagcaaggccaacgccaagcagagaaagggcagagccggcagagtgcagcccggccactgctaccacctgtacaacggcctgagagccagcctgctggacgactaccagctgcccgagatcctgagaacccccctggaggagctgtgcctgcagatcaagatcctgagactgggcggcatcgcctacttcctgagcagactgatggacccccccagcaacgaggccgtgctgctgagcatcagacacctgatggagctgaacgccctggacaagcaggaggagctgacccccctgggcgtgcacctggccagactgcccgtggagccccacatcggcaagatgatcctgttcggcgccctgttctgctgcctggaccccgtgctgaccatcgccgccagcctgagcttcaaggaccccttcgtgatccccctgggcaaggagaagatcgccgacgccagaagaaaggagctggccaaggacaccagaagcgaccacctgaccgtggtgaacgccttcgagggctgggaggaggccagaagaagaggcttcagatacgagaaggactactgctgggagtacttcctgagcagcaacaccctgcagatgctgcacaacatgaagggccagttcgccgagcacctgctgggcgccggcttcgtgagcagcagaaaccccaaggaccccgagagcaacatcaacagcgacaacgagaagatcatcaaggccgtgatctgcgccggcctgtaccccaaggtggccaagatcagactgaacctgggcaagaagagaaagatggtgaaggtgtacaccaagaccgacggcctggtggccgtgcaccccaagagcgtgaacgtggagcagaccgacttccactacaactggctgatctaccacctgaagatgagaaccagcagcatctacctgtacgactgcaccgaggtgagcccctactgcctgctgttcttcggcggcgacatcagcatccagaaggacaacgaccaggagaccatcgccgtggacgagtggatcgtgttccagagccccgccagaatcgcccacctggtgaaggagctgagaaaggagctggacatcctgctgcaggagaagatcgagagcccccaccccgtggactggaacgacaccaagagcagagactgcgccgtgctgagcgccatcatcgacctgatcaagacccaggagaaggccacccccagaaacttcccccccagattccaggacggctactacagctag

SEQ ID NO: 43090 - DNA, 2985 bp, Artificial Sequence
  derived and/or modified sequence
atgagttatgactaccatcagaactggggccgtgatgggggtccccgcagctccggtgggggctatggaggggggccagcagggggtcatggaggtaaccgaggctccggaggaggcggcggcggcggagggggtggtcgaggcggcaggggccggcatcccgggcacctgaaaggccgcgaaatcggcatgtggtacgcgaaaaaacaggggcagaagaacaaggaagcggagaggcaagagagagctgtagtacacatggatgaacgacgagaagaacaaattgtacagttactgaattctgttcaagcgaagaatgataaagagtcagaagcacagatatcctggtttgctcctgaggatcatggatacggtactgaagtttctactaagaacacaccatgctcagagaacaaacttgacatccaggaaaagaagttgataaatcaagaaaaaaaaatgtttagaatcaggaacagatcatatattgaccgagattctgagtatctcttgcaagaaaatgaaccagatggaactttagaccaaaaattattggaagatttacaaaagaaaaaaaatgaccttcggtatattgaaatgcagcatttcagagaaaagctgccttcgtatggaatgcaaaaggaattggtaaatttaattgataaccatcaggtaacagtaataagtggtgaaactggttgtggcaaaaccactcaagttactcagttcattttggataactacattgaaagaggaaaaggatctgcttgcagaatagtttgtactcagccaagaagaattagtgccatttcagttgcggaaagagtagctgcagaaagggcagaatcttgtggcagtggtaatagtactggatatcaaattcgtctccagagtcggttgccaaggaaacagggttctatcttatactgtacaacaggaatcatccttcagtggctccagtcagacccgtatttgtccagtgttagtcatatcgtacttgatgaaatccatgaaagaaatctgcagtcagatgttttaatgactgttgttaaagaccttctcaattttcgatctgacttgaaagtaatattgatgagtgcaacattgaatgcagaaaagttttcagaatattttggtaactgtccaatgatacatatacctggttttacctttccggttgtggaatatcttttggaagatgtaattgaaaaaataaggtatgttccagaacaaaaagaacacagatcccagtttaagaggggtttcatgcaagggcatgtaaatagacaagaaaaagaagaaaaagaagcaatatataaagaacgttggccagattatgtaagggaactgcgaagaaggtattctgcaagtactgtagatgttatagaaatgatggaggatgataaagttgatctgaatttgattgttgccctcatccgatacattgttttggaagaagaggatggtgcgatactggtctttctgccaggctgggacaatatcagcactttacatgatctcttgatgtcacaagtaatgtttaaatcagttaaccagacacaggtgtttaaaagaacccctcctggtgttcggaaaatagtaattgctaccaacattgcggagactagcattaccatagatgatgtcgtttatgtgatagatggaggaaaaataaaagagacgcattttgatactcagaacaatatcagtacaatgtccgctgagtgggttagtaaagctaatgccaaacagagaaaaggtcgagctggaagagttcaacctggtcattgctatcatctgtataatggtcttagagcaagtcttctagatgactatcaactgccagaaattttgagaactcctttggaagaactttgtttacaaataaagattttaaggctaggtggaattgcttattttctgagtagattaatggacccaccatcaaatgaggcagtgttactctccataagacacctgatggagctgaacgctttggataaacaagaagaattgacacctcttggagtccacttggcacgattacccgttgagccacatattggaaaaatgattctttttggagcactgttctgctgcttagacccagtactcactattgctgctagtctcagtttcaaagatccatttgtcattccactgggaaaagaaaagattgcagatgcaagaagaaaggaattggcaaaggatactagaagtgatcacttaacagttgtgaatgcgtttgagggctgggaagaggctaggcgacgtggtttcagatacgaaaaggactattgctgggaatattttctgtcttcaaacacactgcagatgctgcataacatgaaaggacagtttgctgagcatcttcttggagctggatttgtaagcagtagaaatcctaaagatccagaatctaatataaattcagataatgagaagataattaaagctgtcatctgtgctggtttatatcccaaagttgctaaaattcgactaaatttgggtaaaaaaagaaaaatggtaaaagtttacacaaaaaccgatggcctggttgctgttcatcctaaatctgttaatgtggagcaaacagactttcactacaactggcttatctatcacctaaagatgagaacaagcagtatatacttgtatgactgcacagaggtttccccatactgtctcttgttttttggaggtgacatttccatccagaaggataacgatcaggaaactattgctgtagatgagtggattgtatttcagtctccagcaagaattgcccatcttgttaaggaattaagaaaggaactagatattcttctgcaagagaagattgaaagtcctcatcctgtagactggaatgacactaaatccagagactgtgcagtactgtcagctattatagacttgatcaaaacacaggaaaaggcaactcccaggaactttccgccacgattccaggatggatattacagctga

SEQ ID NO: 43091 - DNA, 3568 bp, Artificial Sequence
  derived and/or modified sequence
aagtgggcgcacagtggcttccgggcccggacgccatttccagcggttgctggttctgacgggttgtagtctgccaggacaatgagttatgactaccatcagaactggggccgtgatgggggtccccgcagctccggtgggggctatggaggggggccagcagggggtcatggaggtaaccgaggctccggaggaggcggcggcggcggagggggtggtcgaggcggcaggggccggcatcccgggcacctgaaaggccgcgaaatcggcatgtggtacgcgaaaaaacaggggcagaagaacaaggaagcggagaggcaagagagagctgtagtacacatggatgaacgacgagaagaacaaattgtacagttactgaattctgttcaagcgaagaatgataaagagtcagaagcacagatatcctggtttgctcctgaggatcatggatacggtactgaagtttctactaagaacacaccatgctcagagaacaaacttgacatccaggaaaagaagttgataaatcaagaaaaaaaaatgtttagaatcaggaacagatcatatattgaccgagattctgagtatctcttgcaagaaaatgaaccagatggaactttagaccaaaaattattggaagatttacaaaagaaaaaaaatgaccttcggtatattgaaatgcagcatttcagagaaaagctgccttcgtatggaatgcaaaaggaattggtaaatttaattgataaccatcaggtaacagtaataagtggtgaaactggttgtggcaaaaccactcaagttactcagttcattttggataactacattgaaagaggaaaaggatctgcttgcagaatagtttgtactcagccaagaagaattagtgccatttcagttgcggaaagagtagctgcagaaagggcagaatcttgtggcagtggtaatagtactggatatcaaattcgtctccagagtcggttgccaaggaaacagggttctatcttatactgtacaacaggaatcatccttcagtggctccagtcagacccgtatttgtccagtgttagtcatatcgtacttgatgaaatccatgaaagaaatctgcagtcagatgttttaatgactgttgttaaagaccttctcaattttcgatctgacttgaaagtaatattgatgagtgcaacattgaatgcagaaaagttttcagaatattttggtaactgtccaatgatacatatacctggttttacctttccggttgtggaatatcttttggaagatgtaattgaaaaaataaggtatgttccagaacaaaaagaacacagatcccagtttaagaggggtttcatgcaagggcatgtaaatagacaagaaaaagaagaaaaagaagcaatatataaagaacgttggccagattatgtaagggaactgcgaagaaggtattctgcaagtactgtagatgttatagaaatgatggaggatgataaagttgatctgaatttgattgttgccctcatccgatacattgttttggaagaagaggatggtgcgatactggtctttctgccaggctgggacaatatcagcactttacatgatctcttgatgtcacaagtaatgtttaaatcaggtactatgtcacaggtgtttaaaagaacccctcctggtgttcggaaaatagtaattgctaccaacattgcggagactagcattaccatagatgatgtcgtttatgtgatagatggaggaaaaataaaagagacgcattttgatactcagaacaatatcagtacaatgtccgctgagtgggttagtaaagctaatgccaaacagagaaaaggtcgagctggaagagttcaacctggtcattgctatcatctgtataatggtcttagagcaagtcttctagatgactatcaactgccagaaattttgagaactcctttggaagaactttgtttacaaataaagattttaaggctaggtggaattgcttattttctgagtagattaatggacccaccatcaaatgaggcagtgttactctccataagacacctgatggagctgaacgctttggataaacaagaagaattgacacctcttggagtccacttggcacgattacccgttgagccacatattggaaaaatgattctttttggagcactgttctgctgcttagacccagtactcactattgctgctagtctcagtttcaaagatccatttgtcattccactgggaaaagaaaagattgcagatgcaagaagaaaggaattggcaaaggatactagaagtgatcacttaacagttgtgaatgcgtttgagggctgggaagaggctaggcgacgtggtttcagatacgaaaaggactattgctgggaatattttctgtcttcaaacacactgcagatgctgcataacatgaaaggacagtttgctgagcatcttcttggagctggatttgtaagcagtagaaatcctaaagatccagaatctaatataaattcagataatgagaagataattaaagctgtcatctgtgctggtttatatcccaaagttgctaaaattcgactaaatttgggtaaaaaaagaaaaatggtaaaagtttacacaaaaaccgatggcctggttgctgttcatcctaaatctgttaatgtggagcaaacagactttcactacaactggcttatctatcacctaaagatgagaacaagcagtatatacttgtatgactgcacagaggtttccccatactgtctcttgttttttggaggtgacatttccatccagaaggataacgatcaggaaactattgctgtagatgagtggattgtatttcagtctccagcaagaattgcccatcttgttaaggaattaagaaaggaactagatattcttctgcaagagaagattgaaagtcctcatcctgtagactggaatgacactaaatccagagactgtgcagtactgtcagctattatagacttgatcaaaacacaggaaaaggcaactcccaggaactttccgccacgattccaggatggatattacagctgacagcttttcaggggtggtctgaaaagccagtttgacagccattcttcatcattgtttaaattttggctggatgccaaaccctgggacatgaacaattttcatgtgtaaggtagaagccttcagtaggtagtaaagacttaatgtgcatgacttgatgttatatgtagagatatatatatatatatatatataccataaaagcaatatgttctctgatcatatactctgctgtggtcatgcccactctttgggagtatattccctttatatatattgagtattgtaccacttgagaaattcctttgttctgttatacaaaattaatctttctgctcataatgattgatgataccaccagtaaaaataggatgtttaccccaaaacaagtgtcaattaagaatttgaacacaaccacattttttaaaatgaaacttctatcggaagtaaattaatttgttgtaataaagtccagtatttaataaaatgtacaatgttaaatctc

SEQ ID NO: 43092 - protein, 335 aa, Artificial Sequence
  derived and/or modified sequence
MPRPRLLAALCGALLCAPSLLVALDICSKNPCHNGGLCEEISQEVRGDVFPSYTCTCLKGYAGNHCETKCVEPLGLENGNIANSQIAASSVRVTFLGLQHWVPELARLNRAGMVNAWTPSSNDDNPWIQVNLLRRMWVTGVVTQGASRLASHEYLKAFKVAYSLNGHEFDFIHDVNKKHKEFVGNWNKNAVHVNLFETPVEAQYVRLYPTSCHTACTLRFELLGCELNGCANPLGLKNNSIPDKQITASSSYKTWGLHLFSWNPSYARLDKQGNFNAWVAGSYGNDQWLQIFPGNWDNHSHKKNLFETPILARYVRILPVAWHNRIALRLELLGC

SEQ ID NO: 43093 - DNA, 1008 bp, Artificial Sequence
  derived and/or modified sequence
atgccaaggcctagactcttggccgccctctgtggcgccctgctgtgcgccccatctttgctggtagccttagatatctgctcaaagaatccctgtcacaatggcggcctctgtgaagagattagccaggaagtccgaggggatgtttttccttcttatacctgcacctgcctgaaagggtatgccgggaatcactgtgagacaaagtgtgtcgagcccctcggcttggaaaacgggaacatcgccaattctcaaatagcagcctcctctgtgcgggtgaccttcctcggccttcaacattgggttccggagctggccaggttgaaccgcgctggtatggtcaacgcatggaccccatccagcaacgacgataatccctggatccaggttaatctactgagaagaatgtgggtgactggagtagtgacacaaggggcctcccgcctagcttcacatgaatacctgaaggccttcaaagtggcctactcgctcaatgggcatgaattcgactttattcatgatgttaacaaaaaacacaaggagtttgtgggcaattggaacaaaaatgccgtccatgtgaatctctttgagacccccgtggaggcacagtacgtaagactatacccaacctcctgccacaccgcttgcactctgcgcttcgagctcctgggctgcgagctaaatggatgtgccaatccgctcggccttaagaataatagcatccctgataagcagataactgcttcttcgagttataagacatggggattgcatcttttttcttggaacccatcatatgctaggttggacaagcaggggaacttcaatgcctgggttgctggatcctacggaaacgaccagtggttgcagatcttccctggcaattgggataaccacagtcacaagaaaaacctgttcgagacgccaattctagcccgatatgtgaggatcctgcccgtcgcgtggcacaaccggattgccctgcggttagagttgctgggctgttag

SEQ ID NO: 43094 - DNA, 1008 bp, Artificial Sequence
  derived and/or modified sequence
atgccccggccccggctgctggccgccctgtgtggggccctgctgtgtgcccccagcctgctggtggccctggacatctgcagcaagaacccctgccacaacggcggcctgtgtgaggagatcagccaggaggtgagaggagatgtgttccccagctacacctgcacctgcctgaagggctacgccggcaaccactgtgagaccaagtgtgtggagcccctgggcctggagaatggaaatattgccaacagccagattgctgccagctctgtgcgggtgaccttcctgggcctgcagcactgggtgcctgagctggcccggctgaacagagctggcatggtgaatgcctggacccccagcagcaatgatgacaacccctggatccaggtgaacctgctgcggaggatgtgggtgactggagtggtgacccagggcgccagccggctggccagccatgagtacctgaaggccttcaaggtggcctacagcctgaatggacatgaatttgacttcatccatgatgtgaacaagaagcacaaggagtttgtgggcaactggaacaagaatgctgtgcacgtgaacctgtttgagacccctgtggaggcccagtatgtgcggctgtaccccaccagctgccacacagcctgcaccctgcgctttgagctgctgggctgtgagctgaatggctgtgccaaccccctgggcctgaagaacaacagcatcccagacaagcagatcacagccagcagcagctacaagacctggggcctgcacctgttctcctggaaccccagctatgcccggctggacaagcagggcaacttcaatgcctgggtggccggcagctatggaaatgaccagtggctgcagatcttccctggcaactgggacaaccacagccacaagaagaacctgtttgagacccccatcctggcccgctacgtgcgcatcctgcctgtggcctggcacaaccgcatcgccctgcggctggagctgctgggctgctag

SEQ ID NO: 43095 - DNA, 1752 bp, Artificial Sequence
  derived and/or modified sequence
ccagaaccccgcggggtctgagcagcccagcgtgcccattccagcgcccgcgtccccgcagcatgccgcgcccccgcctgctggccgcgctgtgcggcgcgctgctctgcgcccccagcctcctcgtcgccctggatatctgttccaaaaacccctgccacaacggtggtttatgcgaggagatttcccaagaagtgcgaggagatgtcttcccctcgtacacctgcacgtgccttaagggctacgcgggcaaccactgtgagacgaaatgtgtcgagccactgggcctggagaatgggaacattgccaactcacagatcgccgcctcgtctgtgcgtgtgaccttcttgggtttgcagcattgggtcccggagctggcccgcctgaaccgcgcaggcatggtcaatgcctggacacccagcagcaatgacgataacccctggatccaggtgaacctgctgcggaggatgtgggtaacaggtgtggtgacgcagggtgccagccgcttggccagtcatgagtacctgaaggccttcaaggtggcctacagccttaatggacacgaattcgatttcatccatgatgttaataaaaaacacaaggagtttgtgggtaactggaacaaaaacgcggtgcatgtcaacctgtttgagacccctgtggaggctcagtacgtgagattgtaccccacgagctgccacacggcctgcactctgcgctttgagctactgggctgtgagctgaacggatgcgccaatcccctgggcctgaagaataacagcatccctgacaagcagatcacggcctccagcagctacaagacctggggcttgcatctcttcagctggaacccctcctatgcacggctggacaagcagggcaacttcaacgcctgggttgcggggagctacggtaacgatcagtggctgcagatcttccctggcaactgggacaaccactcccacaagaagaacttgtttgagacgcccatcctggctcgctatgtgcgcatcctgcctgtagcctggcacaaccgcatcgccctgcgcctggagctgctgggctgttagtggccacctgccacccccaggtcttcctgctttccatgggcccgctgcctcttggcttctcagcccctttaaatcaccatagggctggggactggggaaggggagggtgttcagaggcagcaccaccacacagtcacccctccctccctctttcccaccctccacctctcacgggccctgccccagcccctaagccccgtcccctaacccccagtcctcactgtcctgttttcttaggcactgagggatctgagtaggtctgggatggacaggaaagggcaaagtagggcgtgtggtttccctgcccctgtccggaccgccgatcccaggtgcgtgtgtctctgtctctcctagcccctctctcacacatcacattcccatggtggcctcaagaaaggcccggaagcgccaggctggagataacagcctcttgcccgtcggccctgcgtcggccctggggtaccatgtggccacaactgctgtggccccctgtccccaagacacttccccttgtctccctggttgcctctcttgccccttgtcctgaagcccagcgacacagaagggggtggggcgggtctatggggagaaagggagcgaggtcagaggagggcatgggttggcagggtgggcgtttggggccctctatgctggcttttcaccccagaggacacaggcagct

SEQ ID NO: 43096 - DNA, 1008 bp, Artificial Sequence
  derived and/or modified sequence
atgccccggccccggctgctggccgccctgtgcggcgccctgctgtgcgccccatccttgctagtggctctggacatttgtagtaaaaatccatgtcacaacggaggcctctgcgaagagatttcccaggaggttcggggggacgtcttcccctcctacacgtgtacttgtttaaaaggatacgcaggaaatcactgtgaaacaaagtgcgtggagccgttgggattggaaaatggcaatatagccaactctcagatcgccgcctcgtccgttcgggtaacgtttctggggctgcaacactgggtccccgagctggcccgcctcaaccgcgccgggatggttaacgcctggaccccctcgagtaacgacgacaatccttggattcaagtgaatcttctgaggcgtatgtgggtgacgggagtggtgacccagggtgcaagtaggctggcttcccatgaatatttaaaggcctttaaggtggcatatagcctaaatggtcacgaattcgactttatccacgacgtcaataaaaagcacaaggagttcgttgggaattggaataagaatgcagttcacgtgaatttgttcgagacgcctgttgaggcgcagtatgtacgtttgtacccaacgtcttgccacactgcatgtacacttcgattcgaactgcttggttgcgaacttaatggctgcgcaaacccgctggggctcaagaacaactccatccctgacaagcagattaccgccagctctagctataagacctgggggttgcacttgttctcttggaacccttcctatgcccggctcgacaagcagggaaactttaatgcctgggttgcgggaagttacggaaatgaccagtggctgcagatttttcctggcaactgggacaaccattctcataagaagaacctgttcgagactccgatcttggccaggtatgtccgcattcttcctgttgcttggcacaatcgaattgcactgaggcttgaattattgggatgttag

SEQ ID NO: 43097 - DNA, 1008 bp, Artificial Sequence
  derived and/or modified sequence
atgccacgacctagattactagcagcactatgcggggctctgctgtgcgctccaagcctgctggtggcactcgatatctgtagtaagaacccatgtcataacggcggactatgtgaggagatcagtcaggaagtgcggggagatgtgttcccttcttatacatgcacttgtctcaaaggatacgctggaaaccactgcgagaccaaatgcgtcgagcctttaggtctggagaacggaaatatcgcaaatagccagatcgccgcatccagcgtccgcgtgacctttcttgggctacagcattgggtcccagaactggccaggctgaaccgggcaggtatggtaaacgcgtggactcccagcagcaacgacgacaatccatggatccaagtcaatctgctcagaaggatgtgggtgaccggagtggttacacagggcgcttcacggttggcctcccacgaatatctaaaggccttcaaggtggcttactccctgaatggtcacgaattcgattttattcatgatgtcaacaaaaaacacaaggagttcgtgggaaactggaataagaatgcggtgcacgtgaatcttttcgaaaccccagtggaggcgcagtacgtgcgcctgtacccgacctcctgccataccgcctgcactctccgattcgagctactggggtgcgaactgaatggttgcgccaaccctctcggtctgaaaaacaatagcattcccgataaacagattaccgcctccagctcatacaagacgtggggtttgcatctgttttcttggaatccgtcatacgcccgattggacaaacagggaaattttaatgcttgggtagcaggctcctatggtaatgaccagtggttgcagatatttcctggcaattgggataaccattcccacaaaaagaatctgttcgaaacacctatcctggcaaggtacgtgagaattctgccagtggcatggcacaacagaattgctctgaggcttgaactgctgggctgctag

SEQ ID NO: 43098 - DNA, 1008 bp, Artificial Sequence
  derived and/or modified sequence
atgcccagacccagactgctggccgccctgtgcggcgccctgctgtgcgcccccagcctgctggtggccctggacatctgcagcaagaacccctgccacaacggcggcctgtgcgaggagatcagccaggaggtgagaggcgacgtgttccccagctacacctgcacctgcctgaagggctacgccggcaaccactgcgagaccaagtgcgtggagcccctgggcctggagaacggcaacatcgccaacagccagatcgccgccagcagcgtgagagtgaccttcctgggcctgcagcactgggtgcccgagctggccagactgaacagagccggcatggtgaacgcctggacccccagcagcaacgacgacaacccctggatccaggtgaacctgctgagaagaatgtgggtgaccggcgtggtgacccagggcgccagcagactggccagccacgagtacctgaaggccttcaaggtggcctacagcctgaacggccacgagttcgacttcatccacgacgtgaacaagaagcacaaggagttcgtgggcaactggaacaagaacgccgtgcacgtgaacctgttcgagacccccgtggaggcccagtacgtgagactgtaccccaccagctgccacaccgcctgcaccctgagattcgagctgctgggctgcgagctgaacggctgcgccaaccccctgggcctgaagaacaacagcatccccgacaagcagatcaccgccagcagcagctacaagacctggggcctgcacctgttcagctggaaccccagctacgccagactggacaagcagggcaacttcaacgcctgggtggccggcagctacggcaacgaccagtggctgcagatcttccccggcaactgggacaaccacagccacaagaagaacctgttcgagacccccatcctggccagatacgtgagaatcctgcccgtggcctggcacaacagaatcgccctgagactggagctgctgggctgctag

SEQ ID NO: 43099 - protein, 781 aa, Artificial Sequence
  derived and/or modified sequence
MAVAEVSRTCLLTVRVLQAHRLPSKDLVTPSDCYVTLWLPTACSHRLQTRTVKNSSSPVWNQSFHFRIHRQLKNVMELKVFDQDLVTGDDPVLSVLFDAGTLRAGEFRRESFSLSPQGEGRLEVEFRLQSLADRGEWLVSNGVLVARELSCLHVQLEETGDQKSSEHRVQLVVPGSCEGPQEASVGTGTFRFHCPACWEQELSIRLQDAPEEQLKAPLSALPSGQVVRLVFPTSQEPLMRVELKKEAGLRELAVRLGFGPCAEEQAFLSRRKQVVAAALRQALQLDGDLQEDEIPVVAIMATGGGIRAMTSLYGQLAGLKELGLLDCVSYITGASGSTWALANLYEDPEWSQKDLAGPTELLKTQVTKNKLGVLAPSQLQRYRQELAERARLGYPSCFTNLWALINEALLHDEPHDHKLSDQREALSHGQNPLPIYCALNTKGQSLTTFEFGEWCEFSPYEVGFPKYGAFIPSELFGSEFFMGQLMKRLPESRICFLEGIWSNLYAANLQDSLYWASEPSQFWDRWVRNQANLDKEQVPLLKIEEPPSTAGRIAEFFTDLLTWRPLAQATHNFLRGLHFHKDYFQHPHFSTWKATTLDGLPNQLTPSEPHLCLLDVGYLINTSCLPLLQPTRDVDLILSLDYNLHGAFQQLQLLGRFCQEQGIPFPPISPSPEEQLQPRECHTFSDPTCPGAPAVLHFPLVSDSFREYSAPGVRRTPEEAAAGEVNLSSSDSPYHYTKVTYSQEDVDKLLHLTHYNVCNNQEQLLEALRQAVQRRRQRRPH

SEQ ID NO: 43100 - DNA, 2346 bp, Artificial Sequence
  derived and/or modified sequence
atggccgtggccgaggtgagcagaacctgcctgctgaccgtgagagtgctgcaggcccacagactgcccagcaaggacctggtgacccccagcgactgctacgtgaccctgtggctgcccaccgcctgcagccacagactgcagaccagaaccgtgaagaacagcagcagccccgtgtggaaccagagcttccacttcagaatccacagacagctgaagaacgtgatggagctgaaggtgttcgaccaggacctggtgaccggcgacgaccccgtgctgagcgtgctgttcgacgccggcaccctgagagccggcgagttcagaagagagagcttcagcctgagcccccagggcgagggcagactggaggtggagttcagactgcagagcctggccgacagaggcgagtggctggtgagcaacggcgtgctggtggccagagagctgagctgcctgcacgtgcagctggaggagaccggcgaccagaagagcagcgagcacagagtgcagctggtggtgcccggcagctgcgagggcccccaggaggccagcgtgggcaccggcaccttcagattccactgccccgcctgctgggagcaggagctgagcatcagactgcaggacgcccccgaggagcagctgaaggcccccctgagcgccctgcccagcggccaggtggtgagactggtgttccccaccagccaggagcccctgatgagagtggagctgaagaaggaggccggcctgagagagctggccgtgagactgggcttcggcccctgcgccgaggagcaggccttcctgagcagaagaaagcaggtggtggccgccgccctgagacaggccctgcagctggacggcgacctgcaggaggacgagatccccgtggtggccatcatggccaccggcggcggcatcagagccatgaccagcctgtacggccagctggccggcctgaaggagctgggcctgctggactgcgtgagctacatcaccggcgccagcggcagcacctgggccctggccaacctgtacgaggaccccgagtggagccagaaggacctggccggccccaccgagctgctgaagacccaggtgaccaagaacaagctgggcgtgctggcccccagccagctgcagagatacagacaggagctggccgagagagccagactgggctaccccagctgcttcaccaacctgtgggccctgatcaacgaggccctgctgcacgacgagccccacgaccacaagctgagcgaccagagagaggccctgagccacggccagaaccccctgcccatctactgcgccctgaacaccaagggccagagcctgaccaccttcgagttcggcgagtggtgcgagttcagcccctacgaggtgggcttccccaagtacggcgccttcatccccagcgagctgttcggcagcgagttcttcatgggccagctgatgaagagactgcccgagagcagaatctgcttcctggagggcatctggagcaacctgtacgccgccaacctgcaggacagcctgtactgggccagcgagcccagccagttctgggacagatgggtgagaaaccaggccaacctggacaaggagcaggtgcccctgctgaagatcgaggagccccccagcaccgccggcagaatcgccgagttcttcaccgacctgctgacctggagacccctggcccaggccacccacaacttcctgagaggcctgcacttccacaaggactacttccagcacccccacttcagcacctggaaggccaccaccctggacggcctgcccaaccagctgacccccagcgagccccacctgtgcctgctggacgtgggctacctgatcaacaccagctgcctgcccctgctgcagcccaccagagacgtggacctgatcctgagcctggactacaacctgcacggcgccttccagcagctgcagctgctgggcagattctgccaggagcagggcatccccttcccccccatcagccccagccccgaggagcagctgcagcccagagagtgccacaccttcagcgaccccacctgccccggcgcccccgccgtgctgcacttccccctggtgagcgacagcttcagagagtacagcgcccccggcgtgagaagaacccccgaggaggccgccgccggcgaggtgaacctgagcagcagcgacagcccctaccactacaccaaggtgacctacagccaggaggacgtggacaagctgctgcacctgacccactacaacgtgtgcaacaaccaggagcagctgctggaggccctgagacaggccgtgcagagaagaagacagagaagaccccactag

SEQ ID NO: 43101 - DNA, 2346 bp, Artificial Sequence
  derived and/or modified sequence
atggcagtggctgaggtcagtaggacgtgcttgcttacagttcgggttctgcaggcacaccgcctcccttctaaagatttagtcacacccagtgactgctatgtgacgctgtggctccccactgcctgtagccatcggctccagacacggacagtgaagaattcgagcagtcccgtttggaaccaaagctttcacttccggattcatagacaactcaagaatgtaatggaactgaaggtgtttgatcaagacttggttacgggcgacgatccagtcttatctgtactgtttgatgcaggtaccctcagagccggagagttccgtagagagtccttttcgctcagcccacaaggggaggggaggctcgaggtggagttcagactacagtctctcgccgacagaggcgaatggctggtgagcaacggtgtcttagttgcaagagaactgagttgtttgcacgtgcagttggaggaaacaggggatcagaaatcctccgagcatagggtgcagctcgttgtcccaggctcgtgtgagggtccccaggaagccagtgtcggtacggggacctttagattccactgccctgcgtgttgggagcaagaattgagtatacgattacaggatgctccggaagagcagctgaaggcgcctttgtctgctttgccatccggtcaggtcgttcggctggtttttcccacatcccaggagccgttgatgagggtggagctgaaaaaagaggcaggactgcgggaattggccgtgagattgggtttcgggccatgtgcagaggaacaggcctttctgtcccggcggaagcaggtggtggccgccgccctgagacaggcactgcagctggatggtgacctgcaggaagacgaaattcctgttgtggccattatggcaactgggggtggaatccgcgctatgacgtcactgtatgggcaattggctgggttaaaggagcttggactgctggactgcgtgtcctacattacgggcgcaagtggctctacatgggccttggccaacttgtacgaagatcccgaatggagccagaaagacctcgctggccccaccgagttgttaaaaacccaagtcacaaagaacaaactcggagtgctggcccccagccagctgcagcggtatcggcaggagctggctgaaagagcacggctcggatacccaagctgttttaccaatctgtgggcactgatcaacgaggccttgctgcacgatgagccacatgatcacaaactcagtgatcagagagaagccttgtcccacggtcagaatcctctgcctatctattgcgccttgaatactaaagggcaaagcctcactacatttgagtttggcgagtggtgtgaattctcgccttacgaagttggctttcccaagtacggagcctttattccatccgagctctttggaagcgagtttttcatggggcagctcatgaaacgactacctgagtcccgcatatgtttcttagagggcatctggtccaacctgtatgctgctaacctgcaggattcactgtactgggcttctgaaccttctcaattttgggacagatgggtgcgtaatcaggctaatctggacaaagaacaggtaccactgctgaagatcgaggaaccaccgtcgacagccggccggatcgctgagtttttcacagatctgctgacatggaggccccttgcgcaggctacccacaacttcctcaggggacttcactttcacaaggactatttccagcatccacacttctcgacctggaaagcaaccaccctggacgggttgcccaaccagctcacccccagtgagccccatttatgtctgctcgatgtggggtatttgataaacacgagctgtctccccctgcttcagccaacacgcgatgtggacttgatcctcagtcttgactacaatctgcacggggcgttccagcagttgcagctcctcggcagattctgtcaggagcagggtattccgttcccacctatctcacctagccccgaagagcagctgcagcctagagaatgtcatactttcagcgatcccacctgccctggcgccccggcggtcctgcatttccccctggttagtgatagcttccgagagtactccgccccaggagtgagaaggaccccggaggaagctgccgcaggggaagtcaatttgtcatcatccgactcgccctatcactacaccaaagtcacatatagccaggaggacgtggataaattactgcacctgacacattacaacgtttgtaacaaccaagagcaattactggaggccctgagacaggccgtgcagcgtcgccgccagcgccgccctcattag

SEQ ID NO: 43102 - DNA, 2346 bp, Artificial Sequence
  derived and/or modified sequence
atggctgtggccgaggtgtccaggacctgcctgctgactgtgcgggtgctgcaggcccaccggctgcccagcaaggacctggtgacccccagcgactgctacgtgaccctgtggctgcccacagcctgcagccaccggctgcagaccaggacagtgaagaacagcagcagccctgtgtggaaccagagcttccacttccgcatccaccggcagctgaagaatgtgatggagctgaaggtgtttgaccaggacctggtgactggagatgatcctgtgctgtctgtgctgtttgatgctggcaccctgcgggccggggagttccggcgggagagcttcagcctgagcccccagggcgagggccgcctggaggtggagttccggctgcagagcctggccgacagaggagagtggctggtgtccaatggagtgctggtggcccgggagctgagctgcctgcacgtgcagctggaggagactggagaccagaagagcagcgagcaccgggtgcagctggtggtgcccggcagctgtgagggcccccaggaggcctctgtgggcaccggcaccttccgcttccactgcccagcctgctgggagcaggagctgagcatccggctgcaggatgcccctgaggagcagctgaaggcccccctgagcgccctgcccagcggccaggtggtgcggctggtgttccccaccagccaggagcccctgatgagggtggagctgaagaaggaggccggcctgcgggagctggccgtgcggctgggcttcggcccctgtgccgaggagcaggccttcctgagcaggaggaagcaggtggtggccgccgccctgcggcaggccctgcagctggatggagacctgcaggaggatgagatccctgtggtggccatcatggccaccggcggcggcatccgggccatgaccagcctgtatggccagctggccggcctgaaggagctgggcctgctggactgtgtgtcctacatcaccggggccagcggcagcacctgggccctggccaacctgtatgaggaccctgagtggagccagaaggacctggccggccccacagagctgctgaagacccaggtgaccaagaacaagctgggcgtgctggcccccagccagctgcagcgctaccggcaggagctggccgagcgggcccggctgggctaccccagctgcttcaccaacctgtgggccctgatcaatgaggccctgctgcatgatgagccccatgaccacaagctgagtgaccagcgggaggccctgagccacggccagaaccccctgcccatctactgtgccctgaacaccaagggccagagcctgaccacctttgaatttggagagtggtgtgagttcagcccctatgaggtgggcttccccaagtatggagccttcatccccagcgagctgtttggcagcgagttcttcatgggccagctgatgaagaggctgcctgagagccgcatctgcttcctggagggcatctggagcaacctgtatgctgccaacctgcaggacagcctgtactgggccagcgagcccagccagttctgggaccgctgggtgaggaaccaggccaacctggacaaggagcaggtgcccctgctgaagattgaggagccccccagcacagctggaagaattgctgagttcttcacagacctgctgacctggaggcccctggcccaggccacccacaacttcctgcggggcctgcacttccacaaggactacttccagcacccccacttcagcacctggaaggccaccaccctggatggcctgcccaaccagctgaccccatctgagccccacctgtgcctgctggatgtgggctacctgatcaacaccagctgcctgcccctgctgcagcccaccagagatgtggacctgatcctgagcctggactacaacctgcatggagccttccagcagctgcagctgctgggccgcttctgccaggagcagggcatccccttcccccccatcagccccagccctgaggagcagctgcagccccgggagtgccacaccttcagtgaccccacctgccctggggccccagctgtgctgcacttccccctggtgtctgacagcttccgggagtacagcgcccctggggtgcggaggaccccagaggaggccgccgccggggaggtgaacctgagcagcagtgacagcccctaccactacaccaaggtgacctacagccaggaggatgtggacaagctgctgcacctgacccactacaacgtgtgcaacaaccaggagcagctgctggaggccctgcggcaggccgtgcagaggcggcggcagaggcggccccactag

SEQ ID NO: 43103 - DNA, 2346 bp, Artificial Sequence
  derived and/or modified sequence
atggccgtggccgaggtgagccggacctgcctgctgaccgtgcgggtgctgcaggcccacaggctgccatccaaggacctcgtcactcccagcgattgttatgttaccctctggttaccaacagcttgcagtcatcggctgcaaaccaggacagtcaagaattccagtagcccagtgtggaatcaatcatttcacttcaggatccaccggcaactgaaaaacgttatggagctcaaggtgttcgaccaagacctcgttaccggcgacgaccctgtattatccgtgctgtttgacgccggtacccttcgggccggcgagtttcgcagagagagcttctcgctgagtccgcagggtgaaggaagattggaagtggaatttcgtctccagtcactcgccgatcgcggcgaatggctggtgtccaatggagtcttagtggcacgggagcttagttgtttgcatgttcagctggaagaaacaggcgaccagaagagctcagaacacagggtgcagctggtggttcccggctcctgtgaaggaccacaagaagcttctgtgggaactggcactttcagatttcactgtcctgcctgctgggagcaggagctcagtattcggttgcaggacgccccagaagaacaactcaaggcccccctttccgcacttccctccgggcaagtggtcagactggtcttcccaacctcacaagaacccttgatgcgcgtggagctgaagaaggaggctggactgcgcgagcttgccgtgaggctggggtttggcccgtgtgccgaggagcaggcgtttctttcccgcaggaagcaagttgtagcagcagctttacggcaggccttacaattggatggcgacctgcaggaggatgaaattcccgtggtcgcgatcatggccactggaggtgggatcagagcgatgaccagtctgtatggacaactcgcaggacttaaggaactggggctgctcgattgtgtcagctatataacgggtgctagtgggtcaacatgggcactggcgaatctgtacgaagatcctgaatggtcgcagaaggacttggctggacctactgagctgcttaagacccaagtgacaaagaacaaactcggggtgttagctccatctcagctgcaacgttatcgccaagagctcgccgagagggctaggttggggtacccatcttgtttcaccaacctgtgggctttgatcaacgaagccctgttacatgacgaacctcacgatcataaactgagcgatcagcgagaagccctctcccacggtcagaaccccctccccatctactgcgcattaaatacaaaggggcagtcattgaccaccttcgagttcggagaatggtgcgagttttccccctacgaagtcggcttcccaaagtacggggcttttattccatcagagctttttggttctgagttttttatggggcaactaatgaagagactacctgagtcacgtatctgcttccttgaaggaatttggagcaatctctacgccgcgaacttacaagatagtctttattgggcaagcgaaccttcgcaattctgggatcggtgggtgcgcaatcaggcaaacctggataaggaacaagtgcctctgctcaagatcgaggagcctccctcgacagccggcagaattgctgaattttttacagatctcttgacatggaggccgctggcacaggctacccataacttccttcggggattgcatttccataaggattacttccagcacccacactttagtacgtggaaggccactacactcgacggactgccaaatcagctgacgccctccgaacctcacctctgtcttctggacgtgggctacctgatcaatacatcttgtctaccgctcctgcagcccacccgggatgtggatcttatcctttcactggactataacctgcatggtgcgttccagcagctccagctcttgggccgattttgccaggagcagggcattccctttccgcccatttccccatcgcctgaagagcagctgcaacctcgagagtgtcacacttttagcgaccctacttgccctggcgcccctgctgtgcttcattttcccctcgtatccgactcgttccgggagtattcagcccctggtgtgcgccgtacccccgaggaggctgctgcgggtgaagtcaatctcagctccagcgatagtccctaccattatactaaggtgacttacagccaggaggacgtcgacaagcttcttcacttgacccactataatgtctgtaacaatcaggaacagttattggaagcactcaggcaggctgtgcagaggcggcggcagcggaggccccactag

SEQ ID NO: 43104 - DNA, 2346 bp, Artificial Sequence
  derived and/or modified sequence
atggctgtagccgaagtgtcccggacttgcctcttgaccgtgcgggtccttcaggcccaccgtttaccgtccaaggacctagtgaccccatcagattgctacgtgaccctgtggttacccaccgcatgttcacaccgccttcaaaccagaactgtgaaaaacagctcctcccccgtttggaaccaatccttccacttccggatacacaggcaactgaagaatgtcatggagttgaaggtgttcgaccaagatctggtaacaggggacgaccccgtgctctctgtgctgtttgatgcaggtaccctgcgggctggcgagtttaggagagagtcattttctctcagtccccaaggggaggggagactcgaggtggagttcagactccagagtctcgcagataggggcgaatggctggtgagcaacggagtccttgttgccagagagctttcgtgtcttcacgttcagctggaagagaccggagatcagaagtcttccgagcatcgcgtgcagctggtggtacctggcagctgcgagggtcctcaagaggcctctgtgggaactggaactttccggttccactgcccagcttgttgggagcaagagctgagcatccgccttcaggacgctccagaggaacagctgaaggccccactgagcgctcttccgtcaggacaggtagttaggctggtcttcccaaccagtcaggaaccactcatgagggtcgaactcaagaaagaggcgggtctgagagaactggcagtccgactcggcttcggaccatgcgctgaagaacaggctttcctgtccaggcgtaagcaagttgtggctgccgcacttagacaggcattacagctggatggggacttacaagaggatgagatccccgtagtcgccattatggccacgggcggtggcattagagctatgacatcgctgtatggtcagctggcaggccttaaggaactaggcctgctcgattgcgtgtcttacatcacaggagcttcaggctccacttgggctctggctaatttgtacgaggatccagagtggagccagaaagacctggcgggtcccaccgaacttttgaaaacacaggtgaccaaaaacaagcttggcgttctggccccttcccagcttcagaggtaccgccaagaactagccgagcgtgccagattgggctatccctcgtgctttaccaatctctgggcactcattaacgaagccctactgcatgatgaacctcatgatcataaattgtctgaccagcgcgaggccctcagtcatggccaaaaccctttgcctatctactgcgcattaaacacgaaaggtcaatctttgacgacatttgagttcggggaatggtgcgagttcagcccctatgaagtcggttttccaaagtatggagccttcatcccatcagagctgttcggctccgagttctttatgggccagctcatgaagcggctcccagagtcccgtatctgtttcctcgagggcatttggagcaacttgtatgcagcgaatctccaggacagcctgtattgggcctctgagccatctcagttttgggatcgctgggtaagaaaccaggctaacctcgataaggagcaggttccgctgctaaagattgaggaaccaccttcgaccgcgggacgtatagcagagttcttcacggacttgctgacgtggcggcctcttgcacaggccacccataatttcctgaggggacttcattttcacaaagattatttccagcatcctcatttcagcacatggaaagccactacattagatggcctgcctaatcaactaaccccaagcgagccccacctctgcttgctggacgtggggtacctaatcaatactagctgcctccctctactgcaaccaaccagagacgtcgatctcatcctgagcctggattataacctacatggggcatttcagcagctgcagcttttgggcaggttttgtcaggaacagggtatcccttttccgcctatcagcccctcccctgaagaacagttgcagccaagagaatgccatacattctcagacccgacctgtccaggcgctcccgcagtgctgcacttcccgctagtttctgacagtttccgagagtattccgcccctggcgtacgccgaacccctgaggaagccgctgcaggggaagtgaatttgagttctagtgatagtccataccactataccaaagtgacctactctcaggaagacgtcgacaaactacttcatctcactcactacaatgtgtgtaacaaccaagaacaacttctggaggccttaagacaggccgtgcagaggaggaggcagcggaggcctcattag

SEQ ID NO: 43105 - DNA, 2985 bp, Artificial Sequence
  derived and/or modified sequence
agacggggtttcaccgtgttagccagtatggtcttgatctcctgacctcgtgatccacctgcctcggcctcccaaaagtgctgggattacaggtgtgagctgctgcgcctggcttatgagtcgtatgttctgatcctccctcttgaagttgccttctgtggtctaaggagggcctgaaggttcaggtggctggttcaggagtgggtgtggagcttaggtggagcagaggcggcgggtaggagggacttgggaccaattgggacatcacatccctggctctgggttagaaagctgacagtccttgatcctgtggccactgccccatcattcctgctcctgaggactcagtctcatggctgtggcagaggtgtccaggacctgcctgctcacggttcgtgtcctgcaggcccatcgcctaccctctaaggacctagtgaccccctctgactgctacgtgactctctggctgcccacggcctgcagccacaggctccagacacgcacggtcaagaacagcagtagccctgtctggaaccagagctttcacttcaggatccacaggcagctcaagaatgtcatggaactgaaagtctttgaccaggacctggtgaccggagatgaccctgtgttgtcagtactgtttgatgcggggactctgcgggctggggagttccggcgcgagagcttctcactgagccctcagggtgaggggcgcctggaagttgaatttcgcctgcagagtctggctgaccgtggcgagtggctcgtcagcaatggcgttctggtggcccgggagctctcctgcttgcacgttcaactggaggagacaggagaccagaagtcctcagagcacagagttcagcttgtggttcctgggtcctgtgagggtccgcaggaggcctctgtgggcactggcaccttccgcttccactgcccagcctgctgggagcaggagctgagtattcgcctgcaggatgcccccgaggagcaactaaaggcgccactgagtgccctgccctctggtcaagtggtgaggcttgtcttccccacgtcccaggagcccctgatgagagtggagctgaaaaaagaagcaggactgagggagctggccgtgcgactgggcttcgggccctgtgcagaggagcaggccttcctgagcaggaggaagcaggtggtggccgcggccttgaggcaggccctgcagctggacggagacctgcaggaggatgagatcccagtggtagctattatggccactggtggtgggatccgggcaatgacttccctgtatgggcagctggctggcctgaaggagctgggcctcttggattgcgtctcctacatcaccggggcctcgggctccacctgggccttggccaacctttatgaggacccagagtggtctcagaaggacctggcagggcccactgagttgctgaagacccaggtgaccaagaacaagctgggtgtgctggcccccagccagctgcagcggtaccggcaggagctggccgagcgtgcccgcttgggctacccaagctgcttcaccaacctgtgggccctcatcaacgaggcgctgctgcatgatgagccccatgatcacaagctctcagatcaacgggaggccctgagtcatggccagaaccctctgcccatctactgtgccctcaacaccaaagggcagagcctgaccacttttgaatttggggagtggtgcgagttctctccctacgaggtcggcttccccaagtacggggccttcatcccctctgagctctttggctccgagttctttatggggcagctgatgaagaggcttcctgagtcccgcatctgcttcttagaaggtatctggagcaacctgtatgcagccaacctccaggacagcttatactgggcctcagagcccagccagttctgggaccgctgggtcaggaaccaggccaacctggacaaggagcaggtcccccttctgaagatagaagaaccaccctcaacagccggcaggatagctgagtttttcaccgatcttctgacgtggcgtccactggcccaggccacacataatttcctgcgtggcctccatttccacaaagactactttcagcatcctcacttctccacatggaaagctaccactctggatgggctccccaaccagctgacaccctcggagccccacctgtgcctgctggatgttggctacctcatcaataccagctgcctgcccctcctgcagcccactcgggacgtggacctcatcctgtcattggactacaacctccacggagccttccagcagttgcagctcctgggccggttctgccaggagcaggggatcccgttcccacccatctcgcccagccccgaagagcagctccagcctcgggagtgccacaccttctccgaccccacctgccccggagcccctgcggtgctgcactttcctctggtcagcgactccttccgggagtactcggcccctggggtccggcggacacccgaggaggcggcagctggggaggtgaacctgtcttcatcggactctccctaccactacacgaaggtgacctacagccaggaggacgtggacaagctgctgcacctgacacattacaatgtctgcaacaaccaggagcagctgctggaggctctgcgccaggcagtgcagcggaggcggcagcgcaggccccactgatggccggggcccctgccacccctaactctcattcattccctggctgctgagttgcaggtgggaactgtcatcacgcagtgcttcagagcctcgggctcaggtggcacggtcccagggtccaggctgagggctgggagctcccttgcgcctcagcagtttgcagtggggtaaggaggccaagcccatttgtgtaatcacccaaaaccccccggcctgtgcctgttttcccttctgcgctaccttgagtagttggagcacttgatacatcacagactcatacaaatgtg

SEQ ID NO: 43106 - DNA, 2346 bp, Artificial Sequence
  derived and/or modified sequence
atggccgttgcagaagtcagccgcacttgcctccttacagtgcgggtcctgcaggcccaccgattgccaagtaaggatctggtcaccccttcagactgttacgtgaccttatggcttccaactgcatgtagtcataggctgcagacgagaacggtgaaaaactcgtctagtcctgtctggaatcagtccttccacttccggatccaccgacagctcaaaaacgttatggagctcaaagtattcgaccaggacctggttactggagacgatcccgtgctctcagtcctcttcgatgccggaaccctgcgagccggtgagtttcgccgagagtcattttctttgagccctcagggagagggccgtctcgaggtggagtttcgcttacagtccttggccgaccggggagaatggctagtgtcaaacggagtactggtggcaagggaattgtcgtgcctccatgtccagctcgaggaaactggcgaccagaagtcgagcgaacaccgggttcaactggtggtgcctgggagttgtgaaggcccacaggaggcctctgtgggaacggggaccttccggtttcactgtcctgcatgctgggagcaggagctatcaatcagattgcaggatgcgcctgaagaacagctgaaagcccctctcagcgccctaccgtctgggcaagtcgtcagactggtcttccccacctcccaagagcccttgatgcgagttgaactgaaaaaggaggctggattgagggaactcgcggtgcggcttgggtttggaccatgtgcagaggagcaagcatttctctcccggaggaagcaagttgtggctgcagctctgaggcaagccttgcagttggacggggaccttcaagaggatgaaattccagtggtggctattatggccacggggggagggattagagcaatgacaagtctgtatggacagcttgcaggccttaaagagctgggattactggattgcgtgtcatacataacgggggcatctggcagtacttgggcactagcaaacctgtatgaagaccctgaatggtctcagaaggaccttgccggtcccacagaactgttgaaaacccaggtcacgaaaaataagctcggcgtgctcgccccatcgcagctgcagcgctataggcaagagcttgctgagcgagcacgcttaggctacccatcatgcttcacaaacctgtgggctctcattaacgaggcccttctgcatgatgagccacatgatcacaagcttagcgatcagcgagaggccctctcccacggacaaaatccccttcccatctactgtgcactgaataccaagggacagtctctcactacttttgaatttggcgaatggtgcgagttcagtccatatgaagtgggcttccccaaatatggcgcatttatcccttccgaactcttcggtagcgagttctttatggggcagctgatgaaaaggcttcctgaaagtcgcatatgctttttggagggtatttggtccaatttgtacgctgccaatctccaggactccctatattgggcttcagagccttcccagttctgggaccgctgggtaaggaaccaggccaatctggataaggagcaggtccctctcctgaagattgaggaaccaccgtccactgccggacggatagccgaattcttcactgaccttttgacttggagacccctcgctcaggcaacgcacaactttctgagaggtcttcactttcacaaagactatttccagcatccacatttctccacctggaaagctaccaccctggatggcctacccaaccagctgaccccatcagaaccccatctgtgtttacttgatgtgggctacttaattaacacatcatgcctcccccttctgcagcccaccagagacgtagacctcattttaagcctggactataatctgcatggtgccttccaacagcttcagctcttgggcagattctgtcaggagcaggggatcccatttcctcctatctcaccctcccccgaggagcagcttcagcctagagaatgtcacaccttctccgatccaacatgccccggtgcacccgcagtgctgcatttccctctggtatccgactcattccgggagtattcggctccaggggtacggaggaccccagaggaggccgctgccggtgaagtgaatctgtcctcatcggatagcccttaccattacacgaaagttacctacagccaagaggatgtggataaactacttcacctaacccactacaatgtgtgcaacaaccaggagcagctgttggaagctctgaggcaggctgtccagcgcagacgccagagaagaccgcactag

SEQ ID NO: 43107 - DNA, 2346 bp, Artificial Sequence
  derived and/or modified sequence
atggcagtggcagaagtctcaagaacctgcttgcttacagtgcgggtgttacaagcacaccgtctcccttcaaaagatttggtgacaccatctgattgctatgttacactgtggttacctacagcatgctctcacaggcttcaaacgcgcaccgtcaaaaacagttcaagtcctgtctggaaccaaagctttcactttagaatccaccggcagctcaagaacgtcatggagctgaaggtcttcgaccaggatctcgtaacgggcgatgacccagtactgagtgtgttgttcgatgcagggacccttcgtgcaggcgaatttcgcagagagagcttctcgctgtcaccgcaaggcgaggggaggctggaagtggagttcaggctgcagtcactggccgacagaggggaatggctggtaagcaacggtgttttagtcgctagagagctctcatgtttgcacgtgcaactggaggaaacaggggatcaaaaaagtagtgaacatagagtccagttggtggtccctggcagctgcgagggcccccaggaagcatctgtgggcaccggaacttttcgcttccattgcccagcctgttgggagcaggaactgtctatcagactgcaggacgcacccgaggaacagttgaaagctccactctccgctctccctagtggccaggtggtcagattagtcttccccacctcgcaggaacccctgatgagggtcgagcttaagaaagaagcgggattgcgcgaattggcggtccgcttggggtttggcccttgcgcagaggaacaggccttcctctctaggcgaaagcaagtggtagccgctgccctgaggcaggccctacaactggatggggacctgcaggaagacgaaatcccagtggtggctatcatggcaaccggaggagggattcgcgccatgacgtctctctacggacagttggccggacttaaggaactgggactgctcgactgtgtatcttacattacaggcgcttcaggttccacatgggcactagcaaacctctatgaagatcccgaatggtcccaaaaagacctggctgggcccactgagttgttgaaaacacaggtcacaaagaataagctaggagtgctcgccccgtcccaattgcagcggtacaggcaggagttggctgaaagggcacggctgggatatccctcatgttttactaatctatgggccttgatcaacgaggcacttctgcacgatgagccccacgatcataagctgtccgaccagcgagaggccctgtcccacggccagaaccctctgccaatttactgcgccctcaatacaaaagggcagagcctgaccacattcgaatttggtgagtggtgtgagtttagcccctacgaagttggctttcccaagtacggagcattcatcccctctgagttgttcggtagcgaattcttcatgggccaattgatgaagcgattgcccgagtctagaatctgtttcttggaaggtatatggagtaacctgtacgctgctaacttacaggacagcctttattgggcatccgagcctagccagttctgggataggtgggttagaaatcaagcaaatttagacaaggagcaagtacctctcctgaagatagaggagcccccatccaccgcaggccggatcgcagagttctttaccgaccttttgacctggcgccctctggcgcaggctacacataattttttacgcggattgcacttccataaagactattttcagcacccacacttttcgacttggaaggcaaccacattggacggcttgccaaatcagctcacaccttctgagcctcatttatgtctgctagacgtgggctatcttatcaatacctcctgtttacctctgctccaaccgacgcgtgacgtcgacctgatactctccctcgactacaacctacatggcgcgttccagcagctccagctgctgggccgattttgtcaggaacaggggatacccttccctcctatttccccatcacccgaagagcagctccaaccccgggagtgccacaccttctcggatccgacttgtccgggggcacccgccgtgctccattttccactagtgagcgactctttcagggagtactccgcccctggagtacgtcgtactccagaagaagctgcagccggagaagtcaatttatcttcaagcgattctccgtatcattacaccaaagtgacttattctcaagaagacgtcgacaaattgctacacctgactcactacaacgtctgcaacaatcaggagcagctgctggaggccctgcggcaggcggtccagagacgcagacaacggaggccacactag

SEQ ID NO: 43108 - DNA, 2734 bp, Artificial Sequence
  derived and/or modified sequence
accaattgggacatcacatccctggctctgggttagaaagctgacagtccttgatcctgtggccactgccccatcattcctgctcctgaggactcagtctcatggctgtggcagaggtgtccaggacctgcctgctcacggttcgtgtcctgcaggcccatcgcctaccctctaaggacctagtgaccccctctgactgctacgtgactctctggctgcccacggcctgcagccacaggctccagacacgcacggtcaagaacagcagtagccctgtctggaaccagagctttcacttcaggatccacaggcagctcaagaatgtcatggaactgaaagtctttgaccaggacctggtgaccggagatgaccctgtgttgtcagtactgtttgatgcggggactctgcgggctggggagttccggcgcgagagcttctcactgagccctcagggtgaggggcgcctggaagttgaatttcgcctgcagagtctggctgaccgtggcgagtggctcgtcagcaatggcgttctggtggcccgggagctctcctgcttgcacgttcaactggaggagacaggagaccagaagtcctcagagcacagagttcagcttgtggttcctgggtcctgtgagggtccgcaggaggcctctgtgggcactggcaccttccgcttccactgcccagcctgctgggagcaggagctgagtattcgcctgcaggatgcccccgaggagcaactaaaggcgccactgagtgccctgccctctggtcaagtggtgaggcttgtcttccccacgtcccaggagcccctgatgagagtggagctgaaaaaagaagcaggactgagggagctggccgtgcgactgggcttcgggccctgtgcagaggagcaggccttcctgagcaggaggaagcaggtggtggccgcggccttgaggcaggccctgcagctggacggagacctgcaggaggatgagatcccagtggtagctattatggccactggtggtgggatccgggcaatgacttccctgtatgggcagctggctggcctgaaggagctgggcctcttggattgcgtctcctacatcaccggggcctcgggctccacctgggccttggccaacctttatgaggacccagagtggtctcagaaggacctggcagggcccactgagttgctgaagacccaggtgaccaagaacaagctgggtgtgctggcccccagccagctgcagcggtaccggcaggagctggccgagcgtgcccgcttgggctacccaagctgcttcaccaacctgtgggccctcatcaacgaggcgctgctgcatgatgagccccatgatcacaagctctcagatcaacgggaggccctgagtcatggccagaaccctctgcccatctactgtgccctcaacaccaaagggcagagcctgaccacttttgaatttggggagtggtgcgagttctctccctacgaggtcggcttccccaagtacggggccttcatcccctctgagctctttggctccgagttctttatggggcagctgatgaagaggcttcctgagtcccgcatctgcttcttagaaggtatctggagcaacctgtatgcagccaacctccaggacagcttatactgggcctcagagcccagccagttctgggaccgctgggtcaggaaccaggccaacctggacaaggagcaggtcccccttctgaagatagaagaaccaccctcaacagccggcaggatagctgagtttttcaccgatcttctgacgtggcgtccactggcccaggccacacataatttcctgcgtggcctccatttccacaaagactactttcagcatcctcacttctccacatggaaagctaccactctggatgggctccccaaccagctgacaccctcggagccccacctgtgcctgctggatgttggctacctcatcaataccagctgcctgcccctcctgcagcccactcgggacgtggacctcatcctgtcattggactacaacctccacggagccttccagcagttgcagctcctgggccggttctgccaggagcaggggatcccgttcccacccatctcgcccagccccgaagagcagctccagcctcgggagtgccacaccttctccgaccccacctgccccggagcccctgcggtgctgcactttcctctggtcagcgactccttccgggagtactcggcccctggggtccggcggacacccgaggaggcggcagctggggaggtgaacctgtcttcatcggactctccctaccactacacgaaggtgacctacagccaggaggacgtggacaagctgctgcacctgacacattacaatgtctgcaacaaccaggagcagctgctggaggctctgcgccaggcagtgcagcggaggcggcagcgcaggccccactgatggccggggcccctgccacccctaactctcattcattccctggctgctgagttgcaggtgggaactgtcatcacgcagtgcttcagagcctcgggctcaggtggcacggtcccagggtccaggctgagggctgggagctcccttgcgcctcagcagtttgcagtggggtaaggaggccaagcccatttgtgtaatcacccaaaaccccccggcctgtgcctgttttcccttctgcgctaccttgagtagttggagcacttgatacatcacagactcatacaaatgtg

SEQ ID NO: 43109 - DNA, 2346 bp, Artificial Sequence
  derived and/or modified sequence
atggcagtcgccgaggtaagcagaacatgtctacttaccgtgcgcgtcctgcaggctcatagattgccttccaaagacctcgtgactccttcagattgctacgtcacattatggctacctaccgcttgctcgcataggctccaaacaagaacagtcaaaaattcctcctctcctgtgtggaatcagagttttcattttcgtattcacagacagctcaagaatgttatggaactaaaggtattcgaccaagacttggttaccggggacgaccccgtactgtccgtgctctttgatgcaggcacccttagagccggcgaatttcggagagagagcttttcactatccccccagggcgagggtaggctagaagtcgaattcagattgcaatctttggctgatcgtggcgaatggctggtgagcaatggggttctcgtagcaagagaacttagttgtctccacgtgcagttagaagaaactggggaccaaaagtctagtgaacacagagtgcagctggttgtgccaggtagctgtgagggcccacaggaggcgagtgttggtacaggtacttttcgctttcattgccccgcatgttgggaacaagaattaagcattcgacttcaggatgcacccgaggagcaactgaaagccccattatctgcgctgccaagcggtcaagtcgtgcgcctggtctttccgactagccaggagcccctgatgcgggtggagctgaaaaaggaggccggattgcgagaacttgcagtgagacttggattcggcccatgtgccgaagagcaagcattcctcagccgtcgaaaacaggttgtggcagcggctttaaggcaggccctacagctggatggagatttacaagaagacgagatcccagtggtggccatcatggctacaggcggcggaataagagccatgacaagtctctacgggcagctcgcaggcttgaaggaactcggtttgctcgactgtgtctcctacatcacgggcgcctcaggctcaacttgggctttagcgaacctgtatgaagacccagagtggtcgcagaaggatctggccggccctactgaactgttaaaaacacaagtgactaaaaataaactcggagtattagccccttctcagctgcagagataccgacaggaactggccgagcgggccaggttaggctacccatcatgctttaccaacctgtgggctctgattaatgaagctttgctgcacgatgagccacacgaccacaaactgagtgaccaaagggaagccctatcacacggccaaaacccactaccaatttactgcgcgctcaacacaaagggacagtctttaacaacgtttgagttcggggagtggtgcgaattttcaccctacgaggtgggttttcctaagtatggagccttcattccttcggagttgtttggaagtgaattcttcatgggccagttaatgaaacgtctgccggaatctcggatctgctttctggaaggtatttggagcaatctttatgctgccaacctccaggactcactctattgggcctccgaaccctctcaattttgggatcgctgggtccggaaccaggctaatttggacaaggaacaggttcccctgttgaagatcgaagagccaccttctactgccggtcgcatagctgaattttttaccgacctccttacatggagacctctggcccaagctacacataactttctacgaggactgcacttccacaaagattactttcaacatccccatttcagcacctggaaagctacaacgctggatggtttacctaatcagttgacacctagcgaaccccatctgtgtttgctcgacgtcggatatttgattaatacctcctgcctccccctattgcagccaaccagagacgtcgaccttattctttccctcgattataaccttcacggcgcttttcagcagctgcagctgctcggaagattttgtcaagagcagggcatcccttttccccctatttctccctccccagaagagcagctccagccacgcgaatgccataccttcagtgatcctacatgtccaggtgcaccggccgttctgcattttccattggtgtcagatagtttcagagagtattccgcacccggtgtcagacggacccctgaggaagccgcagcgggagaagtgaatctgagctctagtgattccccgtaccattataccaaagtgacatacagccaggaggatgtagataaacttctgcacctgacccattacaatgtttgtaacaaccaggagcaactcctagaagccttgaggcaagctgtacaacgacgcagacaaaggagaccccactag

SEQ ID NO: 43110 - DNA, 2346 bp, Artificial Sequence
  derived and/or modified sequence
atggccgtggccgaagtgagcaggacttgtctgctcacagtgcgcgttcttcaggcacatcgcctgccgtcaaaggatctcgtgacacctagcgactgttatgtaaccttatggctcccaacagcttgttcccacaggctgcagactagaaccgtgaaaaactctagctcccccgtgtggaatcagtcctttcactttagaatccatagacagttgaaaaatgtaatggagctgaaagtgtttgatcaagaccttgtcacgggagatgaccccgtactgtcagttctgtttgatgccgggactctccgagcaggcgagtttcgaagagagagttttagcctgtccccacaaggggaaggccggttggaggtggagttccgcctacagagcctcgccgacaggggtgagtggcttgttagtaacggcgtgttggtcgcccgtgagctcagctgtctccacgtccagctcgaagagactggagaccagaagtcaagtgagcaccgtgtacaactggtagtgcctgggtcttgcgaaggcccccaagaggcaagtgtgggaactgggacttttcgtttccattgccctgcttgctgggaacaggagctttccatcaggctacaggatgcccccgaagaacagctgaaggcaccactgtctgccctcccttctggacaagtagtgcggttagttttccctacctcccaggagcctctgatgagggtggaattaaagaaggaagccggtctgcgcgagctggcagtacgactgggcttcgggccatgcgccgaagagcaggctttcctctcccgccgtaagcaagtggtagccgccgcactacggcaggccctgcagcttgacggcgaccttcaggaagacgaaattccagtggtggctatcatggcaacgggcggcgggattagggctatgacctcattgtatggccagttagcaggcttgaaggaactaggtctactggattgcgtctcctatattacgggggcctccggatccacgtgggctctggcgaacttgtacgaggaccccgaatggagtcaaaaggatttggcggggccaaccgagttgctgaaaacacaggtgacaaagaataaactgggagttctcgccccaagtcagcttcagagataccggcaggagctcgctgagcgagcacggctcgggtatccatcctgcttcaccaatctctgggccctcatcaacgaagccttactccacgatgaaccccacgatcacaagctgtctgaccagagggaggctctcagccacggacagaacccactgcctatttattgtgctcttaacactaagggccagagtttaacaacattcgaattcggcgagtggtgcgagttttctccatacgaggtaggtttccccaagtacggggctttcatcccctccgagctcttcggatcagagttctttatgggccagctcatgaagcgtctgcccgagtcacggatctgcttcttggagggaatttggtctaacctgtacgcagccaatcttcaggattctctctactgggctagtgagccttcgcagttttgggatcgatgggtcagaaaccaggccaatctcgacaaggagcaggtgcccctgctgaaaatagaggaacccccatccacggccggacgtatcgcagagttttttactgatttactgacctggaggcccctggctcaggctactcacaacttcttaagaggactccattttcacaaggactacttccagcacccgcacttctctacctggaaagctaccacattggatggcctccctaaccagctcacaccatccgaacctcacttgtgcctcctggacgtgggctacctaatcaatacaagctgtttaccactcttgcaacccacacgggatgttgacctgatactgtcactggactacaatctccacggggcattccagcagctgcagctgctgggaaggttttgccaggagcaaggcatacctttcccacccatcagcccgagccccgaggagcagctgcagccccgtgaatgccacactttctccgatccgacttgtcctggagcccctgctgtccttcactttcctctggtgtctgattcttttcgcgagtattctgcaccaggtgtcaggcgcacccctgaagaagccgctgccggagaagtaaatttgtcttcaagcgatagcccatatcactacacaaaagtaacctattcacaggaagacgtggacaagttactacatttgacacattataacgtctgtaacaatcaggagcagctcctggaggccctaagacaggcagtccagaggcggaggcaacgccgacctcattag

SEQ ID NO: 43111 - DNA, 2346 bp, Artificial Sequence
  derived and/or modified sequence
atggccgtggccgaggtgagccggacctgcctgctgaccgtgcgggtcttacaagcacaccgtctccctagcaaggacttggtgacgcctagcgactgctacgttaccctgtggttaccaacggcttgttctcatagactacaaacgcgcacagtgaaaaacagcagcagtccggtatggaatcagtctttccacttccgcatccatcggcagctgaagaatgtgatggaactcaaagtcttcgatcaggatttagtgactggtgacgatccagtcttaagcgtcttgtttgatgctggcactcttagggcaggggagtttaggagggagtcatttagtctctctccccagggggaaggacggcttgaagttgaattcaggctgcaaagcttggcggaccggggcgagtggctcgtgtcaaacggcgttcttgtcgctagagaactgagctgtctgcacgtccagctggaggagaccggcgaccagaaatctagcgagcatcgcgtgcagcttgtcgtgccaggcagctgcgaagggcctcaggaggcatcggtaggcactggcacattcagattccattgccccgcctgttgggagcaggagcttagcattcggctccaggacgccccggaggagcaactcaaggcaccactatccgccctgccttctggacaagttgtgagactggtgttccctacctcacaagaacctctgatgcgcgtcgaactcaaaaaggaggccggactgagagaactagcagttcgactcggttttggaccatgcgctgaagaacaggcattcctatctagacgcaagcaagtcgtggctgccgctctccggcaggcactccagctcgacggggatttacaggaggatgagattcccgtcgtggctatcatggcaacaggtgggggaattcgagcaatgaccagcctgtacggacagctggccgggctgaaggagctgggtctcctggattgcgtaagctacatcaccggcgcttctgggtccacctgggccctggctaatctttacgaggaccccgaatggagccagaaggacctcgcgggcccaactgagctgctcaagacgcaggtaaccaaaaataaattaggcgtactggcgccttcccagctgcaacgctacaggcaggagctggcagaacgggcccgcctgggttatcccagctgcttcaccaacctttgggccttgataaacgaggcactcctgcatgacgagcctcatgatcataagctcagcgaccagcgggaggcattgtcccacggtcagaaccccctcccaatatattgcgcactcaatactaagggacagagtctcactacgtttgaattcggagaatggtgtgagttttccccctacgaggtggggtttcccaagtacggagctttcataccttctgaattgtttggctcagagttttttatggggcaactgatgaaacgcctaccagagagtagaatatgctttctcgaaggcatttggagcaacttatatgcagctaatcttcaagattcactctactgggcctcagaaccgtcccagttttgggaccggtgggtgcgtaaccaggcaaacctcgacaaggagcaggtacctcttctgaagattgaagaacctccatcgaccgctgggcgtattgcagaattcttcaccgatctgttgacctggcgcccactggcgcaagccacacataactttctaagggggcttcactttcacaaggactactttcagcacccacacttcagcacctggaaggccaccaccttagatgggcttcctaatcagcttacaccttccgagccccacctgtgtcttttggatgttggatatcttattaacacctcatgtctcccattgcttcagcctacgagagacgtggacttgattctgagccttgactataatctgcatggtgcatttcaacagttgcaactgttgggccgcttttgtcaggagcagggtattccatttccacctatcagtcccagtccagaagagcaattacagcctagggaatgtcacaccttcagtgacccgacatgccctggcgcgcctgccgtcttgcatttcccgctagtcagcgatagctttcgggaatactcagcccccggagtccgcaggaccccggaggaggcagccgctggagaagtgaacctttcctcatccgatagcccttatcattacaccaaggtcacttactctcaagaagatgttgacaagttactgcaccttacccactacaacgtgtgcaacaatcaggaacagttattagaagccctgagacaggcagtccagcgccgccgacagagaaggccccactag

SEQ ID NO: 43112 - RNA, 2346 nt, Artificial Sequence
  derived and/or modified sequence
auggcaguggcagaagucucaagaaccugcuugcuuacagugcggguguuacaagcacaccgucucccuucaaaagauuuggugacaccaucugauugcuauguuacacugugguuaccuacagcaugcucucacaggcuucaaacgcgcaccgucaaaaacaguucaaguccugucuggaaccaaagcuuucacuuuagaauccaccggcagcucaagaacgucauggagcugaaggucuucgaccaggaucucguaacgggcgaugacccaguacugaguguguuguucgaugcagggacccuucgugcaggcgaauuucgcagagagagcuucucgcugucaccgcaaggcgaggggaggcuggaaguggaguucaggcugcagucacuggccgacagaggggaauggcugguaagcaacgguguuuuagucgcuagagagcucucauguuugcacgugcaacuggaggaaacaggggaucaaaaaaguagugaacauagaguccaguugguggucccuggcagcugcgagggcccccaggaagcaucugugggcaccggaacuuuucgcuuccauugcccagccuguugggagcaggaacugucuaucagacugcaggacgcacccgaggaacaguugaaagcuccacucuccgcucucccuaguggccagguggucagauuagucuuccccaccucgcaggaaccccugaugagggucgagcuuaagaaagaagcgggauugcgcgaauuggcgguccgcuugggguuuggcccuugcgcagaggaacaggccuuccucucuaggcgaaagcaagugguagccgcugcccugaggcaggcccuacaacuggauggggaccugcaggaagacgaaaucccagugguggcuaucauggcaaccggaggagggauucgcgccaugacgucucucuacggacaguuggccggacuuaaggaacugggacugcucgacuguguaucuuacauuacaggcgcuucagguuccacaugggcacuagcaaaccucuaugaagaucccgaauggucccaaaaagaccuggcugggcccacugaguuguugaaaacacaggucacaaagaauaagcuaggagugcucgccccgucccaauugcagcgguacaggcaggaguuggcugaaagggcacggcugggauaucccucauguuuuacuaaucuaugggccuugaucaacgaggcacuucugcacgaugagccccacgaucauaagcuguccgaccagcgagaggcccugucccacggccagaacccucugccaauuuacugcgcccucaauacaaaagggcagagccugaccacauucgaauuuggugaguggugugaguuuagccccuacgaaguuggcuuucccaaguacggagcauucauccccucugaguuguucgguagcgaauucuucaugggccaauugaugaagcgauugcccgagucuagaaucuguuucuuggaagguauauggaguaaccuguacgcugcuaacuuacaggacagccuuuauugggcauccgagccuagccaguucugggauagguggguuagaaaucaagcaaauuuagacaaggagcaaguaccucuccugaagauagaggagcccccauccaccgcaggccggaucgcagaguucuuuaccgaccuuuugaccuggcgcccucuggcgcaggcuacacauaauuuuuuacgcggauugcacuuccauaaagacuauuuucagcacccacacuuuucgacuuggaaggcaaccacauuggacggcuugccaaaucagcucacaccuucugagccucauuuaugucugcuagacgugggcuaucuuaucaauaccuccuguuuaccucugcuccaaccgacgcgugacgucgaccugauacucucccucgacuacaaccuacauggcgcguuccagcagcuccagcugcugggccgauuuugucaggaacaggggauacccuucccuccuauuuccccaucacccgaagagcagcuccaaccccgggagugccacaccuucucggauccgacuuguccgggggcacccgccgugcuccauuuuccacuagugagcgacucuuucagggaguacuccgccccuggaguacgucguacuccagaagaagcugcagccggagaagucaauuuaucuucaagcgauucuccguaucauuacaccaaagugacuuauucucaagaagacgucgacaaauugcuacaccugacucacuacaacgucugcaacaaucaggagcagcugcuggaggcccugcggcaggcgguccagagacgcagacaacggaggccacacuag

SEQ ID NO: 43113 - RNA, 2346 nt, Artificial Sequence
  derived and/or modified sequence
auggcagucgccgagguaagcagaacaugucuacuuaccgugcgcguccugcaggcucauagauugccuuccaaagaccucgugacuccuucagauugcuacgucacauuauggcuaccuaccgcuugcucgcauaggcuccaaacaagaacagucaaaaauuccuccucuccuguguggaaucagaguuuucauuuucguauucacagacagcucaagaauguuauggaacuaaagguauucgaccaagacuugguuaccggggacgaccccguacuguccgugcucuuugaugcaggcacccuuagagccggcgaauuucggagagagagcuuuucacuauccccccagggcgaggguaggcuagaagucgaauucagauugcaaucuuuggcugaucguggcgaauggcuggugagcaaugggguucucguagcaagagaacuuaguugucuccacgugcaguuagaagaaacuggggaccaaaagucuagugaacacagagugcagcugguugugccagguagcugugagggcccacaggaggcgaguguugguacagguacuuuucgcuuucauugccccgcauguugggaacaagaauuaagcauucgacuucaggaugcacccgaggagcaacugaaagccccauuaucugcgcugccaagcggucaagucgugcgccuggucuuuccgacuagccaggagccccugaugcggguggagcugaaaaaggaggccggauugcgagaacuugcagugagacuuggauucggcccaugugccgaagagcaagcauuccucagccgucgaaaacagguuguggcagcggcuuuaaggcaggcccuacagcuggauggagauuuacaagaagacgagaucccagugguggccaucauggcuacaggcggcggaauaagagccaugacaagucucuacgggcagcucgcaggcuugaaggaacucgguuugcucgacugugucuccuacaucacgggcgccucaggcucaacuugggcuuuagcgaaccuguaugaagacccagaguggucgcagaaggaucuggccggcccuacugaacuguuaaaaacacaagugacuaaaaauaaacucggaguauuagccccuucucagcugcagagauaccgacaggaacuggccgagcgggccagguuaggcuacccaucaugcuuuaccaaccugugggcucugauuaaugaagcuuugcugcacgaugagccacacgaccacaaacugagugaccaaagggaagcccuaucacacggccaaaacccacuaccaauuuacugcgcgcucaacacaaagggacagucuuuaacaacguuugaguucggggaguggugcgaauuuucacccuacgagguggguuuuccuaaguauggagccuucauuccuucggaguuguuuggaagugaauucuucaugggccaguuaaugaaacgucugccggaaucucggaucugcuuucuggaagguauuuggagcaaucuuuaugcugccaaccuccaggacucacucuauugggccuccgaacccucucaauuuugggaucgcuggguccggaaccaggcuaauuuggacaaggaacagguuccccuguugaagaucgaagagccaccuucuacugccggucgcauagcugaauuuuuuaccgaccuccuuacauggagaccucuggcccaagcuacacauaacuuucuacgaggacugcacuuccacaaagauuacuuucaacauccccauuucagcaccuggaaagcuacaacgcuggaugguuuaccuaaucaguugacaccuagcgaaccccaucuguguuugcucgacgucggauauuugauuaauaccuccugccucccccuauugcagccaaccagagacgucgaccuuauucuuucccucgauuauaaccuucacggcgcuuuucagcagcugcagcugcucggaagauuuugucaagagcagggcaucccuuuucccccuauuucucccuccccagaagagcagcuccagccacgcgaaugccauaccuucagugauccuacauguccaggugcaccggccguucugcauuuuccauuggugucagauaguuucagagaguauuccgcacccggugucagacggaccccugaggaagccgcagcgggagaagugaaucugagcucuagugauuccccguaccauuauaccaaagugacauacagccaggaggauguagauaaacuucugcaccugacccauuacaauguuuguaacaaccaggagcaacuccuagaagccuugaggcaagcuguacaacgacgcagacaaaggagaccccacuag

SEQ ID NO: 43114 - protein, 500 aa, Artificial Sequence
  derived and/or modified sequence
MATVIPGDLSEVRDTQKVPSGKRKRGETKPRKNFPCQLCDKAFNSVEKLKVHSYSHTGERPYKCIQQDCTKAFVSKYKLQRHMATHSPEKTHKCNYCEKMFHRKDHLKNHLHTHDPNKETFKCEECGKNYNTKLGFKRHLALHAATSGDLTCKVCLQTFESTGVLLEHLKSHAGKSSGGVKEKKHQCEHCDRRFYTRKDVRRHMVVHTGRKDFLCQYCAQRFGRKDHLTRHMKKSHNQELLKVKTEPVDFLDPFTCNVSVPIKDELLPVMSLPSSELLSKPFTNTLQLNLYNTPFQSMQSSGSAHQMITTLPLGMTCPIDMDTVHPSHHLSFKYPFSSTSYAISIPEKEQPLKGEIESYLMELQGGVPSSSQDSQASSSSKLGLDPQIGSLDDGAGDLSLSKSSISISDPLNTPALDFSQLFNFIPLNGPPYNPLSVGSLGMSYSQEEAHSSVSQLPPQTQDLQDPANTIGLGSLHSLSAAFTSSLSTSTTLPRFHQAFQ

SEQ ID NO: 43115 - DNA, 7338 bp, Artificial Sequence
  derived and/or modified sequence
agctgcaagttgggctgcaggggcagcgcatacactacaatggctgctggaaagaggcgtaaggaaacaatttccaggcccgccgcgtccagcccgaaatatgagaaaaaaattattagaaattccgcgggcggtgtagaggcggcggacgggccggagggaggatgttaaagccccgcggttgcctcttggtgctgccttggccgtatttggcacccagaatgcttcattctgtgacggtctattaataaggttgccttgctagagtttggagcagggcctcagattggccaaaatgggaaggattggattccactctcttccacgaagagtcaatgggactggctaagatcaaagtctgaggctttttccatcagtaatcagtccctttttgctttcttttacgaccacatgaaacttgagaagccacctaaagctatatcatttagtggagttgggcagttcccaagtgtccaacaagaaggcctggtttaggctgcgatggccactgtcattcctggtgatttgtcagaagtaagagatacccagaaagtcccttcagggaaacgtaagcgtggtgaaaccaaaccaagaaaaaactttccttgccaactgtgtgacaaggcctttaacagtgttgagaaattaaaggttcactcctactctcacacaggagagaggccctacaagtgcatacaacaagactgcaccaaggcctttgtttctaagtacaaattacaaaggcacatggctactcattctcctgagaaaacccacaagtgtaattattgtgagaaaatgtttcaccggaaagatcatctgaagaatcacctccatacacacgaccctaacaaagagacgtttaagtgcgaagaatgtggcaagaactacaataccaagcttggatttaaacgtcacttggccttgcatgccgcaacaagtggtgacctcacctgtaaggtatgtttgcaaacttttgaaagcacgggagtgcttctggagcaccttaaatctcatgcaggcaagtcgtctggtggggttaaagaaaaaaagcaccagtgcgaacattgtgatcgccggttctacacccgaaaggatgtccggagacacatggtggtgcacactggaagaaaggacttcctctgtcagtattgtgcacagagatttgggcgaaaggatcacctgactcgacatatgaagaagagtcacaatcaagagcttctgaaggtcaaaacagaaccagtggatttccttgacccatttacctgcaatgtgtctgtgcctataaaagacgagctccttccggtgatgtccttaccttccagtgaactgttatcaaagccattcacaaacactttgcagttaaacctctacaacactccatttcagtccatgcagagctcgggatctgcccaccaaatgatcacaactttacctttgggaatgacatgcccaatagatatggacactgttcatccctctcaccacctttctttcaaatatccgttcagttctacctcatatgcaatttctattcctgaaaaagaacagccattaaagggggaaattgagagttacctgatggagttacaaggtggcgtgccctcttcatcccaagattctcaagcatcgtcatcatctaagctagggttggatcctcagattgggtccctagatgatggtgcaggagacctctccctatccaaaagctctatctccatcagtgaccccctaaacacaccagcattggatttttctcagttgtttaatttcatacctttaaatggtcctccctataatcctctatcagtggggagccttggaatgagctattcccaggaagaagcacattcttctgtttcccagctccccccacaaacacaggatcttcaggatcctgcaaacactatagggcttgggtctctgcactcactgtcagcagctttcaccagcagtttaagcacaagtaccaccctcccacgtttccatcaagcttttcagtaggattctgggacatggattcattacagaaatgtatgtgtagctgtgccctagatgaccatttttattttagtgcctactttaaaacagtataaaaatttctgcttttgtataatacaaattttcattaagccagtataaaatagaaactagcttttaaactgagctttggaaccatttgtgttcagttaagtttacctgggtattttgtcctgattcactgccaattgtcacattttaagacttttttttttccatataggaaagccattattagtagtaaacttttacaaatcccattttcaaattacttttagatcttaaaattttcatttttgtctaataacagtggctctaccttttgacatctggctcattaaaaaatttagcaatagaatgtaaattgtataaaaagtttgtgaataactcaagggtttaaattttcttactagcttctaaatggattaataatcaagtgcttcaaatgaattaagagtccagtttcggaagataataaatgtttgttagatacaccataatttcagatcagtatattctgaagactccctgttgtctggctaaaatatttgccatctttattatgagcctttaaggaaaacaaaccctaaacacaaagcatcagtatttatagcaaaaagagactctgttaggtgacatggcatttcgtgtcacttaatagttggccctaaattagtacacaggatattttgtcgtgtttcatccttcttaacatgctatcttttcatttaataatagtaatagtgtatggcattggggtcttcagagtcgatatataggtagatctctttagtcttttccacctttcacatccaaggggtgggtcaagtgcagccagcaatttattttcattgttggcccacggttagtccataatctagagccattgtggaactgcagccatgaggtgtgtttatcccacagtggattgactcagcctctgtgggtgacagacttctaagcaggaagatagacgtgaagcacatggttacatttgggaacttgtgtagggatcatggcccctgtagccagggttaaaaactggactttttagaagtaaagtaaaagcatatcgcttatatcatttcttgctgaatttgatatgtttttctttcccttaagaatcaaaagcagaaaacaaaaacaacagtcctactccgatgttatctttctgattcaatgtgaatccatctttccttgcaatattttggatggagaatttgaagttaaatgcattagaaaactacctgatgaactaccacaaagttttaagtgactagaaatatatacagtaaaatcccactttcatgcatctctgggaaatgataggagtattgcaaataagttgagtttgtagagggtaacaaagtaaagtaaaacaaacctatcttggttaacatgaaaataacaattgagaatatattatattcactgaataattataggcttttcctcacattagacaaccaacataatcttcttaaaggtctaattaatatatttttctaagggtcagttgggacattaacctaagaaacatatctattaagcacttgttaacaccttattttaggaccctttccgttggggatgggggcaagggtgggaggtttttagaagagtatatatctctttaaaaaaaaacagaaagaaaaatatttctgagcactcattagccctatatggaaacttctttcctttttgtagggccagttatcactgcagattgcaatgtttaccaagaatttctaaaaatgagtgcagattactgaatataatacattatttaaaatatttgggagtagtataatttgtggagaaatgtaaattgtaataatgtaaatgggggcttcaatatatatatataatacacacacacacacacatgcacacataccgcacttcatagaatcaaagttgctctctgaaggagctttggctcctgatattttatcatgctcctatatttttttaatccttggagcagtagtttttatacttatgtatttaaattttattatgaaaaattacatttattaaaaaagtgtgttccaaaggcattaaaattatatatgttaataaggaagtacatttttaaatttttcaaactgctcctagcttttgattaggagaatattttttctgaaagtaggcttttcgctctgcttcattactgcttcctttagtttctatgaaacagattgcttacctaaatctttagttgaatgattagtgttcaatattgctttaatcaccatataaaaggaaaaaaattggtgacagagcacaaatagaaaacctatttttaaatagaaatcacaaatagcaagtgtggaagcactactttattctgtttaaaatgtacttaagaagtcatcaaattagtgaactgagacattggccttagtaggctgtattcactgctaatttaaaaaagggagtaccaggatttattaagtaaagcattttggaaatggggaatagcgccatatatgtatgtatgtgtatgtgtgtgtgtgtgtgtgtatatatacacacacacacacatacttaaatcttgccctgcatgaaattcaaatacatggaggcacatcttcagggcaccagtgttaaaattttggagtcttaattttcatgtgtacacctctttgcctgttcccacccccagacttgaaataacacttcagagtaagagggaattcagctaatttgtttttaaaattgactgtagtggtcactaaaccctttttgagagaatttctattaaagatgaggcagactcgcttatttgaattgcacaatgttctaacaaggatgtaacacagaattggcttttttttccctagaaaaagattgtttgtttctatgtcaactagatatgattaaaaataagtattgccaatgctgttttcattctctagtggccagaatcattatccttgaaatttctggtagtgccttagcttggttaaaaaaaaaaaaaaaaaaaaaaaaaagggattaacattaaataaaagtagtttagaatttgggcctcagacaagatattgaacctcattcagtttcacttccacatgtatgtacaagttaggtcaccaaacacggaagtgtgagtgtggaaggatcttggcactgtaagcaatgctatccattgatgtatacaagtacctttatagttatcgatcactgttaaaactttcattttaaaatcctattaccaagttcagttttttaaaacttcaattgtcctggctgattatgcatcactctgtgtgcaacttttttatttcatttagtgtttctttcaagctgtgtatttttgcctatttgttgcttgtgctttatttttcttagtcatttgtggaatatagtgatatattgtgttaatttggacagtagcggtttttaaaaaccatatactgactgaaacatgagccagagccgattgctttattaagctaataatgaatgttaaagagtacatattttcaggatcgttcatctagtgagcaatacacatattataggccaatatttttttaaaaaatagagcttggtcaacctctatactacacatattacaagatatagcactttcaaaatgaatctaaacctttacagaaactttcttataggttatgccttttattttaagacttattataattcaagtgccattagatgatatatatgtaggcctttgatatataatgctttgtgtacaaaaatggtagatggtattttaaacaggtacatttttacagtgttttcttatcaatttgctatattgcacagaatcagtgtgtgtcttttcataaggttttacaatggtttatttttttacaaggtttacgtgtctcaaagcacactgtcttcccagtacgtaagttaaaaaataccagttcacccaagttgcttctagcctactgagatccatgtgacattggaggagatcttttaaatgtttagtattcgtcattagcaatggctggctgttagttctggtaaatgtgtgcctaagttgaatttgtcttgtttttctcacactgtgtcagcagccatgtctacaacacagataagtctgttgtgatcacatagatctacataagttgtgcagttttgtgctaaaaacccatagggagctcctttgggatcatagaaaagaagatcatgcaaccagcattggtgaaggcacactcagattgcacttagggcctttctatgatgttgtcaaccctctgaggatggaaggcagtgtcttttgatgttatctagcctagaaatgacacagaactattgctaatgtataaaacacttcattatataagcttcagtggtacagatgaaccagaatgaatgtttatcttctcagaaacactccttcaatattatattggatcatgctgctaatgtaacttgggctacaactcttcatggtgctacaaacttctctgtctcattcagtcgtatttttttatccatagaaaaaggactacattaggtgtaaaagtgtacaatatatttttatactgtgacttaatttgtcattaacaaacttttacaccaccacaatgtattcatgtgcacttgcaaaaggagatctcggacatgcaaatgttaccagaacaaacccagcttttgtccacaaggtgactgtaactcagaatggaaagtgggctttataatagggtgtggagtgaagaacatgctgtatgttactaacagccctttgaatttaacaaaaactgggaatccattaggaaacggattgcatcatacctgaacataagctggactgctgaaattgtatttttagctaatgaaaaagtgtttggactagtactctaaaaatgttctaatgataaagttttgagtcaaaatagaaaagaaaaaaatctgcattccaggccgaattttgtatatttttattgcatttaaaattgctattctgtaatattgggaaatcaagtggcttatcatgtatatcgtgtacttaaaatgtattcacaaactactgttgtatttgtataaaatatagacaaagatcatattttttgtgtgtgtataagctctgtaaaatagcaatcacattatgaagctgcagtgatactacattttaaacattcacatccaaagaagcagactatttattgtccatataccagatttaaaatattaatttgctgctaattaaataatagtactgcagcttcttgtggcctacagtgttatgtttgctgtaagaataagatatgtgaattccacaaaatatatgaataaaattatagaatggcttta

SEQ ID NO: 43116 - DNA, 1503 bp, Artificial Sequence
  derived and/or modified sequence
atggccacggttattcccggggatctctccgaggtccgcgatacccagaaagtgcctagcgggaaaaggaaaagaggtgagactaaaccgagaaagaatttcccgtgccagctgtgtgacaaggcttttaatagcgttgagaagctgaaggtgcacagctattcccacaccggcgaacggccttataaatgcatccagcaagactgtacaaaggcttttgtgtcaaagtataaactgcagagacatatggcgacccactcccccgagaaaactcacaagtgtaactactgtgagaagatgtttcaccgtaaagatcacctaaaaaaccatctgcacacacatgatccgaataaagagacatttaaatgtgaagagtgcggaaaaaattataacacgaagctgggctttaagcggcaccttgcgctgcacgccgccacctctggcgacttgacatgtaaggtctgtctccagacctttgagtccaccggcgttcttctcgagcacttgaaatcacacgccggtaagagtagtggcggagtcaaagagaaaaagcaccagtgtgaacactgtgatcggcgcttttacacgaggaaggatgtcaggaggcacatggtcgttcacaccggtcggaaggattttctgtgccagtactgtgcccaaaggtttggccggaaagatcacctgacacggcacatgaagaagtcccataatcaggagctgctgaaggtgaagaccgagccggtcgattttctcgatccattcacctgcaatgtgtcagtgccaattaaggacgagttgctgccagtaatgagcttgccatcctctgaattattatccaaaccattcaccaatacattgcagcttaatctgtacaatacaccgtttcagtctatgcagagcagcggctcagctcaccaaatgatcacaacccttcctctcggtatgacctgtcctattgacatggacacggtgcacccctctcaccacctctctttcaaatatcccttctcctctacttcctacgctatcagcattcctgagaaggagcagccactgaagggcgagatcgagtcctacctaatggaactccaggggggcgttccctcaagctctcaggacagccaggctagcagtagcagcaaactggggctggatccacagataggatctctggacgacggagccggcgatctgtccctcagcaaaagctccatttcgatatccgatccactgaacactccagccctggatttctctcagctctttaatttcattcccctgaacggccctccctacaacccactcagcgtaggaagtctgggcatgtcatacagccaggaggaggcacactcatcagtgtcccagctgccgccccagacacaggaccttcaggacccagccaacaccattgggctcggaagcctgcattcattatccgctgccttcacctccagtctatccacatctacaaccttgccaagattccatcaagcgttccagtag

SEQ ID NO: 43117 - DNA, 1503 bp, Artificial Sequence
  derived and/or modified sequence
atggctacagtgatacccggggatctgagtgaagtgcgggatacacaaaaggttcccagcgggaagcggaaaaggggggaaacaaaacctcgaaaaaatttcccatgccagctgtgcgataaggcgttcaatagcgtcgagaaactcaaagttcatagttattcacacacgggcgaacggccatataaatgcattcaacaagattgtaccaaagcttttgtgtcaaagtacaagctccagagacatatggcaacccattccccagaaaaaacccacaagtgtaactactgcgaaaagatgttccatagaaaagaccatctaaaaaaccacctgcatactcacgaccctaacaaagagacattcaaatgcgaggagtgcggcaagaactacaatacaaagctgggattcaaacggcaccttgctctgcacgccgcgacctcaggcgatctcacttgcaaggtgtgtctacaaactttcgagagcaccggggttctcctggaacacctaaagtctcacgcgggcaaatcctccggcggcgttaaggagaagaagcaccaatgtgagcattgcgaccgtaggttctacaccaggaaggatgtgagacggcacatggtagtacatactgggcgcaaggactttctgtgtcagtactgtgcccagcgttttgggagaaaggaccatctgaccagacacatgaagaagtcacacaatcaggagttacttaaggtgaagacagaacccgtagatttcttggatccctttacatgcaatgtcagcgtgccaattaaggatgaacttttgccagtgatgagtctgccttcgtccgagctgttgtctaagcctttcacgaatacccttcagcttaacctctacaacacaccatttcagtctatgcagagctccggaagtgctcaccagatgatcactaccttgccactagggatgacatgccccatagacatggataccgttcatccttcccatcacctgtctttcaaatacccctttagcagcacttcttacgccatcagtattccggaaaaggaacagccactaaagggagagattgagtcatacctgatggaactgcaggggggcgtcccctccagctcccaggactctcaggcttcctccagtagcaagctaggtctggacccacagattgggagccttgatgacggcgccggggacctgtctctgtctaagagcagcatctccattagtgatccgcttaatactcctgccttagacttttcccaactttttaatttcatacctctgaatgggcccccttacaatcccctaagcgtcggctcactcggtatgtcgtatagtcaagaagaagcccattcctccgtatcccaactaccgcctcagacccaggatctacaggatcccgcaaatactatcggcctcggttctcttcactccttatcggcggcgtttaccagttctctgtccacaagtaccacccttcctcgatttcaccaggccttccaatag

SEQ ID NO: 43118 - DNA, 1503 bp, Artificial Sequence
  derived and/or modified sequence
atggccaccgtcatccctggggacctgtctgaggtgcgggacacccagaaggtgcccagcggcaagaggaagagaggagagaccaagcccaggaagaacttcccctgccagctgtgtgacaaggccttcaacagcgtggagaagctgaaggtgcacagctacagccacactggagagcggccctacaagtgcatccagcaggactgcaccaaggcctttgtgtccaagtacaagctgcagaggcacatggccacccacagccctgagaagacccacaagtgcaactactgtgagaagatgttccacaggaaggaccacctgaagaaccacctgcacacccatgaccccaacaaggagaccttcaagtgtgaagaatgtgggaagaactacaacaccaagctgggcttcaagaggcacctggccctgcacgccgccaccagcggggacctgacctgcaaggtgtgcctgcagacctttgagagcactggagtgctgctggagcacctgaagagccatgctgggaagagcagtggaggagtgaaggagaagaagcaccagtgtgagcactgtgaccggcgcttctacaccaggaaggatgtgagaagacacatggtggtgcacacaggcaggaaggacttcctgtgccagtactgtgcccagcgcttcggcaggaaggaccacctgaccaggcacatgaagaagagccacaaccaggagctgctgaaggtgaagacagagcctgtggacttcctggaccccttcacctgcaatgtgtctgtgcccatcaaggatgagctgctgcctgtgatgagcctgcccagcagcgagctgctgagcaagcccttcaccaacaccctgcagctgaacctgtacaacacccccttccagagcatgcagagcagcggcagcgcccaccagatgatcaccaccctgcccctgggcatgacctgccccatcgacatggacacagtgcaccccagccaccacctgtccttcaagtaccccttcagcagcaccagctatgccatcagcatccctgagaaggagcagcccctgaagggggagattgagagctacctgatggagctgcagggcggcgtgcccagcagcagccaggacagccaggccagcagcagcagcaagctgggcctggacccccagatcggcagcctggatgatggagctggggacctgagcctgagcaagagcagcatcagcatcagtgaccccctgaacaccccagccctggacttcagccagctgttcaacttcatccccctgaatggccccccctacaaccccctgtctgtgggcagcctgggcatgagctacagccaggaggaggcccacagctctgtgtcccagctgcccccccagacccaggacctgcaggaccctgccaacaccatcggcctgggcagcctgcacagcctgtctgctgccttcaccagcagcctgagcaccagcaccaccctgccccgcttccaccaggccttccagtag

SEQ ID NO: 43119 - DNA, 1503 bp, Artificial Sequence
  derived and/or modified sequence
atggccaccgtgatccccggcgacctgagcgaggtgcgggacacccagaaggtgccgtccgggaaacggaaaagaggagagacaaaacctcggaagaacttcccttgtcagctctgtgataaagccttcaatagcgttgagaaacttaaagtgcactcctactcacatactggcgagcgtccttacaagtgcatccaacaagactgtacaaaggcattcgtgtcaaagtataaacttcagcgccatatggccacccacagccccgagaaaactcacaagtgcaactattgcgaaaaaatgttccaccggaaggatcacctgaaaaatcacctgcacactcacgacccgaataaggaaacctttaagtgcgaagagtgtggaaaaaattataacacaaagctcggtttcaaacgacatctggcactgcatgccgccacttctggcgacctgacctgtaaggtctgtttgcaaacattcgaatctacaggggtgcttctggagcatctgaagtcccacgctggtaaatcaagcggaggcgtaaaagagaaaaaacatcagtgtgaacactgtgataggcggttttacacacggaaagacgtgagacgacacatggtagtacacactggacggaaggacttcctgtgccagtactgtgctcaacgatttgggcgtaaggatcacctgacccgacacatgaaaaagtcccacaatcaggaactactgaaggttaaaactgaacctgtggatttcttggatccattcacttgcaatgtctccgttccgattaaagacgagcttctgcctgtgatgagccttccaagctcagaactgcttagtaaaccattcaccaatacactccagttaaacctttataatactccctttcagtccatgcagtcaagtggctctgcacaccagatgataacaactttgcctcttggaatgacctgtcccattgacatggacaccgtacaccctagccaccacttatcgttcaagtacccattcagtagcacctcatacgccatttctatacccgagaaggaacagccccttaaaggcgagatcgaaagctacttaatggaattgcagggcggcgtgccatccagcagtcaggacagccaagcgtccagctccagcaagcttgggctggacccccagatcggtagcctggacgatggggcaggtgacctgtcgctctccaagagcagcatatcaatatcagaccccctgaatacacccgctttggattttagtcaactgtttaactttattccgctaaatgggccaccctacaatcctctgtccgttggctctctgggaatgtcctatagtcaggaggaggcgcattccagcgtttctcagcttccaccccagacccaagacttgcaggatcccgccaataccattggcctgggctcattgcattctctgtccgcagccttcacctcaagcctctcaacttccactactctgcctaggtttcatcaagcgtttcagtag

SEQ ID NO: 43120 - DNA, 1503 bp, Artificial Sequence
  derived and/or modified sequence
atggccaccgtgatccccggcgacctgagcgaggtgcgggacacccaaaaggtgcccagtggtaaaaggaaaagaggagagaccaaacctcggaagaactttccctgccagctctgcgataaagccttcaattccgtggagaagttgaaggttcactcatattcgcacacgggagaaagaccttacaagtgcattcagcaggactgcaccaaagccttcgtctccaaatataagcttcagcggcacatggccacccacagtccagagaagacacacaagtgcaactattgcgagaaaatgttccatagaaaagatcacctgaagaaccatttacacacgcacgaccccaataaggaaacattcaaatgtgaggagtgtggtaagaattacaacaccaagctgggattcaagcgacatttggcccttcacgccgccacatcaggagatttgacctgtaaggtctgtttacagacattcgagtcaaccggcgtgctgctggaacatctgaaatcacacgccggtaaatcttcaggaggtgtgaaggagaagaagcaccagtgtgagcactgtgatcgtagattctacacgcgaaaggatgtaagaaggcatatggtcgtacatactggccgcaaggatttcctgtgccagtattgtgcccagcgtttcgggcgcaaggaccatctgacaaggcacatgaaaaaaagtcacaatcaggagctgttgaaagtgaagaccgaacctgtcgacttcctcgacccgttcacatgtaacgtgtctgtaccaataaaagatgagctactgcccgtgatgtccctaccaagcagtgaactgttgtcgaagccattcactaacaccttgcagttgaacctctataatacccccttccaatctatgcagtcatcgggtagtgcgcaccagatgattactactttaccacttgggatgacatgcccgatcgacatggatacagtccatccctcccaccaccttagtttcaaatatcctttcagctcaaccagttacgccatatccattcctgagaaggaacagcctctgaagggggagatagagtcctacctcatggagttgcaaggaggagtgccatctagttctcaagactcgcaagcctcgagttcaagcaagcttggacttgaccctcaaataggtagcctcgacgacggggcgggcgatctgtctctttcaaagtcttccatctcaatttctgaccccctgaatacgccggcattagatttctcacaactgtttaactttattccgctcaacggacctccatacaaccccctctctgttggcagcttaggtatgtcctactctcaggaagaggcacacagttccgtgtcccagctaccgcctcagactcaagacctgcaggatccagctaacactatcggtctcggctctctgcactccctgtccgccgcttttaccagctccctttctacatcaaccacgctgcctagatttcatcaggcttttcagtag

SEQ ID NO: 43121 - DNA, 7322 bp, Artificial Sequence
  derived and/or modified sequence
ggcagcgcatacactacaatggctgctggaaagaggcgtaaggaaacaatttccaggcccgccgcgtccagcccgaaatatgagaaaaaaattattagaaattccgcgggcggtgtagaggcggcggacgggccggagggaggatgttaaagccccgcggttgcctcttggtgctgccttggccgtatttggcacccagaatgcttcattctgtgacggtctattaataaggttgccttgctagagtttggagcagggcctcagattggccaaaatgggaaggattggattccactctcttccacgaagagtcaatgggactggctaagatcaaagtctgaggctttttccatcagtaatcagtccctttttgctttcttttacgaccacatgaaacttgagaagccacctaaagctatatcatttagtggagttgggcagttcccaagtgtccaacaagaaggcctggtttaggctgcgatggccactgtcattcctggtgatttgtcagaagtaagagatacccagaaagtcccttcagggaaacgtaagcgtggtgaaaccaaaccaagaaaaaactttccttgccaactgtgtgacaaggcctttaacagtgttgagaaattaaaggttcactcctactctcacacaggagagaggccctacaagtgcatacaacaagactgcaccaaggcctttgtttctaagtacaaattacaaaggcacatggctactcattctcctgagaaaacccacaagtgtaattattgtgagaaaatgtttcaccggaaagatcatctgaagaatcacctccatacacacgaccctaacaaagagacgtttaagtgcgaagaatgtggcaagaactacaataccaagcttggatttaaacgtcacttggccttgcatgccgcaacaagtggtgacctcacctgtaaggtatgtttgcaaacttttgaaagcacgggagtgcttctggagcaccttaaatctcatgcaggcaagtcgtctggtggggttaaagaaaaaaagcaccagtgcgaacattgtgatcgccggttctacacccgaaaggatgtccggagacacatggtggtgcacactggaagaaaggacttcctctgtcagtattgtgcacagagatttgggcgaaaggatcacctgactcgacatatgaagaagagtcacaatcaagagcttctgaaggtcaaaacagaaccagtggatttccttgacccatttacctgcaatgtgtctgtgcctataaaagacgagctccttccggtgatgtccttaccttccagtgaactgttatcaaagccattcacaaacactttgcagttaaacctctacaacactccatttcagtccatgcagagctcgggatctgcccaccaaatgatcacaactttacctttgggaatgacatgcccaatagatatggacactgttcatccctctcaccacctttctttcaaatatccgttcagttctacctcatatgcaatttctattcctgaaaaagaacagccattaaagggggaaattgagagttacctgatggagttacaaggtggcgtgccctcttcatcccaagattctcaagcatcgtcatcatctaagctagggttggatcctcagattgggtccctagatgatggtgcaggagacctctccctatccaaaagctctatctccatcagtgaccccctaaacacaccagcattggatttttctcagttgtttaatttcatacctttaaatggtcctccctataatcctctatcagtggggagccttggaatgagctattcccaggaagaagcacattcttctgtttcccagctccccccacaaacacaggatcttcaggatcctgcaaacactatagggcttgggtctctgcactcactgtcagcagctttcaccagcagtttaagcacaagtaccaccctcccacgtttccatcaagcttttcagtaggattctgggacatggattcattacagaaatgtatgtgtagctgtgccctagatgaccatttttattttagtgcctactttaaaacagtataaaaatttctgcttttgtataatacaaattttcattaagccagtataaaatagaaactagcttttaaactgagctttggaaccatttgtgttcagttaagtttacctgggtattttgtcctgattcactgccaattgtcacattttaagacttttttttttccatataggaaagccattattagtagtaaacttttacaaatcccattttcaaattacttttagatcttaaaattttcatttttgtctaataacagtggctctaccttttgacatctggctcattaaaaaatttagcaatagaatgtaaattgtataaaaagtttgtgaataactcaagggtttaaattttcttactagcttctaaatggattaataatcaagtgcttcaaatgaattaagagtccagtttcggaagataataaatgtttgttagatacaccataatttcagatcagtatattctgaagactccctgttgtctggctaaaatatttgccatctttattatgagcctttaaggaaaacaaaccctaaacacaaagcatcagtatttatagcaaaaagagactctgttaggtgacatggcatttcgtgtcacttaatagttggccctaaattagtacacaggatattttgtcgtgtttcatccttcttaacatgctatcttttcatttaataatagtaatagtgtatggcattggggtcttcagagtcgatatataggtagatctctttagtcttttccacctttcacatccaaggggtgggtcaagtgcagccagcaatttattttcattgttggcccacggttagtccataatctagagccattgtggaactgcagccatgaggtgtgtttatcccacagtggattgactcagcctctgtgggtgacagacttctaagcaggaagatagacgtgaagcacatggttacatttgggaacttgtgtagggatcatggcccctgtagccagggttaaaaactggactttttagaagtaaagtaaaagcatatcgcttatatcatttcttgctgaatttgatatgtttttctttcccttaagaatcaaaagcagaaaacaaaaacaacagtcctactccgatgttatctttctgattcaatgtgaatccatctttccttgcaatattttggatggagaatttgaagttaaatgcattagaaaactacctgatgaactaccacaaagttttaagtgactagaaatatatacagtaaaatcccactttcatgcatctctgggaaatgataggagtattgcaaataagttgagtttgtagagggtaacaaagtaaagtaaaacaaacctatcttggttaacatgaaaataacaattgagaatatattatattcactgaataattataggcttttcctcacattagacaaccaacataatcttcttaaaggtctaattaatatatttttctaagggtcagttgggacattaacctaagaaacatatctattaagcacttgttaacaccttattttaggaccctttccgttggggatgggggcaagggtgggaggtttttagaagagtatatatctctttaaaaaaaaacagaaagaaaaatatttctgagcactcattagccctatatggaaacttctttcctttttgtagggccagttatcactgcagattgcaatgtttaccaagaatttctaaaaatgagtgcagattactgaatataatacattatttaaaatatttgggagtagtataatttgtggagaaatgtaaattgtaataatgtaaatgggggcttcaatatatatatataatacacacacacacacacatgcacacataccgcacttcatagaatcaaagttgctctctgaaggagctttggctcctgatattttatcatgctcctatatttttttaatccttggagcagtagtttttatacttatgtatttaaattttattatgaaaaattacatttattaaaaaagtgtgttccaaaggcattaaaattatatatgttaataaggaagtacatttttaaatttttcaaactgctcctagcttttgattaggagaatattttttctgaaagtaggcttttcgctctgcttcattactgcttcctttagtttctatgaaacagattgcttacctaaatctttagttgaatgattagtgttcaatattgctttaatcaccatataaaaggaaaaaaattggtgacagagcacaaatagaaaacctatttttaaatagaaatcacaaatagcaagtgtggaagcactactttattctgtttaaaatgtacttaagaagtcatcaaattagtgaactgagacattggccttagtaggctgtattcactgctaatttaaaaaagggagtaccaggatttattaagtaaagcattttggaaatggggaatagcgccatatatgtatgtatgtgtatgtgtgtgtgtgtgtgtgtatatatacacacacacacacatacttaaatcttgccctgcatgaaattcaaatacatggaggcacatcttcagggcaccagtgttaaaattttggagtcttaattttcatgtgtacacctctttgcctgttcccacccccagacttgaaataacacttcagagtaagagggaattcagctaatttgtttttaaaattgactgtagtggtcactaaaccctttttgagagaatttctattaaagatgaggcagactcgcttatttgaattgcacaatgttctaacaaggatgtaacacagaattggcttttttttccctagaaaaagattgtttgtttctatgtcaactagatatgattaaaaataagtattgccaatgctgttttcattctctagtggccagaatcattatccttgaaatttctggtagtgccttagcttggttaaaaaaaaaaaaaaaaaaaaaaaaaagggattaacattaaataaaagtagtttagaatttgggcctcagacaagatattgaacctcattcagtttcacttccacatgtatgtacaagttaggtcaccaaacacggaagtgtgagtgtggaaggatcttggcactgtaagcaatgctatccattgatgtatacaagtacctttatagttatcgatcactgttaaaactttcattttaaaatcctattaccaagttcagttttttaaaacttcaattgtcctggctgattatgcatcactctgtgtgcaacttttttatttcatttagtgtttctttcaagctgtgtatttttgcctatttgttgcttgtgctttatttttcttagtcatttgtggaatatagtgatatattgtgttaatttggacagtagcggtttttaaaaaccatatactgactgaaacatgagccagagccgattgctttattaagctaataatgaatgttaaagagtacatattttcaggatcgttcatctagtgagcaatacacatattataggccaatatttttttaaaaaatagagcttggtcaacctctatactacacatattacaagatatagcactttcaaaatgaatctaaacctttacagaaactttcttataggttatgccttttattttaagacttattataattcaagtgccattagatgatatatatgtaggcctttgatatataatgctttgtgtacaaaaatggtagatggtattttaaacaggtacatttttacagtgttttcttatcaatttgctatattgcacagaatcagtgtgtgtcttttcataaggttttacaatggtttatttttttacaaggtttacgtgtctcaaagcacactgtcttcccagtacgtaagttaaaaaataccagttcacccaagttgcttctagcctactgagatccatgtgacattggaggagatcttttaaatgtttagtattcgtcattagcaatggctggctgttagttctggtaaatgtgtgcctaagttgaatttgtcttgtttttctcacactgtgtcagcagccatgtctacaacacagataagtctgttgtgatcacatagatctacataagttgtgcagttttgtgctaaaaacccatagggagctcctttgggatcatagaaaagaagatcatgcaaccagcattggtgaaggcacactcagattgcacttagggcctttctatgatgttgtcaaccctctgaggatggaaggcagtgtcttttgatgttatctagcctagaaatgacacagaactattgctaatgtataaaacacttcattatataagcttcagtggtacagatgaaccagaatgaatgtttatcttctcagaaacactccttcaatattatattggatcatgctgctaatgtaacttgggctacaactcttcatggtgctacaaacttctctgtctcattcagtcgtatttttttatccatagaaaaaggactacattaggtgtaaaagtgtacaatatatttttatactgtgacttaatttgtcattaacaaacttttacaccaccacaatgtattcatgtgcacttgcaaaaggagatctcggacatgcaaatgttaccagaacaaacccagcttttgtccacaaggtgactgtaactcagaatggaaagtgggctttataatagggtgtggagtgaagaacatgctgtatgttactaacagccctttgaatttaacaaaaactgggaatccattaggaaacggattgcatcatacctgaacataagctggactgctgaaattgtatttttagctaatgaaaaagtgtttggactagtactctaaaaatgttctaatgataaagttttgagtcaaaatagaaaagaaaaaaatctgcattccaggccgaattttgtatatttttattgcatttaaaattgctattctgtaatattgggaaatcaagtggcttatcatgtatatcgtgtacttaaaatgtattcacaaactactgttgtatttgtataaaatatagacaaagatcatattttttgtgtgtgtataagctctgtaaaatagcaatcacattatgaagctgcagtgatactacattttaaacattcacatccaaagaagcagactatttattgtccatataccagatttaaaatattaatttgctgctaattaaataatagtactgcagcttcttgtggcctacagtgttatgtttgctgtaagaataagatatgtgaattccacaaaatatatgaataaaattatagaatggctttagataa

SEQ ID NO: 43122 - DNA, 1684 bp, Artificial Sequence
  derived and/or modified sequence
agctgcaagttgggctgcaggggcagcgcatacactacaatggctgctggaaagaggcgtaaggaaacaatttccaggcccgccgcgtccagcccgaaatatgagaaaaaaattattagaaattccgcgggcggtgtagaggcggcggacgggccggagggaggatgttaaagccccgcgattggccaaaatgggaaggattggattccactctcttccacgaagagtcaatgggactggctaagatcaaagtctgaggctttttccatcagtaatcaggcacatggctactcattctcctgagaaaacccacaagtgtaattattgtgagaaaatgtttcaccggaaagatcatctgaagaatcacctccatacacacgaccctaacaaagagacgtttaagtgcgaagaatgtggcaagaactacaataccaagcttggatttaaacgtcacttggccttgcatgccgcaacaagtggtgacctcacctgtaaggtatgtttgcaaacttttgaaagcacgggagtgcttctggagcaccttaaatctcatgcaggcaagtcgtctggtggggttaaagaaaaaaagcaccagtgcgaacattgtgatcgccggttctacacccgaaaggatgtccggagacacatggtggtgcacactggaagaaaggacttcctctgtcagtattgtgcacagagatttgggcgaaaggatcacctgactcgacatatgaagaagagtcacaatcaagagcttctgaaggtcaaaacagaaccagtggatttccttgacccatttacctgcaatgtgtctgtgcctataaaagacgagctccttccggtgatgtccttaccttccagtgaactgttatcaaagccattcacaaacactttgcagttaaacctctacaacactccatttcagtccatgcagagctcgggatctgcccaccaaatgatcacaactttacctttgggaatgacatgcccaatagatatggacactgttcatccctctcaccacctttctttcaaatatccgttcagttctacctcatatgcaatttctattcctgaaaaagaacagccattaaagggggaaattgagagttacctgatggagttacaaggtggcgtgccctcttcatcccaagattctcaagcatcgtcatcatctaagctagggttggatcctcagattgggtccctagatgatggtgcaggagacctctccctatccaaaagctctatctccatcagtgaccccctaaacacaccagcattggatttttctcagttgtttaatttcatacctttaaatggtcctccctataatcctctatcagtggggagccttggaatgagctattcccaggaagaagcacattcttctgtttcccagctccccccacaaacacaggatcttcaggatcctgcaaacactatagggcttgggtctctgcactcactgtcagcagctttcaccagcagtttaagcacaagtaccaccctcccacgtttccatcaagcttttcagtaggattctgggacatggattcattacagaaatgtatgtgtagctgtgccctagatgaccatttttattttagtgcctactttaaaacagtataaaaatttctgcttttgtataatacaaattttcattaagccagtataaaataga

SEQ ID NO: 43123 - DNA, 1899 bp, Artificial Sequence
  derived and/or modified sequence
agctgcaagttgggctgcaggggcagcgcatacactacaatggctgctggaaagaggcgtaaggaaacaatttccaggcccgccgcgtccagcccgaaatatgagaaaaaaattattagaaattccgcgggcggtgtagaggcggcggacgggccggagggaggatgttaaagccccgcgattggccaaaatgggaaggattggattccactctcttccacgaagagtcaatgggactggctaagatcaaagtctgaggctttttccatcagtaatcagtccctttttgctttcttttacgaccacatgaaacttgagaagccacctaaagctatatcatttagtggagttgggcagttcccaagtgtccaacaagaaggcctggtttaggctgcgatggccactgtcattcctggtgatttgtcagaagtaagagatacccagaaagtcccttcagggaaacgtaagcgtggtgaaaccaaaccaagaaaaaactttccttgccaactgtgtgacaaggcctttaacagtgttgagaaattaaaggttcactcctactctcacacaggagagaggccctacaagtgcatacaacaagactgcaccaaggcctttgtttctaagtacaaattacaaaggcacatggctactcattctcctgagaaaacccacaagtgtaattattgtgagaaaatgtttcaccggaaagatcatctgaagaatcacctccatacacacgaccctaacaaagagacgtttaagtgcgaagaatgtggcaagaactacaataccaagcttggatttaaacgtcacttggccttgcatgccgcaacaagtggtgacctcacctgtaaggtatgtttgcaaacttttgaaagcacgggagtgcttctggagcaccttaaatctcatgcaggcaagtcgtctggtggggttaaagaaaaaaagcaccagtgcgaacattgtgatcgccggttctacacccgaaaggatgtccggagacacatggtggtgcacactggaagaaaggacttcctctgtcagtattgtgcacagagatttgggcgaaaggatcacctgactcgacatatgaagaagagtcacaatcaagagcttctgaaggtcaaaacagaaccagtggatttccttgacccatttacctgcaatgtgtctgtgcctataaaagacgagctccttccggtgatgtccttaccttccagtgaactgttatcaaagccattcacaaacactttgcagttaaacctctacaacactccatttcagtccatgcagagctcgggatctgcccaccaaatgatcacaactttacctttgggaatgacatgcccaatagatatggacactgttcatccctctcaccacctttctttcaaatatccgttcagttctacctcatatgcaatttctattcctgaaaaagaacagccattaaagggggaaattgagagttacctgatggagttacaaggtggcgtgccctcttcatcccaagattctcaagcatcgtcatcatctaagctagggttggatcctcagattgggtccctagatgatggtgcaggagacctctccctatccaaaagctctatctccatcagtgaccccctaaacacaccagcattggatttttctcagttgtttaatttcatacctttaaatggtcctccctataatcctctatcagtggggagccttggaatgagctattcccaggaagaagcacattcttctgtttcccagctccccccacaaacacaggatcttcaggatcctgcaaacactatagggcttgggtctctgcactcactgtcagcagctttcaccagcagtttaagcacaagtaccaccctcccacgtttccatcaagcttttcagtag

SEQ ID NO: 43124 - DNA, 1503 bp, Artificial Sequence
  derived and/or modified sequence
atggctacagtgataccgggagatttatctgaggtgcgtgatacacagaaagtcccaagcggcaagaggaaacgaggcgagaccaagccaaggaaaaattttccttgtcagctgtgcgacaaggcatttaacagtgttgagaagctgaaggtgcattcatactctcataccggtgaaagaccctacaaatgcattcagcaggactgtactaaggcattcgtgagcaagtataaacttcagaggcacatggcaactcactctcctgagaaaacccataaatgtaattactgcgagaagatgtttcatcgcaaggaccatcttaagaaccatttgcacactcatgacccaaataaggaaactttcaaatgtgaggaatgtggaaagaattataacactaaactcgggtttaaacgtcacttggccctgcatgccgctacttcaggtgacctcacttgcaaggtgtgtctgcagacatttgagtccaccggagtgctgctggaacatcttaaaagtcacgcgggaaagtccagtggtggcgtgaaggagaagaaacatcaatgcgagcactgcgatcgtcgattttacacccgcaaggacgtccgcagacacatggtcgttcatacaggtaggaaggatttcctgtgtcagtactgtgcccagaggttcggaaggaaagaccatctcaccagacatatgaaaaagtcccacaaccaagaactgctgaaagttaaaaccgaacctgtggattttctcgatccattcacgtgtaacgttagcgtacccatcaaggatgaactattgcctgtgatgtcactcccatcttccgagctcctgtctaagcccttcacaaatactcttcagctaaatttgtataacacgccattccagagcatgcagtcatccgggtccgcacatcaaatgataacaacattacctctaggcatgacttgccctatcgatatggacacagtgcaccctagtcaccacctgagctttaagtacccgttctcgtctacaagttacgcaatcagcatcccggaaaaggaacagccactgaaaggggaaattgaatcatacctgatggagttgcaggggggtgtcccctcttcttctcaagatagtcaggcctcctccagttctaagctgggcttagatccacaaatcggaagcttggatgacggtgcaggcgatctgtctctatccaaatctagcatatccatctcggaccccctcaacacgccagctttggacttctcacagttgttcaattttattcccttgaatggtcccccatacaaccccttgagcgttgggtcattgggaatgtcatacagccaggaggaagcccacagctctgtgtcccagttaccaccccagacacaggatttacaggacccagcgaataccatcggccttgggagtttacactccctgtccgccgctttcacttctagcctgagtacatcaaccacattacccagattccaccaggcctttcagtag

SEQ ID NO: 43125 - DNA, 1503 bp, Artificial Sequence
  derived and/or modified sequence
atggcaacagtgattcccggagacctgtccgaagtaagggacacccaaaaagtgccaagcggaaaaaggaagcggggagagacgaaacctcgaaaaaactttccctgccagctgtgcgacaaagcctttaattccgttgaaaagctcaaggtgcactcctatagtcacacaggagaaaggccatacaaatgcatccagcaggattgcaccaaggcctttgtgagcaaatataagctccagaggcatatggcaacccacagcccagagaagacccataagtgtaattattgcgagaaaatgttccatcgaaaggaccatctgaaaaatcatctgcatacacacgatcccaataaagagacattcaaatgtgaggagtgtggcaagaactacaatactaagctgggttttaaaaggcacttagccctgcacgcagccacctctggggacctgacctgcaaggtgtgtctgcaaaccttcgagagtacaggagtactcctcgagcacctgaagtcccatgctgggaaatcctcagggggtgtcaaagaaaagaagcaccagtgcgaacactgtgataggcggttctacacccgtaaggatgtcaggcgacacatggtggtgcatacaggccgaaaagattttttatgtcagtactgcgcacaaaggttcggaagaaaggatcacctcacaaggcatatgaaaaagagtcacaatcaggaactgttaaaggtgaagacagagcctgttgacttcctggacccctttacttgtaacgtctccgtccccattaaggatgaattgcttcccgtgatgtcgcttccatcatcagagcttttaagtaaaccattcactaatactctccagctaaacttgtataacactcccttccagagcatgcagtcttccggttctgcccatcagatgatcaccactttgcctctaggtatgacttgtccgatcgatatggacaccgtgcacccaagccatcacctgagctttaaataccccttctcctcaaccagctacgcgatatcaattcccgaaaaagaacagccccttaagggtgaaattgaatcctatctgatggagctgcagggcggagtaccaagtagcagtcaggactctcaagcctcttcctcaagcaaactcggcctcgaccctcaaattggttcacttgacgacggagctggcgacctgtccctgagtaagtcttcaatctccatctctgatccgctgaatacccccgcactggacttcagtcagctgtttaattttattccgctgaatggtccgccatataatcccctgtccgttgggtccctgggtatgtcctactcacaggaggaggctcacagcagcgtatcacaattgccaccccagacacaagacctgcaggaccccgctaatacgattgggcttggcagtctccactcactgagcgcagccttcacttcatctctcagtacctccactactctccccaggtttcaccaggctttccagtag

SEQ ID NO: 43126 - DNA, 1503 bp, Artificial Sequence
  derived and/or modified sequence
atggccaccgtgatccccggcgacctgagcgaggtgagagacacccagaaggtgcccagcggcaagagaaagagaggcgagaccaagcccagaaagaacttcccctgccagctgtgcgacaaggccttcaacagcgtggagaagctgaaggtgcacagctacagccacaccggcgagagaccctacaagtgcatccagcaggactgcaccaaggccttcgtgagcaagtacaagctgcagagacacatggccacccacagccccgagaagacccacaagtgcaactactgcgagaagatgttccacagaaaggaccacctgaagaaccacctgcacacccacgaccccaacaaggagaccttcaagtgcgaggagtgcggcaagaactacaacaccaagctgggcttcaagagacacctggccctgcacgccgccaccagcggcgacctgacctgcaaggtgtgcctgcagaccttcgagagcaccggcgtgctgctggagcacctgaagagccacgccggcaagagcagcggcggcgtgaaggagaagaagcaccagtgcgagcactgcgacagaagattctacaccagaaaggacgtgagaagacacatggtggtgcacaccggcagaaaggacttcctgtgccagtactgcgcccagagattcggcagaaaggaccacctgaccagacacatgaagaagagccacaaccaggagctgctgaaggtgaagaccgagcccgtggacttcctggaccccttcacctgcaacgtgagcgtgcccatcaaggacgagctgctgcccgtgatgagcctgcccagcagcgagctgctgagcaagcccttcaccaacaccctgcagctgaacctgtacaacacccccttccagagcatgcagagcagcggcagcgcccaccagatgatcaccaccctgcccctgggcatgacctgccccatcgacatggacaccgtgcaccccagccaccacctgagcttcaagtaccccttcagcagcaccagctacgccatcagcatccccgagaaggagcagcccctgaagggcgagatcgagagctacctgatggagctgcagggcggcgtgcccagcagcagccaggacagccaggccagcagcagcagcaagctgggcctggacccccagatcggcagcctggacgacggcgccggcgacctgagcctgagcaagagcagcatcagcatcagcgaccccctgaacacccccgccctggacttcagccagctgttcaacttcatccccctgaacggccccccctacaaccccctgagcgtgggcagcctgggcatgagctacagccaggaggaggcccacagcagcgtgagccagctgcccccccagacccaggacctgcaggaccccgccaacaccatcggcctgggcagcctgcacagcctgagcgccgccttcaccagcagcctgagcaccagcaccaccctgcccagattccaccaggccttccagtag

SEQ ID NO: 43127 - protein, 418 aa, Artificial Sequence
  derived and/or modified sequence
MATHSPEKTHKCNYCEKMFHRKDHLKNHLHTHDPNKETFKCEECGKNYNTKLGFKRHLALHAATSGDLTCKVCLQTFESTGVLLEHLKSHAGKSSGGVKEKKHQCEHCDRRFYTRKDVRRHMVVHTGRKDFLCQYCAQRFGRKDHLTRHMKKSHNQELLKVKTEPVDFLDPFTCNVSVPIKDELLPVMSLPSSELLSKPFTNTLQLNLYNTPFQSMQSSGSAHQMITTLPLGMTCPIDMDTVHPSHHLSFKYPFSSTSYAISIPEKEQPLKGEIESYLMELQGGVPSSSQDSQASSSSKLGLDPQIGSLDDGAGDLSLSKSSISISDPLNTPALDFSQLFNFIPLNGPPYNPLSVGSLGMSYSQEEAHSSVSQLPPQTQDLQDPANTIGLGSLHSLSAAFTSSLSTSTTLPRFHQAFQ

SEQ ID NO: 43128 - DNA, 1257 bp, Artificial Sequence
  derived and/or modified sequence
atggctactcattctcctgagaagacccataagtgtaactattgcgagaaaatgttccaccgaaaagatcacctcaaaaaccacctgcatactcacgacccgaacaaggagactttcaaatgcgaagaatgtggaaagaattacaacacgaagctgggttttaaacggcacttggctctccacgctgccaccagtggggacctcacctgtaaagtgtgcctgcagacctttgagtcaacaggcgtcctactcgaacatctcaagagccacgcaggtaagagctctggcggagtgaaggagaaaaagcatcagtgcgaacattgcgaccggcgcttctatactagaaaagacgttaggcgtcacatggtcgtccatactgggcgaaaggacttcctctgccagtactgcgcccagagatttgggaggaaagatcatctgactcgacacatgaagaagagccacaatcaggagctgcttaaggtaaagaccgagccagtggatttcctagacccattcacctgcaatgtctccgtcccgattaaggatgaactgctacctgtcatgagcctaccttcttccgaacttctttcaaagcccttcacaaacacactccagcttaatttgtacaacacgcccttccaaagcatgcaaagttcagggtctgcccaccagatgattaccacactgccgttagggatgacctgtcctattgacatggacacagttcacccatcccatcatcttagcttcaagtacccgttctcaagcacatcgtacgcaatctccattcccgaaaaagagcaacccctgaagggcgagatcgaatcatacttgatggagctgcaggggggggtgccctcaagctcccaagactcgcaggcctctagctcaagcaaactaggcctagatcctcagatagggtctttggacgacggggcgggggacctttcactgtccaagagtagtataagtatttccgatccgctgaacacgccagcgctggatttcagccagcttttcaatttcatccctctcaacgggcccccttataacccactcagcgtggggagcctcggaatgtcctatagccaggaggaggcacacagctctgtatcccagctccccccccagacgcaggacctccaagaccccgcaaatacaattgggctgggctctctgcactcactctctgctgcctttacttcgtccctgtccacatccacaacacttccaagattccatcaagcatttcagtag

SEQ ID NO: 43129 - DNA, 1257 bp, Artificial Sequence
  derived and/or modified sequence
atggccacccacagccctgagaagacccacaagtgcaactactgtgagaagatgttccacaggaaggaccacctgaagaaccacctgcacacccatgaccccaacaaggagaccttcaagtgtgaagaatgtgggaagaactacaacaccaagctgggcttcaagaggcacctggccctgcacgccgccaccagcggggacctgacctgcaaggtgtgcctgcagacctttgagagcactggagtgctgctggagcacctgaagagccatgctgggaagagcagtggaggagtgaaggagaagaagcaccagtgtgagcactgtgaccggcgcttctacaccaggaaggatgtgagaagacacatggtggtgcacacaggcaggaaggacttcctgtgccagtactgtgcccagcgcttcggcaggaaggaccacctgaccaggcacatgaagaagagccacaaccaggagctgctgaaggtgaagacagagcctgtggacttcctggaccccttcacctgcaatgtgtctgtgcccatcaaggatgagctgctgcctgtgatgagcctgcccagcagcgagctgctgagcaagcccttcaccaacaccctgcagctgaacctgtacaacacccccttccagagcatgcagagcagcggcagcgcccaccagatgatcaccaccctgcccctgggcatgacctgccccatcgacatggacacagtgcaccccagccaccacctgtccttcaagtaccccttcagcagcaccagctatgccatcagcatccctgagaaggagcagcccctgaagggggagattgagagctacctgatggagctgcagggcggcgtgcccagcagcagccaggacagccaggccagcagcagcagcaagctgggcctggacccccagatcggcagcctggatgatggagctggggacctgagcctgagcaagagcagcatcagcatcagtgaccccctgaacaccccagccctggacttcagccagctgttcaacttcatccccctgaatggccccccctacaaccccctgtctgtgggcagcctgggcatgagctacagccaggaggaggcccacagctctgtgtcccagctgcccccccagacccaggacctgcaggaccctgccaacaccatcggcctgggcagcctgcacagcctgtctgctgccttcaccagcagcctgagcaccagcaccaccctgccccgcttccaccaggccttccagtag

SEQ ID NO: 43130 - DNA, 1257 bp, Artificial Sequence
  derived and/or modified sequence
atggccacccacagccccgagaagacccacaagtgcaactactgcgagaagatgttccacaggaaggaccacctgaagaaccatctgcatacccatgaccctaataaggagacgtttaaatgcgaagaatgcggcaagaattacaataccaagctaggtttcaaaagacacttggcattgcatgccgcaacaagtggcgaccttacttgtaaggtctgtttgcagacatttgagtctaccggggtgctgttggagcacctgaaatcccacgctggcaagagcagcggaggcgtgaaagaaaagaagcatcagtgcgagcactgcgatcggcgcttctacactcggaaagacgtgcgcagacacatggtggtccacaccggcaggaaagacttcctgtgtcaatattgcgctcagcggtttggaaggaaggaccacctgacccgtcacatgaaaaaaagccataatcaggaactattgaaagttaagaccgagcctgtcgacttcttggacccctttacgtgcaacgtgtcggttcctatcaaagacgaacttttgccagttatgtcactgcccagttctgaattgttaagcaaacccttcactaacacgctccagctgaatctctacaacactcctttccaatcgatgcagagctctggctcagcccaccagatgatcacaaccctgcccctcggcatgacatgtcccatagacatggacacagtgcatccctcccatcacctgagcttcaaatacccattctccagcacctcatacgccatcagcatccccgagaaggaacagccacttaagggcgagattgaaagctacctgatggagctgcaaggtggagtccccagtagttcccaagacagccaagcctcatccagctcaaaactaggtctggacccgcaaatcggtagcctagatgacggtgcgggcgacctgtcactgtcaaagtcttcaatttcgatcagtgatccactgaacacaccagctctagatttctcccagctgttcaactttattccactgaatggaccgccatataacccgcttagcgtcggaagtctgggcatgtcatattctcaggaagaggcccacagctcagtgtctcagcttcccccacagacacaggaccttcaggaccctgctaataccatagggctgggcagcctgcatagtctctcagccgccttcacatcaagcctgagtacatccaccaccttaccccgattccaccaggcattccaatag

SEQ ID NO: 43131 - DNA, 1257 bp, Artificial Sequence
  derived and/or modified sequence
atggccacacattccccagagaaaacgcacaagtgcaattattgtgagaagatgttccaccgcaaggaccatctgaagaatcacttgcacactcacgaccccaacaaagagacatttaagtgtgaagaatgcggtaagaattacaacacaaagctgggcttcaaaaggcaccttgctctccacgccgctactagcggagaccttacctgcaaagtgtgcctccagaccttcgagtccacaggagtgctgttagaacatttgaagtcccacgctggtaagtctagcggcggagtgaaagaaaaaaagcaccagtgtgagcattgcgacagacgcttttatacacgcaaagacgtaaggaggcatatggtggtgcacacaggcaggaaagattttttgtgccagtactgtgcccagcgcttcggaaggaaggaccatctgacacgccacatgaagaagtcccacaaccaggagttgctgaaggtcaaaacagaacccgttgactttttagacccctttacctgtaatgtgagtgtccccatcaaggatgaactgctgcctgtgatgagcctgcccagttccgaattgctgtcgaagcccttcaccaatacactgcaattgaacctgtataataccccttttcagagtatgcagagttcaggctcagctcaccaaatgataacaacactacccttagggatgacatgcccaatcgacatggacaccgtgcacccctctcaccatctcagctttaaatacccattctcctctacaagttacgccatttccattccagagaaggagcagcctttaaagggggagattgaatcttacctgatggagcttcagggaggagtcccttcgtcctcacaggactcacaggcctcttcgtcatcaaagctcgggctggatccgcaaataggttcgctggacgacggcgcaggggacctgtctttgtctaaatctagcatttcaatctccgatccccttaatacgccggcactcgacttttctcaactcttcaattttatcccgctgaacgggccaccctacaatcccctttccgtcggatcgttggggatgagctactcccaagaagaggcacatagttctgtgtcacagctgcctccacagactcaggacctacaggacccagcgaacactatagggctggggagcctccactccttgtctgccgctttcacgagctctttgtctacttccacaaccttgcccaggtttcaccaggccttccaatag

SEQ ID NO: 43132 - DNA, 1257 bp, Artificial Sequence
  derived and/or modified sequence
atggccacccacagccccgagaagacccacaagtgcaactactgcgagaagatgttccacagaaaggaccacctgaagaaccacctgcacacccacgaccccaacaaggagaccttcaagtgcgaggagtgcggcaagaactacaacaccaagctgggcttcaagagacacctggccctgcacgccgccaccagcggcgacctgacctgcaaggtgtgcctgcagaccttcgagagcaccggcgtgctgctggagcacctgaagagccacgccggcaagagcagcggcggcgtgaaggagaagaagcaccagtgcgagcactgcgacagaagattctacaccagaaaggacgtgagaagacacatggtggtgcacaccggcagaaaggacttcctgtgccagtactgcgcccagagattcggcagaaaggaccacctgaccagacacatgaagaagagccacaaccaggagctgctgaaggtgaagaccgagcccgtggacttcctggaccccttcacctgcaacgtgagcgtgcccatcaaggacgagctgctgcccgtgatgagcctgcccagcagcgagctgctgagcaagcccttcaccaacaccctgcagctgaacctgtacaacacccccttccagagcatgcagagcagcggcagcgcccaccagatgatcaccaccctgcccctgggcatgacctgccccatcgacatggacaccgtgcaccccagccaccacctgagcttcaagtaccccttcagcagcaccagctacgccatcagcatccccgagaaggagcagcccctgaagggcgagatcgagagctacctgatggagctgcagggcggcgtgcccagcagcagccaggacagccaggccagcagcagcagcaagctgggcctggacccccagatcggcagcctggacgacggcgccggcgacctgagcctgagcaagagcagcatcagcatcagcgaccccctgaacacccccgccctggacttcagccagctgttcaacttcatccccctgaacggccccccctacaaccccctgagcgtgggcagcctgggcatgagctacagccaggaggaggcccacagcagcgtgagccagctgcccccccagacccaggacctgcaggaccccgccaacaccatcggcctgggcagcctgcacagcctgagcgccgccttcaccagcagcctgagcaccagcaccaccctgcccagattccaccaggccttccagtag

SEQ ID NO: 43133 - protein, 380 aa, Artificial Sequence
  derived and/or modified sequence
MAVTEASLLRQCPLLLPQNRSKTVYEGFISAQGRDFHLRIVLPEDLQLKNARLLCSWQLRTILSGYHRIVQQRMQHSPDLMSFMMELKMLLEVALKNRQELYALPPPPQFYSSLIEEIGTLGWDKLVYADTCFSTIKLKAEDASGREHLITLKLKAKYPAESPDYFVDFPVPFCASWTPQVNSPQSSLISIYSQFLAAIESLKAFWDVMDEIDEKTWVLEPEKPPRSATARRIALGNNVSINIEVDPRHPTMLPECFFLGADHVVKPLGIKLSRNIHLWDPENSVLQNLKDVLEIDFPARAILEKSDFTMDCGICYAYQLDGTIPDQVCDNSQCGQPFHQICLYEWLRGLLTSRQSFNIIFGECPYCSKPITLKMSGRKH

SEQ ID NO: 43134 - DNA, 1698 bp, Artificial Sequence
  derived and/or modified sequence
gtctagagcttttctgtgtttctccggacttcgagccatggcggtgacggaagcgagcctgttgcgccagtgccccctgcttctgccccagaaccggtcgaaaaccgtgtatgagggattcatctcggctcagggaagagacttccaccttaggatagtgttgcctgaagatttacaactgaagaatgcaagattattatgtagttggcagctgagaacaatacttagtggataccatcgaatagtacaacagagaatgcagcactctcctgatctaatgagctttatgatggagttgaagatgcttttggaagttgccttaaagaatagacaagagctgtatgcactacctcctcctccccagttctactcaagccttattgaagagataggaactcttggttgggataaacttgtgtatgcggatacctgcttcagtaccatcaagttaaaagcagaagatgcttctggtagagagcatttaatcactctcaagttgaaggcaaagtatcctgcagaatcaccagattattttgtggattttcctgttccattttgtgcctcctggacacctcaggtaaattctcctcagagctccttaataagcatttatagtcagtttttggcagcaatagaatcactaaaggcattctgggatgttatggatgaaatcgatgagaagacctgggtacttgagccagaaaaacctccacggagtgcaacagcacgcagaattgcattaggtaataatgtttccataaatatagaggtagaccccaggcatcctactatgcttcctgagtgcttctttcttggagctgaccatgtggtaaaacccctgggaattaagctgagcaggaacatacatttgtgggatccagaaaatagtgtgttacaaaatttgaaagatgttttagaaattgattttccagctcgtgctatcctggaaaaatctgattttactatggattgtggaatttgttatgcttatcaacttgacggtaccattcctgatcaagtgtgtgataattctcagtgtggacaacctttccatcaaatatgcttatatgagtggctgagaggactactaactagtagacagagttttaacatcatatttggtgaatgtccatattgtagtaagccaattaccttaaaaatgtctggaaggaaacactgaaataagaatacaacatttcggtgaagagctggaaacttaaaaaattatcaaaaggaattttggtatcatcttcagagaaaaaataaagcaagaaatactaacatcaaaaggacaggtatgatgatgcgataataataaacatctgcgtttgtctcttcactaagagtaaactgggaaattgtaggccaaagtccagttgaactttctaagtctgtgatccccgtgctgactgtggaagtgtatttataccaagatggagatcttgacttcttgaatatatctggactggtaaaatcttgatgaggctcataaaatgagtttgggaattgtgtatagctgattttttgtgggaaactgtttacttcattcaaaggttcttgagactcttgatatttctgtcttctccttgtgctttcctatggaaaaaatacatatatagtttagtttgttagacgtgagttatccaagtatttattttgtgtagtgtgtaagaatgctaaataaaatgttatacaaga

SEQ ID NO: 43135 - DNA, 1143 bp, Artificial Sequence
  derived and/or modified sequence
atggccgtcactgaagccagtcttttgcggcagtgcccactgctcctgcctcagaaccgctccaaaactgtgtacgagggctttatctccgcgcagggtagggatttccatttgcgcattgtgctcccggaggatctgcaactgaagaacgcaaggctgttgtgctcctggcagctgcgtacaattttaagcgggtaccatagaatcgtgcaacaacggatgcagcacagtcctgaccttatgtccttcatgatggagttgaagatgttgctggaggtggcactgaaaaatcggcaggagctgtacgctctccctcccccaccgcagttctactcgtcactcattgaagaaataggcaccctgggttgggataaattggtctatgcagacacatgttttagtacgatcaagctgaaagctgaagacgctagtggtcgcgaacatctcataacactcaagctgaaggccaaatacccggcggagagccccgactacttcgtcgatttcccagtgccgttttgcgcctcttggacaccacaagtcaacagtccgcagtcaagtttaatctccatctatagccaattccttgctgctatcgagtccctgaaggctttttgggacgtgatggacgaaatcgacgaaaagacatgggtgctggagcctgagaagcccccccggagtgccaccgcacgtcgtattgccctggggaataacgtgtccattaacatcgaagtggatccgcgccacccgacaatgctgccagagtgtttttttctaggggcggaccatgtggtcaaacctctcgggatcaaactgagcaggaatatccatctctgggacccagaaaacagtgtgttgcagaatctgaaggatgtgttggagattgactttcccgcacgggccatattggaaaaaagcgacttcactatggactgcgggatttgctatgcatatcagcttgatggcacaattcccgatcaggtgtgtgataacagccagtgtgggcagccattccaccagatctgtctgtacgagtggctgcgaggcctcctcacaagcaggcagagcttcaacattatctttggggagtgcccttattgttcaaagccaattacccttaagatgtccgggcgaaagcactag

SEQ ID NO: 43136 - DNA, 1143 bp, Artificial Sequence
  derived and/or modified sequence
atggctgtgacagaggccagcctgctgcggcagtgccccctgctgctgccccagaacagaagcaagacagtgtatgagggcttcatcagcgcccagggccgggacttccacctgcgcatcgtgctgcctgaggacctgcagctgaagaatgcccggctgctgtgctcctggcagctgcggaccatcctgagcggctaccacagaattgtgcagcagaggatgcagcacagcccagacctgatgtccttcatgatggagctgaagatgctgctggaggtggccctgaagaaccggcaggagctgtatgccctgcccccaccaccccagttctacagcagcctgattgaggagatcggcaccctgggctgggacaagctggtgtatgctgacacctgcttcagcaccatcaagctgaaggcagaagatgccagcggccgggagcacctgatcaccctgaagctgaaggccaagtacccagctgagagcccagactactttgtggacttccctgtgcccttctgtgcctcctggaccccccaggtgaacagcccccagagcagcctcatcagcatctacagccagttcctggccgccatcgagagcctgaaggccttctgggatgtgatggatgaaattgatgagaagacctgggtgctggagcctgagaagccacccaggtctgccacagccaggagaattgccctgggcaacaacgtgtccatcaacatcgaggtggaccccaggcaccccaccatgctgcctgagtgcttcttcctgggcgctgaccacgtggtgaagcccctgggcatcaagctgagcaggaacatccacctgtgggaccctgagaacagcgtgctgcagaacctgaaggatgtgctggagattgacttccctgcccgggccatcctggagaagagtgacttcaccatggactgtggcatctgctacgcctaccagctggatggcaccatcccagaccaggtgtgtgacaacagccagtgtggccagcccttccaccagatctgcctgtatgagtggctgcggggcctgctgaccagccggcagagcttcaacatcatctttggagaatgtccctactgcagcaagcccatcaccctgaagatgagcggcaggaagcactag

SEQ ID NO: 43137 - DNA, 1143 bp, Artificial Sequence
  derived and/or modified sequence
atggccgtgaccgaggccagcctgctgcggcagtgccccctgctgcttccccaaaaccgctccaaaactgtctatgaggggttcatatccgcgcaggggcgcgacttccacctgcggatcgtgcttcccgaggatctgcaactaaagaacgcccggctgctgtgttcttggcagctgagaacaattctttccggatatcatcggatagtccaacagagaatgcagcacagccccgacctaatgtcgttcatgatggaactaaagatgctactggaagttgccctcaagaataggcaagagctgtacgccctgcctccccctcctcagttctactcatcactgattgaggagattggcactctggggtgggataaactggtctatgccgatacgtgtttctcaaccatcaagcttaaggccgaggacgccagcgggcgggagcatctgattacgttaaagctgaaagcaaaatatcctgccgaatcacccgactacttcgtggactttcccgtgcccttttgtgcctcctggacccctcaagtcaacagcccacagtccagcctcatcagcatctattcacagttcctggccgccattgagtctctcaaagctttttgggatgtcatggacgaaattgatgaaaaaacttgggtgctcgagccagagaagccccctcggtccgctaccgcccggagaattgccctcgggaacaacgtgagcattaatattgaagtagaccctcgccacccaacaatgttacccgagtgcttttttctgggcgccgaccacgttgtcaaacctctcggcataaaactttctaggaacatccatctttgggaccccgaaaactccgttttgcagaatctgaaggacgttttagagatcgatttcccagcacgggcaatcctggagaagtccgacttcactatggattgtggaatctgctacgcatatcaactggatggcaccattcccgaccaggtgtgcgataatagccagtgtggtcagccattccaccagatctgtctatacgaatggttacggggcctgctgacctccaggcaaagttttaatatcatctttggagagtgcccgtactgttcgaagcccattactctcaaaatgagcgggaggaagcactag

SEQ ID NO: 43138 - DNA, 1143 bp, Artificial Sequence
  derived and/or modified sequence
atggctgtaactgaggccagcttacttagacagtgccctttgttgttgccacaaaatagatcaaagaccgtctatgagggttttatctccgcccagggccgtgactttcatctcaggatcgtccttccagaggatttgcagctcaaaaacgccaggctcctctgctcttggcagttgcggacaatcctctctgggtaccacagaatagtgcaacagcggatgcagcacagccctgatttaatgtctttcatgatggagcttaagatgctgttggaggtagccctcaaaaataggcaggaattgtatgcccttcccccaccgccacagttttattcatccctcatcgaggagatcggaaccctgggatgggacaagctggtgtatgcagatacatgtttcagcacaatcaagttaaaggccgaagacgcaagtggcagagagcacctgattactctcaagcttaaggctaagtatcccgctgaatcccctgattatttcgtagactttcctgtacctttctgtgcctcctggacaccccaagtgaattcacctcagtcatctctcattagtatttactcccaattcttggctgcgattgagagtctcaaggcattctgggatgtgatggatgagattgatgagaaaacttgggtgctagagccggaaaagcctcctcgcagtgccactgcccgaagaattgcactgggcaataatgtatctatcaatattgaggtcgatccgaggcatcctactatgctgccagaatgcttctttctcggggctgatcacgtggtgaagccattagggatcaagttatccagaaatatccacctttgggatcccgaaaattctgtgctgcaaaacctgaaagacgtactagaaattgatttccctgccagggctattctggagaaaagcgatttcaccatggactgcggaatttgttatgcatatcagctcgatggcaccatacccgaccaggtgtgtgacaattctcagtgtggccagccgtttcatcaaatctgcctgtacgaatggctcagagggctgttaacctctagacagtcgtttaatatcatcttcggagaatgtccctattgttcaaagcctattactctgaaaatgtcagggagaaagcattag

SEQ ID NO: 43139 - DNA, 1143 bp, Artificial Sequence
  derived and/or modified sequence
atggccgtgaccgaggccagcctgctgagacagtgccccctgctgctgccccagaacagaagcaagaccgtgtacgagggcttcatcagcgcccagggcagagacttccacctgagaatcgtgctgcccgaggacctgcagctgaagaacgccagactgctgtgcagctggcagctgagaaccatcctgagcggctaccacagaatcgtgcagcagagaatgcagcacagccccgacctgatgagcttcatgatggagctgaagatgctgctggaggtggccctgaagaacagacaggagctgtacgccctgcccccccccccccagttctacagcagcctgatcgaggagatcggcaccctgggctgggacaagctggtgtacgccgacacctgcttcagcaccatcaagctgaaggccgaggacgccagcggcagagagcacctgatcaccctgaagctgaaggccaagtaccccgccgagagccccgactacttcgtggacttccccgtgcccttctgcgccagctggaccccccaggtgaacagcccccagagcagcctgatcagcatctacagccagttcctggccgccatcgagagcctgaaggccttctgggacgtgatggacgagatcgacgagaagacctgggtgctggagcccgagaagccccccagaagcgccaccgccagaagaatcgccctgggcaacaacgtgagcatcaacatcgaggtggaccccagacaccccaccatgctgcccgagtgcttcttcctgggcgccgaccacgtggtgaagcccctgggcatcaagctgagcagaaacatccacctgtgggaccccgagaacagcgtgctgcagaacctgaaggacgtgctggagatcgacttccccgccagagccatcctggagaagagcgacttcaccatggactgcggcatctgctacgcctaccagctggacggcaccatccccgaccaggtgtgcgacaacagccagtgcggccagcccttccaccagatctgcctgtacgagtggctgagaggcctgctgaccagcagacagagcttcaacatcatcttcggcgagtgcccctactgcagcaagcccatcaccctgaagatgagcggcagaaagcactag

SEQ ID NO: 43140 - protein, 602 aa, Artificial Sequence
  derived and/or modified sequence
MVKLAKAGKNQGDPKKMAPPPKEVEEDSEDEEMSEDEEDDSSGEELNDDFYQTTMHTLWKKGKKAAATSAIPAKGAKNGKNAKKEDSDEEEDDDSEEDEEDDEDEDEDEDEIEPAAMKAAAAAPASEDEDDEDDEDDEDDDDDEEDDDDDEDDEEEEEEEEEEPVKEAPGKRKKEMAKQKAAPEAKKQKVEGTEPTTAFNLFVGNLNFNKSAPELKTGISDVFAKNDLAVVDVRIGMTRKFGYVDFESAEDLEKALELTGLKVFGNEIKLEKPKGKDSKKERDARTLLAKNLPYKVTQDELKEVFEDAAEIRLVSKDGKSKGIAYIEFKTEADAEKTFEEKQGTEIDGRSISLYYTGEKGQNQDYRGGKNSTWSGESKTLVLSNLSYSATEETLQEVFEKATFIKVPQNQNGKSKGYAFIEFASFEDAKEALNSCNKREIEGRAIRLELQGPRGSPNARSQPSKTLFVKGLSEDTTEETLKESFDGSVRARIVTDRETGSSKGFGFVDFNSEEDAKAAKEAMEDGEIDGNKVTLDWAKPKGEGGFGGRGGGRGGFGGRGGGRGGRGGFGGRGRGGFGGRGGFRGGRGGGGDHKPQGKKTKFE

SEQ ID NO: 43141 - protein, 370 aa, Artificial Sequence
  derived and/or modified sequence
MNVAAKYRMASLYVGDLHADVTEDLLFRKFSTVGPVLSIRICRDQVTRRSLGYAYVNFLQLADAQKALDTMNFDIIKGKSIRLMWSQRDAYLRRSGIGNVFIKNLDKSIDNKTLYEHFSAFGKILSSKVMSDDQGSKGYAFVHFQNQSAADRAIEEMNGKLLKGCKVFVGRFKNRKDREAELRSKASEFTNVYIKNFGGDMDDERLKDVFSKYGKTLSVKVMTDSSGKSKGFGFVSFDSHEAAKKAVEEMNGRDINGQLIFVGRAQKKVERQAELKQMFEQLKRERIRGCQGVKLYIKNLDDTIDDEKLRNEFSSFGSISRVKVMQEEGQSKGFGLICFSSPEDATKAMTEMNGRILGSKPLSIALAQRH

SEQ ID NO: 43142 - protein, 428 aa, Artificial Sequence
  derived and/or modified sequence
MRVLPELGESCLNSIAWPLCGDPEASTLEPGQSCDLVSPHRDCSKNSRGQTHSGKDKEMNVAAKYRMASLYVGDLHADVTEDLLFRKFSTVGPVLSIRICRDQVTRRSLGYAYVNFLQLADAQKALDTMNFDIIKGKSIRLMWSQRDAYLRRSGIGNVFIKNLDKSIDNKTLYEHFSAFGKILSSKVMSDDQGSKGYAFVHFQNQSAADRAIEEMNGKLLKGCKVFVGRFKNRKDREAELRSKASEFTNVYIKNFGGDMDDERLKDVFSKYGKTLSVKVMTDSSGKSKGFGFVSFDSHEAAKKAVEEMNGRDINGQLIFVGRAQKKVERQAELKQMFEQLKRERIRGCQGVKLYIKNLDDTIDDEKLRNEFSSFGSISRVKVMQEEGQSKGFGLICFSSPEDATKAMTEMNGRILGSKPLSIALAQRH

SEQ ID NO: 43143 - DNA, 1113 bp, Artificial Sequence
  derived and/or modified sequence
atgaacgtggccgccaagtacagaatggccagcctgtacgtgggcgacctgcacgccgacgtgaccgaggacctgctgttcagaaagttcagcaccgtgggccccgtgctgagcatcagaatctgcagagaccaggtgaccagaagaagcctgggctacgcctacgtgaacttcctgcagctggccgacgcccagaaggccctggacaccatgaacttcgacatcatcaagggcaagagcatcagactgatgtggagccagagagacgcctacctgagaagaagcggcatcggcaacgtgttcatcaagaacctggacaagagcatcgacaacaagaccctgtacgagcacttcagcgccttcggcaagatcctgagcagcaaggtgatgagcgacgaccagggcagcaagggctacgccttcgtgcacttccagaaccagagcgccgccgacagagccatcgaggagatgaacggcaagctgctgaagggctgcaaggtgttcgtgggcagattcaagaacagaaaggacagagaggccgagctgagaagcaaggccagcgagttcaccaacgtgtacatcaagaacttcggcggcgacatggacgacgagagactgaaggacgtgttcagcaagtacggcaagaccctgagcgtgaaggtgatgaccgacagcagcggcaagagcaagggcttcggcttcgtgagcttcgacagccacgaggccgccaagaaggccgtggaggagatgaacggcagagacatcaacggccagctgatcttcgtgggcagagcccagaagaaggtggagagacaggccgagctgaagcagatgttcgagcagctgaagagagagagaatcagaggctgccagggcgtgaagctgtacatcaagaacctggacgacaccatcgacgacgagaagctgagaaacgagttcagcagcttcggcagcatcagcagagtgaaggtgatgcaggaggagggccagagcaagggcttcggcctgatctgcttcagcagccccgaggacgccaccaaggccatgaccgagatgaacggcagaatcctgggcagcaagcccctgagcatcgccctggcccagagacactag

SEQ ID NO: 43144 - DNA, 1287 bp, Artificial Sequence
  derived and/or modified sequence
atgagagtgctgcccgagctgggcgagagctgcctgaacagcatcgcctggcccctgtgcggcgaccccgaggccagcaccctggagcccggccagagctgcgacctggtgagcccccacagagactgcagcaagaacagcagaggccagacccacagcggcaaggacaaggagatgaacgtggccgccaagtacagaatggccagcctgtacgtgggcgacctgcacgccgacgtgaccgaggacctgctgttcagaaagttcagcaccgtgggccccgtgctgagcatcagaatctgcagagaccaggtgaccagaagaagcctgggctacgcctacgtgaacttcctgcagctggccgacgcccagaaggccctggacaccatgaacttcgacatcatcaagggcaagagcatcagactgatgtggagccagagagacgcctacctgagaagaagcggcatcggcaacgtgttcatcaagaacctggacaagagcatcgacaacaagaccctgtacgagcacttcagcgccttcggcaagatcctgagcagcaaggtgatgagcgacgaccagggcagcaagggctacgccttcgtgcacttccagaaccagagcgccgccgacagagccatcgaggagatgaacggcaagctgctgaagggctgcaaggtgttcgtgggcagattcaagaacagaaaggacagagaggccgagctgagaagcaaggccagcgagttcaccaacgtgtacatcaagaacttcggcggcgacatggacgacgagagactgaaggacgtgttcagcaagtacggcaagaccctgagcgtgaaggtgatgaccgacagcagcggcaagagcaagggcttcggcttcgtgagcttcgacagccacgaggccgccaagaaggccgtggaggagatgaacggcagagacatcaacggccagctgatcttcgtgggcagagcccagaagaaggtggagagacaggccgagctgaagcagatgttcgagcagctgaagagagagagaatcagaggctgccagggcgtgaagctgtacatcaagaacctggacgacaccatcgacgacgagaagctgagaaacgagttcagcagcttcggcagcatcagcagagtgaaggtgatgcaggaggagggccagagcaagggcttcggcctgatctgcttcagcagccccgaggacgccaccaaggccatgaccgagatgaacggcagaatcctgggcagcaagcccctgagcatcgccctggcccagagacactag

SEQ ID NO: 43145 - DNA, 1113 bp, Artificial Sequence
  derived and/or modified sequence
atgaacgtagctgccaagtacagaatggcatccttatatgtaggcgaccttcacgccgacgtgaccgaggatctcttattccggaagtttagtaccgtgggtcctgtacttagtattaggatatgccgtgaccaggttactaggaggagtttggggtatgcctatgttaacttcctccagctggcagatgcccagaaggccctggacacaatgaattttgacattattaaaggaaagtctattagactcatgtggtctcaacgggatgcctacttgcgccgatccggaatcggcaacgtgtttatcaaaaacctggataagagcattgataacaagacactgtatgaacatttttctgcattcgggaagatactctctagcaaagttatgagtgatgatcagggctctaaaggttacgcattcgtacacttccagaaccagtcagctgctgatcgcgccattgaggagatgaatggaaaacttctcaaagggtgcaaggtgttcgtgggtcggtttaagaatcgaaaggaccgagaggctgagctgcggtccaaggcatctgagttcactaacgtgtacatcaagaatttcggcggagacatggatgatgagcgcttgaaggatgtgttctcaaagtacggtaaaacactctcagtgaaggtcatgaccgactccagcggcaagtctaaggggttcggtttcgtgtcgttcgactcccatgaagcggcgaaaaaggctgttgaagagatgaacggtagggatatcaatggccaactgattttcgtgggccgcgcccaaaaaaaggtcgagcggcaagctgaactcaaacagatgttcgaacaactcaagagggaacgaattcgcggctgccagggagtaaaactgtacattaagaatctggatgatactatcgatgacgagaaacttcgcaatgagttttcaagttttggctccatcagtagggtcaaagtgatgcaggaggaggggcagtccaagggattcggactgatatgcttctcctccccggaagatgctactaaggctatgaccgaaatgaatggccggatactggggagtaaacctctgagcatcgcgttggcacagagacactag

SEQ ID NO: 43146 - DNA, 1287 bp, Artificial Sequence
  derived and/or modified sequence
atgagggtcctgcctgaattaggagagtcttgtctaaattcaatcgcctggccactttgcggagaccctgaggctagcaccttagaacccgggcaatcttgtgacttagtgtcaccccaccgcgactgttctaagaattcaaggggccaaacccactccggaaaggacaaagaaatgaatgtcgcagccaaatataggatggcgagtctctatgtgggagacttgcacgcggatgtgaccgaagacttgctcttccggaaattttctaccgttggacccgtgctgagcatacgcatttgtagagatcaggtgactagacggagcctaggctacgcctacgtcaattttcttcagctggcggatgcccagaaggccctcgatactatgaattttgatattatcaagggcaaaagtattaggctgatgtggtctcagagggacgcctaccttcgcagaagtggcatcggaaacgtgttcataaagaatctggacaaatccatcgacaataaaaccctgtacgaacacttttcagcgttcggtaagatcctcagctctaaggttatgagtgacgaccagggatcgaaaggctacgctttcgtccactttcagaaccagagcgccgcggacagggcaattgaggaaatgaacgggaaattgctgaagggatgtaaagtttttgttgggaggtttaaaaatcggaaagaccgagaggccgagctacggtcaaaggcctccgagtttaccaacgtgtacatcaagaattttggcggggacatggacgacgaaaggttgaaagatgtcttttctaagtacggtaaaactctgtctgtcaaggttatgaccgacagctccggaaagtccaaaggctttggattcgtatcattcgattcgcatgaagccgctaagaaagctgttgaggaaatgaatggccgtgacattaatgggcagcttattttcgtcggtagagcccaaaaaaaggtagaacgccaggcagaactcaaacaaatgtttgaacaattaaagcgtgaacgcatccgagggtgccagggggttaaactgtacattaagaatctcgacgacactatcgatgatgagaagctgcgcaatgagttttccagttttggcagcatttcacgagtgaaagtgatgcaggaggaaggacagagcaagggattcggactgatctgcttcagctccccggaagacgctacaaaagcgatgacagagatgaacggccgaatactcgggtctaagcccctcagcatagcactagctcagaggcattag

SEQ ID NO: 43147 - DNA, 1113 bp, Artificial Sequence
  derived and/or modified sequence
atgaatgtggccgccaagtacaggatggccagcctgtatgtgggggacctgcatgctgatgtgacagaggacctgctcttcaggaagttcagcacagtgggccctgtgctgagcatccgcatctgccgggaccaggtgacccggcgcagcctgggctacgcctacgtgaacttcctgcagctggctgatgcccagaaggccctggacaccatgaactttgacatcatcaagggcaagagcatccggctgatgtggagccagagagatgcctacctgcggcgctctggaattggaaatgtgttcatcaagaacctggacaagagcattgacaacaagaccctgtatgagcacttcagcgccttcggcaagatcctgagcagcaaggtgatgtctgatgaccagggcagcaagggctacgcctttgtgcacttccagaaccagagcgctgctgaccgggccatcgaggagatgaatggcaagctgctgaagggctgcaaggtgtttgtgggccgcttcaagaacaggaaggaccgggaggccgagctgcggagcaaggccagcgagttcaccaacgtgtacatcaagaactttggaggagacatggatgatgagcggctgaaggatgtgttcagcaaatatggcaagaccctgtctgtgaaggtgatgacagacagcagcggcaagagcaagggcttcggctttgtgtcctttgacagccatgaggccgccaagaaggctgtggaggagatgaatggccgggacatcaatggccagctgatctttgtgggccgggcccagaagaaggtggagcggcaggccgagctgaagcagatgtttgagcagctgaagcgggagcgcatccggggctgccagggcgtgaagctgtacatcaagaacctggatgacaccattgatgatgagaagctgagaaatgagttcagcagctttggcagcatcagccgggtgaaggtgatgcaggaggagggccagagcaagggcttcggcctcatctgcttcagcagcccagaagatgccaccaaggccatgacagagatgaatggccgcatcctgggcagcaagcccctgagcatcgccctggcccagaggcactag

SEQ ID NO: 43148 - DNA, 1287 bp, Artificial Sequence
  derived and/or modified sequence
atgagggtgctgcctgagctgggggagagctgcctgaacagcatcgcctggcccctgtgtggggaccctgaggccagcaccctggagcccggccagagctgtgacctggtgagcccccaccgggactgcagcaagaacagccggggccagacccacagcggcaaggacaaggagatgaatgtggccgccaagtacaggatggccagcctgtatgtgggggacctgcatgctgatgtgacagaggacctgctcttcaggaagttcagcacagtgggccctgtgctgagcatccgcatctgccgggaccaggtgacccggcgcagcctgggctacgcctacgtgaacttcctgcagctggctgatgcccagaaggccctggacaccatgaactttgacatcatcaagggcaagagcatccggctgatgtggagccagagagatgcctacctgcggcgctctggaattggaaatgtgttcatcaagaacctggacaagagcattgacaacaagaccctgtatgagcacttcagcgccttcggcaagatcctgagcagcaaggtgatgtctgatgaccagggcagcaagggctacgcctttgtgcacttccagaaccagagcgctgctgaccgggccatcgaggagatgaatggcaagctgctgaagggctgcaaggtgtttgtgggccgcttcaagaacaggaaggaccgggaggccgagctgcggagcaaggccagcgagttcaccaacgtgtacatcaagaactttggaggagacatggatgatgagcggctgaaggatgtgttcagcaaatatggcaagaccctgtctgtgaaggtgatgacagacagcagcggcaagagcaagggcttcggctttgtgtcctttgacagccatgaggccgccaagaaggctgtggaggagatgaatggccgggacatcaatggccagctgatctttgtgggccgggcccagaagaaggtggagcggcaggccgagctgaagcagatgtttgagcagctgaagcgggagcgcatccggggctgccagggcgtgaagctgtacatcaagaacctggatgacaccattgatgatgagaagctgagaaatgagttcagcagctttggcagcatcagccgggtgaaggtgatgcaggaggagggccagagcaagggcttcggcctcatctgcttcagcagcccagaagatgccaccaaggccatgacagagatgaatggccgcatcctgggcagcaagcccctgagcatcgccctggcccagaggcactag

SEQ ID NO: 43149 - DNA, 1113 bp, Artificial Sequence
  derived and/or modified sequence
atgaacgtggccgccaagtaccggatggccagcctgtacgtgggcgacctccatgcggatgtgactgaagatctgttgtttcgcaagtttagtactgtcggcccggtgctttcaattaggatttgccgagaccaagtcacccggcgatcgctaggctacgcttatgtgaatttcctgcaacttgcagacgcacaaaaggcattggacactatgaatttcgatatcattaaaggcaagtcaatacgcctgatgtggtcccagcgcgacgcctatctcagacgttcgggcattggcaatgtgtttatcaaaaacctcgataagtctatcgataataaaacactgtatgagcacttctccgccttcggcaagattctctcttctaaagtgatgtctgatgatcagggatccaaaggctacgcgttcgtgcactttcaaaatcagagtgctgccgatcgcgcgatcgaggagatgaatggaaagctgctgaagggctgtaaagtgttcgtgggtaggtttaagaaccgtaaggaccgggaggctgagctgagatctaaggcctcagagtttaccaatgtttatataaagaatttcggcggtgacatggatgatgaacgcttaaaagacgtcttcagcaaatatgggaaaacgctgtctgtcaaggtaatgacagattcttccggaaagtccaagggctttgggttcgtcagcttcgatagccacgaggctgccaagaaggccgttgaagaaatgaatggtagggacatcaacggccagctcatcttcgtgggtcgcgcccagaagaaggtggaacgccaagccgagttgaagcagatgtttgaacagctcaagcgagaaagaattcgcggctgtcagggcgtcaaactgtatattaagaacctggacgacactattgacgacgaaaagctgaggaatgaatttagttccttcggctctataagtagggttaaggtgatgcaggaggaagggcagtcaaaaggattcggtctgatttgctttagttcacccgaggacgccacaaaagccatgacggaaatgaatggccgcattcttggctcaaaacctcttagcatcgctttggcccagcgtcactag

SEQ ID NO: 43150 - DNA, 1287 bp, Artificial Sequence
  derived and/or modified sequence
atgcgggtgctgcccgagctgggcgagagctgcctgaacagcatcgcctggcctctgtgcggcgaccctgaggcctcgacattggaacctggacagtcttgcgacctcgtgtctcctcacagggactgcagcaaaaattctagaggtcagacccacagtggcaaggacaaagagatgaacgttgcagccaaataccggatggcttctctgtatgttggtgacctccacgctgatgtgacagaggatctcttatttcgtaagttctctacggtgggaccagtgctgagcattaggatctgccgcgaccaggttactcgccgctcccttgggtatgcttatgttaatttcttgcagctagcggacgcacagaaagcactggacaccatgaacttcgatattatcaaagggaaatccatcagacttatgtggagtcagagggatgcctatttacggaggtctggtattggcaatgtgttcattaaaaatcttgataagtcgattgataacaaaacactttacgagcatttttccgcgtttggcaaaatcctctcctccaaggtcatgagcgacgatcaagggagcaagggctatgcctttgtgcacttccagaatcagtctgctgcagatagagccatcgaagaaatgaatggaaaactcctgaagggatgcaaagtcttcgtaggccgttttaaaaatcgtaaagacagagaagccgaactgcggagtaaggcatccgagttcactaacgtgtatatcaagaattttggaggagatatggatgatgaacggctcaaggatgtcttcagtaagtatggcaaaacgttgtcagtcaaggtgatgactgacagctccgggaagtccaagggattcggttttgtcagcttcgactcccacgaagccgccaagaaagcggtggaggagatgaatggtcgtgacattaatgggcagctcatcttcgtaggtcgtgctcagaaaaaagtcgaaaggcaagctgaactgaaacaaatgtttgagcagcttaagagagagcgtatcaggggttgccaaggagtaaagttgtacattaagaaccttgacgacacaattgatgacgagaaattaaggaacgagttttccagcttcggaagcatcagtcgcgttaaagtgatgcaggaagagggccagtcaaaggggttcggtctgatttgcttttcatcgcctgaggatgcaaccaaggctatgactgagatgaatggacgtattctcgggtctaagcccttgagcatcgccctcgcccagaggcattag

SEQ ID NO: 43151 - DNA, 4944 bp, Artificial Sequence
  derived and/or modified sequence
gggcttcccgcccgcccgcagacgaccgccgttctgttgccgcgtcctaggagggccagattggtggctgtggggacttttggatgagggtgttgcctgagctgggggagtcgtgtctgaactccattgcttggcctttgtgtggtgatcccgaggcctccacacttgaaccgggccaaagctgtgacctagtatccccccacagggattgctcaaagaactccaggggacaaactcacagtggcaaggacaaggagatgaatgtagcagccaagtaccgcatggcctccctgtatgtgggtgacttacatgcagatgtcaccgaggacctgctgttcaggaagttcagcactgtggggcctgtgctgtccatccgcatttgcagggaccaggtcacccgccgctctctgggctatgcctacgtgaacttcttgcagctggctgatgcccagaaggcgctggacacaatgaactttgacatcataaaaggcaaatccatccgtctcatgtggtctcagcgcgatgcctacttgaggagatctggaattgggaacgtattcatcaagaatctggacaaatctatcgataacaaaaccctttatgaacatttttcagcttttggaaagatcctttcctccaaggtgatgagtgatgatcaaggctccaagggctatgcatttgtgcactttcagaaccagagtgctgcagacagggccattgaggagatgaatggaaaactactcaagggctgcaaggtgtttgttggcagattcaaaaaccgaaaagatcgtgaagctgaactcagaagcaaagccagtgaattcaccaatgtttacataaaaaactttggaggtgacatggatgatgagagattgaaggacgttttcagcaaatatggcaaaactctgagtgttaaggtgatgacagattccagtgggaaatccaaaggctttggctttgtgagttttgatagccatgaggctgccaagaaagctgttgaagaaatgaatggaagggacataaatgggcagctgatttttgtaggccgggctcaaaagaaagtcgagcgacaggctgagttaaagcaaatgtttgagcagctgaaaagggaacgaattcgtgggtgccagggggtaaaactctatattaagaaccttgatgacaccatcgatgatgaaaaactacgaaacgaattttcttcatttggatcaattagcagagttaaggtaatgcaggaagaggggcagagcaaagggtttggcttgatctgcttctcctctcctgaggatgctactaaagcaatgactgagatgaatggccgcatcttgggctccaaacctcttagcattgccttggcccagagacactaggaaagaaaaacgtacctttccagctagtatctgcagcaggtgggagaatgatagtgatctctgcctgaattgacctcagtaaatttcatattccacatgatgggtgcttagtttagtaaactttatgataaaacgttttttatacaaagccattttttttcttttgtggaaaaatagatggagcttagttcattttacagaggcacattttctaattttaatattgcacatttttcttattttgatatgttcatagcaataagtataaatagatatatttttacatttgaaccaaatgaaatgaggtaattatttgaatttattgcatatttattattttagtaatattgctagctttaatttcttctatgaaaatatgctcaaaatagttcttacaactaaagattccaaagtatttttaccaacagaaattttctaatttttcatccaagttttgagaaatcaaacttttagaaatttatagtacgaatttaaagacctaatttcattttgaattaatgcttaaaatagtcagatatagttgaatttcttttaaatttatatcctgacatgcttgtttttcggatggtttaaattaagatgatggaagtttttaatgttgcctaaaaactggctttatgtgttttgttctttccattagttgactataattcaggtacttactagttaatctaaattgtaacttgcactgtaaaaccttaacttctacattccttaagttataaatctgttatcaactcaggtgatccaaagttggcctggtcttaaatctcttcatacctatatggcttaatatattatcttaaatttttaccagatgctaatattatgaaaatcatacatacagattatagaaattctgtttaaaaacttttaaaatctcttttatattgttttgtgtagtgattttctcttagggttcagaaaagtaagttcctctatttttatgtactcacatctccttttattagaatgtggcagctatggaacccattaaggttcacttttagccttcattgatcagaaacactgattgattttctgatgaattgaagttacatcacttattctgttttctagcataatttttagtttagaaccattcccctattttccttgctctcctgcctttcatctatattcctcagctttttaaaatactttctaaaggatttttttatgttggcttttaatatgtgctgcttcaaatccatttggaaatcgaggcaagagttatttaattacatttaaataattgctttacaaattctgattcataccaaaggtatctagcaagcaagtgcttttgtttttactgttttcatatttttacttggcttagttttttctcataactattattcacattctctatttcatatattactaatataaaagaaatagtaaaatattttttggcaatacctcagcttatgaatgagaaaaatttgttgccttttatttttatagaaattatatgtatattctttgcacattttctaaaatgaaaatcttttagtccataaaaaattatggacaatgaaaaaattaaaagaatttgcatataattgtattatgcaaaccaattccctattataatttgttacatatttttctatttttttctctctctacatatatacacctaggtaatttaagaaaaataggataatattacaaatgttgtttgaaattgctttcttaaacaatatgctatggtcaacttttatgctcacaataattatttgtcttataatctgagtgacttttatgttttgttcaatgactgtaccaaaatataactaatttcttattgataaacttcttgttgctagataatttcttccttttttcttcttcctctgtcataaataacttggagattaacatccttgcgaacttatatatgcaaatatatctattttcttaagaaaatgtttagaagtagaattaatggttaaaaaagaatcaattttaaaaagtaattttgataaatattgcttaaatgctgtccagaatacttgtggcacttacatttccattgtcattgtaggagaatgcctatttccatatgctccaagaaacaagggttttttttaagctgttggtcaattcaacatgatatgtaaaacaaaccatttcatcattgctttatttcacttttgtaaattacaaaagttaaacagtatttgtgtactcactgaccatttgtattttcatacttataagttaatgtctcatgatcataatttattttcctgttggggtgttttttatttacatggatttttagatttctttgcatattatgactacattttagacttttccccctgatatttcactgtctttatagttttgaaggttattccaaaattgaatgttaagctggaaagttttagtattctactgaaatggctttgatgtcatgcttcaaaatattttgaacactttaaatacatatattcacacaaatatatatacacccacacaatttatctgtattgtgtttatgactttcagattttcatattctcaatgcttctaactaaaattttggttcataaaaagtatcttatataaaacctatagtaaatattttaaaaatgtgcttttccatttttaataacatgtattttggtaaatacttgattcagagagccaatgaattagagttggcatatgagtttcacatagattcttatactaggtaagtatttaccaaaacatgtatcagaagcagaaagttgttaaaaaggtttaccagacaacaagactggaaagtgtattaagtgtgcctggccttgacatcttgttctggataatctagtctacatcttaatttaggaaagctaatctgtaaaactgttcaaatatttgaacaatatttgataatgcttacataatctttcaagataatatcaggaaacagagttctttcatgtatgtaagtagttaataggacataacatcagatgtctagatgaattatagctatggcttaattacacaataatctgccttcttagtagaaattgcttatttccagcatttgctgtaaaaaaaaaaaagacagtcagtttacaaaaatatacaatcctatggatttaatttatttaaattttgttcattctaattttttttggtgcgtgataatagcaagttatcttagttgaaaatagagattcattcattaaagaatattaaatcttttgtgcccaagtgccttaataaataagtagaatcttaacttttctgataagcattccagtaaaagctaatgtacatagatatgccttgagccactgtttctactttcacccttctctccacacatattgccacgtctgctgtgtagttacctgcttacatgtacagccatttcaataaatgtattcttttaacattttatcttttaaatttcaaataggaatttatagttggtaaaaataaaaattttaaagtgatttaatattgtcattttcatgttctcaatattgttatagatccactgagaaaatgtcaaataaaatctaatatttcaaaggtgaaa

SEQ ID NO: 43152 - DNA, 1113 bp, Artificial Sequence
  derived and/or modified sequence
atgaacgtagccgctaaataccgaatggcctcattgtacgtcggcgatctccatgccgacgtcacagaggacctgctgtttagaaagttctctaccgtgggtcccgtcctcagcattcggatttgccgagaccaggtcacccgccgatcactaggttacgcctacgtgaacttcctgcagctggctgacgcgcaaaaagccctggacaccatgaatttcgacataatcaaggggaagtctatccggctcatgtggtcccaaagggacgcatacctgagacgcagtggcattggtaacgtgtttatcaagaatttggacaaatccatcgataacaagaccctctacgagcacttcagcgctttcggtaagattctgagtagcaaagttatgagcgacgatcaagggtctaagggctacgcattcgtgcattttcagaatcagagcgcagccgaccgtgctatcgaggaaatgaatggcaaattattaaaagggtgcaaagtctttgtgggacgatttaaaaacaggaaggaccgcgaagccgagctgcgttcaaaggcatctgagttcacaaatgtctacatcaagaacttcggaggtgatatggacgacgaacgactgaaagacgtctttagtaaatatgggaaaactctttctgtgaaggtgatgactgattcctccggcaaaagcaaagggtttgggttcgtatcctttgattcacacgaggcagcaaagaaggctgtggaggaaatgaatggaagagacatcaacggccagctgatcttcgtgggacgggcacagaagaaagtggagcgccaagccgaactcaagcagatgttcgaacagttgaaaagagaacgcatacggggttgtcaaggcgttaagctgtacataaagaatctggatgatacaatcgacgacgagaaactgcggaatgagttttcttcttttggcagtatttccagggtgaaagttatgcaggaagaggggcagagtaagggtttcgggctcatttgcttcagcagcccagaggacgccaccaaggcaatgactgaaatgaacggaagaattctaggatctaagccacttagtattgccttggcccagcggcactag

SEQ ID NO: 43153 - DNA, 1287 bp, Artificial Sequence
  derived and/or modified sequence
atgcgggtcctacccgagctgggggagagctgcctcaattccatagcttggccactttgtggagatcccgaggcctctaccctcgagccgggtcaaagctgcgatctggtgtcccctcatagggattgcagtaagaattctcggggacagacacatagcggcaaggataaggagatgaatgtcgctgccaagtatcggatggccagtctgtatgttggtgacctccatgcggacgtcaccgaagacctcttgtttcgcaagttctctactgtggggccagtcctctctatccgtatttgccgcgaccaggtcactaggaggagcctgggctatgcatatgtgaacttcctgcagctggcagatgcccaaaaggctctcgatacaatgaattttgacatcattaaaggcaagtcgattcgcttaatgtggagtcaacgggatgcatacctcagacgaagtggaataggcaatgtattcatcaagaatctcgataaatctatcgacaataagaccctctacgagcactttagcgcattcgggaagatactgtcatccaaggtcatgtccgacgaccagggaagcaagggctacgcatttgtacacttccaaaatcagagcgccgcagatcgcgctattgaggagatgaatggcaaattgctgaagggctgtaaggtgttcgtcggacggtttaagaatcgtaaagatcgcgaagccgaacttagatccaaagcttccgagtttaccaacgtctatattaaaaactttggtggcgacatggatgacgaacggctaaaagacgttttcagcaaatatggcaagaccttgtctgtcaaagtaatgactgattcttccggtaaatctaaaggatttggctttgtgtctttcgactcccatgaggcagccaagaaggctgtcgaagagatgaacggcagggatattaatgggcagctgatcttcgtgggaagggcccaaaagaaagtcgagcgccaagcggaacttaaacagatgttcgaacagctcaaacgcgaaagaattagaggatgtcagggcgttaagctctacatcaagaacctggatgacaccattgatgacgaaaagttgaggaacgaattttcctcctttggatccatatcacgggtgaaggttatgcaagaggagggccagtccaaaggatttggcctgatctgcttctcatccccagaagacgccaccaaggctatgaccgaaatgaacgggaggatccttggcagcaagccgctgtcaattgcactggctcagaggcattag

SEQ ID NO: 43154 - protein, 163 aa, Artificial Sequence
  derived and/or modified sequence
MTDCEFGYIYRLAQDYLQCVLQIPQPGSGPSKTSRVLQNVAFSVQKEVEKNLKSCLDNVNVVSVDTARTLFNQVMEKEFEDGIINWGRIVTIFAFEGILIKKLLRQQIAPDVDTYKEISYFVAEFIMNNTGEWIRQNGGWGKWHNHTPMLVESVAHKKRKMAL

SEQ ID NO: 43155 - DNA, 492 bp, Artificial Sequence
  derived and/or modified sequence
atgaccgactgcgagttcggctacatatatagactggctcaggattatcttcagtgtgtacttcagattccgcagccaggatccggtcctagtaagaccagtagggtgctgcaaaatgtggcctttagcgtgcaaaaggaagttgagaaaaacctgaagtcgtgtctcgataacgtcaacgtggtgtccgtggatacagctcggacactcttcaaccaggtcatggagaaggaatttgaagacggcatcattaactggggacgcattgtgaccatttttgcctttgagggaatcttaattaagaaactcctgagacagcagatcgcccctgacgtggatacctacaaagagatctcttattttgtcgcggagtttatcatgaataataccggcgagtggattcgtcaaaatggaggctggggcaagtggcacaatcacacacccatgctagtcgaaagcgttgctcataaaaagcgaaagatggctttatag

SEQ ID NO: 43156 - DNA, 492 bp, Artificial Sequence
  derived and/or modified sequence
atgacagactgtgaatttggctacatctaccgcctggcccaggactacctgcagtgtgtgctgcagatcccccagcccggcagcggccccagcaagaccagccgggtgctgcagaatgtggccttctctgtgcagaaggaggtggagaagaacctgaagagctgcctggacaacgtgaatgtggtgtctgtggacacagcccggaccctcttcaaccaggtgatggagaaggagtttgaagatggcatcatcaactggggcagaattgtgaccatctttgcctttgagggcatcctgatcaagaagctgctgcggcagcagatcgccccagatgtggacacctacaaggagatctcctactttgtggccgagttcatcatgaacaacacaggagagtggatccggcagaatggaggctggggcaagtggcacaaccacacccccatgctggtggagagcgtggcccacaagaagaggaagatggccctgtag

SEQ ID NO: 43157 - DNA, 492 bp, Artificial Sequence
  derived and/or modified sequence
atgaccgactgcgagttcggctacatctaccggctggcccaggactatctgcagtgtgttctgcaaatccctcagcccggttctggtccatctaaaacgagtagggtcctgcagaatgttgcgttctctgtccagaaggaggtcgaaaagaatctcaagagctgtttggacaatgtgaatgtagtctccgttgatacagctaggacactctttaaccaggtgatggagaaggagttcgaagacggtattattaactggggccggatcgttacaattttcgccttcgagggaattctcattaagaagctcctccgacagcagatagcccctgacgttgacacgtacaaagagatatcatacttcgtggcggagtttataatgaataatacaggagaatggatcagacagaacggtggctgggggaaatggcacaatcacacacccatgttagtggaatctgtcgctcataagaaacggaagatggccttatag

SEQ ID NO: 43158 - DNA, 492 bp, Artificial Sequence
  derived and/or modified sequence
atgaccgactgcgagtttgggtatatttatcgactggcccaggactaccttcagtgcgtcctccagattccccaaccagggtcagggcctagtaagacaagtcgcgtgctacagaacgtggccttctccgtccagaaagaagtcgagaagaatctgaagtcatgtttagataatgtgaatgttgtctctgtagacactgcccgaacactcttcaaccaggtgatggagaaggagttcgaggatgggattatcaactggggcaggattgttacgatcttcgcgtttgaaggcattctgatcaaaaagttgcttaggcagcagattgcccctgatgttgacacctacaaagagatcagctatttcgtagcggagtttattatgaacaatacgggggaatggattcgacagaacggcggttggggcaagtggcacaatcacacgcctatgctggtggagagcgtggcccacaagaaacgtaaaatggccctatag

SEQ ID NO: 43159 - DNA, 809 bp, Artificial Sequence
  derived and/or modified sequence
acagcttcaaggtgagccagctcaagactttgctctccaccaggcagaagatgacagactgtgaatttggatatatttacaggctggctcaggactatctgcagtgcgtcctacagataccacaacctggatcaggtccaagcaaaacgtccagagtgctacaaaatgttgcgttctcagtccaaaaagaagtggaaaagaatctgaagtcatgcttggacaatgttaatgttgtgtccgtagacactgccagaacactattcaaccaagtgatggaaaaggagtttgaagacggcatcattaactggggaagaattgtaaccatatttgcatttgaaggtattctcatcaagaaacttctacgacagcaaattgccccggatgtggatacctataaggagatttcatattttgttgcggagttcataatgaataacacaggagaatggataaggcaaaacggaggctgggggaaatggcacaatcacacacctatgctggtagagtcagtggcccacaagaagaggaaaatggctttgtaaagaagtttgaacctaaatctggctggatgacttttctagaagttacaggaaagatctgtgaaatgctatctctcctgaagcaatactgttgaccagaaaggacactccatattgtgaaaccggcctaatttttctgactgatatggaaacgattgccaacacatacttctacttttaaataaacaactttgatgatgtaacttgaccttccagagttatggaaattttgtccccatgtaatgaataaattgtatgtatttttctcta

SEQ ID NO: 43160 - DNA, 492 bp, Artificial Sequence
  derived and/or modified sequence
atgaccgactgcgagttcggctacatctacagactggcccaggactacctgcagtgcgtgctgcagatcccccagcccggcagcggccccagcaagaccagcagagtgctgcagaacgtggccttcagcgtgcagaaggaggtggagaagaacctgaagagctgcctggacaacgtgaacgtggtgagcgtggacaccgccagaaccctgttcaaccaggtgatggagaaggagttcgaggacggcatcatcaactggggcagaatcgtgaccatcttcgccttcgagggcatcctgatcaagaagctgctgagacagcagatcgcccccgacgtggacacctacaaggagatcagctacttcgtggccgagttcatcatgaacaacaccggcgagtggatcagacagaacggcggctggggcaagtggcacaaccacacccccatgctggtggagagcgtggcccacaagaagagaaagatggccctgtag

SEQ ID NO: 43161 - protein, 440 aa, Artificial Sequence
  derived and/or modified sequence
MTVARPSVPAALPLLGELPRLLLLVLLCLPAVWGDCGLPPDVPNAQPALEGRTSFPEDTVITYKCEESFVKIPGEKDSVICLKGSQWSDIEEFCNRSCEVPTRLNSASLKQPYITQNYFPVGTVVEYECRPGYRREPSLSPKLTCLQNLKWSTAVEFCKKKSCPNPGEIRNGQIDVPGGILFGATISFSCNTGYKLFGSTSSFCLISGSSVQWSDPLPECREIYCPAPPQIDNGIIQGERDHYGYRQSVTYACNKGFTMIGEHSIYCTVNNDEGEWSGPPPECRGKSLTSKVPPTVQKPTTVNVPTTEVSPTSQKTTTKTTTPNAQATRSTPVSRTTKHFHETTPNKGSGTTSGTTRLLSGSRPVTQAGMRWCDRSSLQSRTPGFKRSFHFSLPSSWYYRAHVFHVDRFAWDASNHGLADLAKEELRRKYTQVYRLFLVS

SEQ ID NO: 43162 - protein, 129 aa, Artificial Sequence
  derived and/or modified sequence
MTVARPSVPAALPLLGELPRLLLLVLLCLPAVWGDCGLPPDVPNAQPALEGRTSFPEDTVITYKCEESFVKIPGEKDSVICLKGSQWSDIEEFCNRSCEVPTRLQKRTFSITKTNLPSEFKMVHSSRIL

SEQ ID NO: 43163 - DNA, 1323 bp, Artificial Sequence
  derived and/or modified sequence
atgaccgttgccagaccatccgtcccagccgctcttcctcttcttggggagctgccaaggcttctcctgctcgtgctgttgtgcttgcccgctgtctggggagactgcggtctcccaccagacgttccaaatgcccagcccgcgctcgagggtcggacatccttcccagaggacacagtgatcacctataagtgcgaggagagcttcgtgaagatccctggcgagaaagatagtgtaatttgcctgaaagggtcccagtggagcgatatcgaggagttctgcaacagatcttgcgaggtgccaaccaggctaaattcggcctctctgaagcagccctacataacacagaactacttcccggttggaaccgtggtggagtacgagtgccgtcccggctataggagagagccatccctctccccaaagcttacctgtttacagaacctgaagtggtctaccgccgttgagttctgcaaaaagaaatcttgtcctaaccctggcgagataaggaacggacagatcgatgtgcctggtggtattcttttcggcgccacaatcagtttcagttgcaataccggctataagctgttcgggtccacctcctcgttctgcctcatttctggcagctctgtgcagtggtcggatcctttgccagaatgccgtgaaatctactgccctgctccaccacaaatcgacaatgggattatacaaggggaaagagatcattacggttaccgccagagtgtgacctacgcctgtaataaaggtttcactatgattggggagcacagtatctactgtaccgtgaataacgacgaaggggagtggtctggtcccccccctgaatgtcgcggaaagagtctcacctccaaggtgccccctacagtccaaaagcccaccacagttaacgtacctactacggaggtgtcacctacgagccagaagacaaccaccaagaccacaactccgaacgctcaagctacacgatcaacacctgtgtcacgcaccacaaagcattttcacgagacaacgccaaacaagggatccggaacgaccagcggaactactagactgttgtcaggctctaggcctgtgacacaggctgggatgcgctggtgtgacaggtcaagcctacagagccgaacgcccggattcaagagaagcttccacttctcactgccatcctcctggtattatcgggcccacgtgtttcatgttgatcgcttcgcctgggatgcgtcaaaccatgggttggccgatttggctaaggaggaactacgacgaaaatatacccaggtctaccggttattcctggtatcctag

SEQ ID NO: 43164 - DNA, 1323 bp, Artificial Sequence
  derived and/or modified sequence
atgacagtggcccggcccagcgtgcctgctgccctgcccctgctgggggagctgccccggctgctgctgctggtgctgctgtgcctgcctgctgtgtggggagactgtggcctgcccccagatgtgcccaatgcccagcctgccctggagggccgcaccagcttcccagaagatactgtcatcacctacaagtgtgaggagagctttgtgaagatccctggagagaaggacagcgtcatctgcctgaagggcagccagtggagcgacatcgaggagttctgcaacagaagctgtgaggtgcccacccggctgaacagcgccagcctgaagcagccctacatcacccagaactacttccctgtgggcaccgtggtggagtatgagtgcaggcctggctaccgccgggagcccagcctgagccccaagctgacctgcctgcagaacctgaagtggagcacagctgtggagttctgcaagaagaagagctgccccaaccctggagagatcagaaatggccagattgatgtgcctgggggcatcctgtttggagccaccatctccttcagctgcaacacaggctacaagctgtttggcagcaccagcagcttctgcctgatcagcggcagctctgtgcagtggagcgaccccctgcctgaatgtcgggagatctactgcccagccccaccccagattgacaatggcatcatccagggcgagcgggaccactacggctaccggcagagcgtgacctacgcctgcaacaagggcttcaccatgattggagagcacagcatctactgcaccgtgaacaatgatgaaggagagtggagcggccccccacctgagtgccggggcaagagcctgaccagcaaggtgcccccaacagtgcagaagcccaccaccgtgaatgtgcccaccacagaggtgagccccaccagccagaagaccaccaccaagaccaccaccccaaatgcccaggccaccaggagcacccctgtgtccaggaccaccaagcacttccacgagaccacccccaacaagggcagcggcaccaccagcggcaccacccggctgctgagcggcagcaggcctgtgacccaggccggcatgcgctggtgtgacaggagcagcctgcagagcaggaccccaggcttcaagaggagcttccacttcagcctgcccagctcctggtactaccgggcccacgtgttccacgtggacagatttgcctgggatgccagcaaccacggcctggccgacctggccaaggaggagctgcggaggaagtacacccaggtgtaccgcctcttcctggtgtcctag

SEQ ID NO: 43165 - DNA, 1323 bp, Artificial Sequence
  derived and/or modified sequence
atgaccgtggcccggcccagcgtgcccgccgccctgcccctgctgggcgaactgccacgactcttgctgctcgtcctgctgtgccttcccgccgtatggggagattgtggattgccaccagacgtgcccaatgcccagccggccctcgagggcaggactagttttcctgaggataccgttataacctataaatgcgaagagtctttcgtcaagatccccggcgagaaggattccgtgatctgtctgaagggcagccagtggagcgacatcgaggaattttgcaataggtcatgtgaggtgcctacccgactcaattctgcctcgctgaaacagccctacattacccagaattactttccagtcgggactgtggttgaatatgagtgcaggccagggtacaggagagaaccttccctatctccaaaattaacatgtctccaaaatctaaagtggtcgactgccgtagaattttgtaagaaaaaatcatgcccgaacccaggcgagattcgaaatggccagattgacgtgcccggaggtattctctttggagccaccattagctttagttgtaacacaggctataaattattcggctcaacgtccagcttttgcctcataagcggcagctcggtgcagtggtctgatccactgcctgagtgcagggagatttactgcccagcccctccccagatcgacaacggaattatacagggcgagcgcgaccattacgggtaccggcagtccgtcacgtacgcctgcaacaaaggcttcactatgattggtgaacacagtatctactgcaccgtcaataacgacgagggcgagtggagcggccctcctccagagtgccggggtaagtcgctaacatctaaagtgccgcccacggttcagaagccgaccactgtcaatgtacctacgactgaggtctcgccaactagtcagaagacaactacaaagaccaccacccccaatgcgcaggctacccgcagcacgcctgtgagtcggacaactaaacacttccatgagaccacgccaaataaaggctcaggtaccacctctggaaccacacgcttgttatctggtagccgccccgtcactcaggcggggatgcgctggtgcgatcggagtagcctacaaagtcggactccgggatttaagcgctcattccattttagtctgccatcttcttggtactatcgggcacatgtctttcatgtggataggtttgcttgggatgctagtaaccacggactggctgatctcgctaaggaggagttaagaagaaagtatacccaagtgtaccggctgttcctggtatcttag

SEQ ID NO: 43166 - DNA, 1323 bp, Artificial Sequence
  derived and/or modified sequence
atgacagttgctcggcctagcgtacctgcggcactgccactcctcggagaactcccacgattgcttctgctggttctgttgtgtctccctgctgtttggggcgattgtggtcttcccccagacgtgcccaatgcacagcccgcactggagggaagaacaagttttcccgaggataccgtcatcacctataagtgtgaggaatccttcgtgaaaattccaggggagaaggactctgtcatttgcctgaagggtagtcagtggtcagacattgaggaattttgcaatagatcttgtgaagtaccgacaagactgaactcggcaagcctaaagcagccatacataacccagaattactttcctgtggggaccgtggtggaatacgaatgcaggccaggctacagacgcgagccatccctttcgcccaagctgacctgtctgcagaacctgaagtggtctacagcagtcgagttttgtaagaaaaaatcttgccctaatccaggagaaatcaggaacggccagatcgatgtgcccggagggattcttttcggcgcaaccatttccttcagctgcaataccggttacaagctgttcggatcgacttcttcattttgcctgatcagtggatcatccgttcagtggagcgatccactgccagagtgccgggagatttattgccccgcaccaccccagatagacaacggaatcatacaaggcgaacgggaccactacggttacagacagtcagtgacttacgcttgcaataaggggtttaccatgattggagagcactccatatactgtacggtgaataatgacgagggagagtggtcgggtccccctcctgaatgccgtggaaaatctcttacaagtaaggtccctcccacagtgcagaaacctaccacagtgaatgtccccaccacagaagtgtctccaacatcccaaaaaactaccactaaaactacaacacccaatgcccaagcgacccgcagtaccccagtctctaggacaacgaaacacttccacgaaaccacaccaaacaaggggagtggaaccacgagcgggaccacacgcctgctcagcggctcacgacccgtcacccaggccggaatgcgatggtgcgatagatcatccctgcaatctcgaacccctgggttcaagaggtcgttccatttttcattacccagtagctggtattacagagcgcacgtatttcatgtggacagattcgcctgggacgcaagtaaccatggtctggccgaccttgcaaaagaggagcttaggaggaaatatacacaggtgtaccgtctgtttctggtaagctag

SEQ ID NO: 43167 - DNA, 2220 bp, Artificial Sequence
  derived and/or modified sequence
ccgctgggcgtagctgcgactcggcggagtcccggcggcgcgtccttgttctaacccggcgcgccatgaccgtcgcgcggccgagcgtgcccgcggcgctgcccctcctcggggagctgccccggctgctgctgctggtgctgttgtgcctgccggccgtgtggggtgactgtggccttcccccagatgtacctaatgcccagccagctttggaaggccgtacaagttttcccgaggatactgtaataacgtacaaatgtgaagaaagctttgtgaaaattcctggcgagaaggactcagtgatctgccttaagggcagtcaatggtcagatattgaagagttctgcaatcgtagctgcgaggtgccaacaaggctaaattctgcatccctcaaacagccttatatcactcagaattattttccagtcggtactgttgtggaatatgagtgccgtccaggttacagaagagaaccttctctatcaccaaaactaacttgccttcagaatttaaaatggtccacagcagtcgaattttgtaaaaagaaatcatgccctaatccgggagaaatacgaaatggtcagattgatgtaccaggtggcatattatttggtgcaaccatctccttctcatgtaacacagggtacaaattatttggctcgacttctagtttttgtcttatttcaggcagctctgtccagtggagtgacccgttgccagagtgcagagaaatttattgtccagcaccaccacaaattgacaatggaataattcaaggggaacgtgaccattatggatatagacagtctgtaacgtatgcatgtaataaaggattcaccatgattggagagcactctatttattgtactgtgaataatgatgaaggagagtggagtggcccaccacctgaatgcagaggaaaatctctaacttccaaggtcccaccaacagttcagaaacctaccacagtaaatgttccaactacagaagtctcaccaacttctcagaaaaccaccacaaaaaccaccacaccaaatgctcaagcaacacggagtacacctgtttccaggacaaccaagcattttcatgaaacaaccccaaataaaggaagtggaaccacttcaggtactacccgtcttctatctggttctcgtcctgtcacccaggctggtatgcggtggtgtgatcgtagctcactgcagtctcgaactcctgggttcaagcgatccttccacttcagcctcccaagtagctggtactacagggcacacgtgtttcacgttgacaggtttgcttgggacgctagtaaccatgggcttgctgacttagccaaagaagagttaagaagaaaatacacacaagtatacagactgttcctagtttcttagacttatctgcatattggataaaataaatgcaattgtgctcttcatttaggatgctttcattgtctttaagatgtgttaggaatgtcaacagagcaaggagaaaaaaggcagtcctggaatcacattcttagcacacctacacctcttgaaaatagaacaacttgcagaattgagagtgattcctttcctaaaagtgtaagaaagcatagagatttgttcgtatttagaatgggatcacgaggaaaagagaaggaaagtgatttttttccacaagatctgtaatgttatttccacttataaaggaaataaaaaatgaaaaacattatttggatatcaaaagcaaataaaaacccaattcagtctcttctaagcaaaattgctaaagagagatgaaccacattataaagtaatctttggctgtaaggcattttcatctttccttcgggttggcaaaatattttaaaggtaaaacatgctggtgaaccaggggtgttgatggtgataagggaggaatatagaatgaaagactgaatcttcctttgttgcacaaatagagtttggaaaaagcctgtgaaaggtgtcttctttgacttaatgtctttaaaagtatccagagatactacaatattaacataagaaaagattatatattatttctgaatcgagatgtccatagtcaaatttgtaaatcttattcttttgtaatatttatttatatttatttatgacagtgaacattctgattttacatgtaaaacaagaaaagttgaagaagatatgtgaagaaaaatgtatttttcctaaatagaaataaatgatcccattttttggt

SEQ ID NO: 43168 - DNA, 1323 bp, Artificial Sequence
  derived and/or modified sequence
atgaccgtggccagacccagcgtgcccgccgccctgcccctgctgggcgagctgcccagactgctgctgctggtgctgctgtgcctgcccgccgtgtggggcgactgcggcctgccccccgacgtgcccaacgcccagcccgccctggagggcagaaccagcttccccgaggacaccgtgatcacctacaagtgcgaggagagcttcgtgaagatccccggcgagaaggacagcgtgatctgcctgaagggcagccagtggagcgacatcgaggagttctgcaacagaagctgcgaggtgcccaccagactgaacagcgccagcctgaagcagccctacatcacccagaactacttccccgtgggcaccgtggtggagtacgagtgcagacccggctacagaagagagcccagcctgagccccaagctgacctgcctgcagaacctgaagtggagcaccgccgtggagttctgcaagaagaagagctgccccaaccccggcgagatcagaaacggccagatcgacgtgcccggcggcatcctgttcggcgccaccatcagcttcagctgcaacaccggctacaagctgttcggcagcaccagcagcttctgcctgatcagcggcagcagcgtgcagtggagcgaccccctgcccgagtgcagagagatctactgccccgcccccccccagatcgacaacggcatcatccagggcgagagagaccactacggctacagacagagcgtgacctacgcctgcaacaagggcttcaccatgatcggcgagcacagcatctactgcaccgtgaacaacgacgagggcgagtggagcggccccccccccgagtgcagaggcaagagcctgaccagcaaggtgccccccaccgtgcagaagcccaccaccgtgaacgtgcccaccaccgaggtgagccccaccagccagaagaccaccaccaagaccaccacccccaacgcccaggccaccagaagcacccccgtgagcagaaccaccaagcacttccacgagaccacccccaacaagggcagcggcaccaccagcggcaccaccagactgctgagcggcagcagacccgtgacccaggccggcatgagatggtgcgacagaagcagcctgcagagcagaacccccggcttcaagagaagcttccacttcagcctgcccagcagctggtactacagagcccacgtgttccacgtggacagattcgcctgggacgccagcaaccacggcctggccgacctggccaaggaggagctgagaagaaagtacacccaggtgtacagactgttcctggtgagctag

SEQ ID NO: 43169 - protein, 658 aa, Artificial Sequence
  derived and/or modified sequence
MDRGTLPLAVALLLASCSLSPTSLAETVHCDLQPVGPERGEVTYTTSQVSKGCVAQAPNAILEVHVLFLEFPTGPSQLELTLQASKQNGTWPREVLLVLSVNSSVFLHLQALGIPLHLAYNSSLVTFQEPPGVNTTELPSFPKTQILEWAAERGPITSAAELNDPQSILLRLGQAQGSLSFCMLEASQDMGRTLEWRPRTPALVRGCHLEGVAGHKEAHILRVLPGHSAGPRTVTVKVELSCAPGDLDAVLILQGPPYVSWLIDANHNMQIWTTGEYSFKIFPEKNIRGFKLPDTPQGLLGEARMLNASIVASFVELPLASIVSLHASSCGGRLQTSPAPIQTTPPKDTCSPELLMSLIQTKCADDAMTLVLKKELVAHLKCTITGLTFWDPSCEAEDRGDKFVLRSAYSSCGMQVSASMISNEAVVNILSSSSPQRKKVHCLNMDSLSFQLGLYLSPHFLQASNTIEPGQQSFVQVRVSPSVSEFLLQLDSCHLDLGPEGGTVELIQGRAAKGNCVSLLSPSPEGDPRFSFLLHFYTVPIPKTGTLSCTVALRPKTGSQDQEVHRTVFMRLNIISPDLSGCTSKGLVLPAVLGITFGAFLIGALLTAALWYIYSHTRSPSKREPVVAVAAPASSESSSTNHSIGSTQSTPCSTSSMA

SEQ ID NO: 43170 - protein, 476 aa, Artificial Sequence
  derived and/or modified sequence
MLEASQDMGRTLEWRPRTPALVRGCHLEGVAGHKEAHILRVLPGHSAGPRTVTVKVELSCAPGDLDAVLILQGPPYVSWLIDANHNMQIWTTGEYSFKIFPEKNIRGFKLPDTPQGLLGEARMLNASIVASFVELPLASIVSLHASSCGGRLQTSPAPIQTTPPKDTCSPELLMSLIQTKCADDAMTLVLKKELVAHLKCTITGLTFWDPSCEAEDRGDKFVLRSAYSSCGMQVSASMISNEAVVNILSSSSPQRKKVHCLNMDSLSFQLGLYLSPHFLQASNTIEPGQQSFVQVRVSPSVSEFLLQLDSCHLDLGPEGGTVELIQGRAAKGNCVSLLSPSPEGDPRFSFLLHFYTVPIPKTGTLSCTVALRPKTGSQDQEVHRTVFMRLNIISPDLSGCTSKGLVLPAVLGITFGAFLIGALLTAALWYIYSHTRSPSKREPVVAVAAPASSESSSTNHSIGSTQSTPCSTSSMA

SEQ ID NO: 43171 - DNA, 1977 bp, Artificial Sequence
  derived and/or modified sequence
atggacagaggcaccctgcccctggccgtggccctgctgctggccagctgcagcctgagccccaccagcctggccgagaccgtgcactgcgacctgcagcccgtgggccccgagagaggcgaggtgacctacaccaccagccaggtgagcaagggctgcgtggcccaggcccccaacgccatcctggaggtgcacgtgctgttcctggagttccccaccggccccagccagctggagctgaccctgcaggccagcaagcagaacggcacctggcccagagaggtgctgctggtgctgagcgtgaacagcagcgtgttcctgcacctgcaggccctgggcatccccctgcacctggcctacaacagcagcctggtgaccttccaggagccccccggcgtgaacaccaccgagctgcccagcttccccaagacccagatcctggagtgggccgccgagagaggccccatcaccagcgccgccgagctgaacgacccccagagcatcctgctgagactgggccaggcccagggcagcctgagcttctgcatgctggaggccagccaggacatgggcagaaccctggagtggagacccagaacccccgccctggtgagaggctgccacctggagggcgtggccggccacaaggaggcccacatcctgagagtgctgcccggccacagcgccggccccagaaccgtgaccgtgaaggtggagctgagctgcgcccccggcgacctggacgccgtgctgatcctgcagggccccccctacgtgagctggctgatcgacgccaaccacaacatgcagatctggaccaccggcgagtacagcttcaagatcttccccgagaagaacatcagaggcttcaagctgcccgacaccccccagggcctgctgggcgaggccagaatgctgaacgccagcatcgtggccagcttcgtggagctgcccctggccagcatcgtgagcctgcacgccagcagctgcggcggcagactgcagaccagccccgcccccatccagaccaccccccccaaggacacctgcagccccgagctgctgatgagcctgatccagaccaagtgcgccgacgacgccatgaccctggtgctgaagaaggagctggtggcccacctgaagtgcaccatcaccggcctgaccttctgggaccccagctgcgaggccgaggacagaggcgacaagttcgtgctgagaagcgcctacagcagctgcggcatgcaggtgagcgccagcatgatcagcaacgaggccgtggtgaacatcctgagcagcagcagcccccagagaaagaaggtgcactgcctgaacatggacagcctgagcttccagctgggcctgtacctgagcccccacttcctgcaggccagcaacaccatcgagcccggccagcagagcttcgtgcaggtgagagtgagccccagcgtgagcgagttcctgctgcagctggacagctgccacctggacctgggccccgagggcggcaccgtggagctgatccagggcagagccgccaagggcaactgcgtgagcctgctgagccccagccccgagggcgaccccagattcagcttcctgctgcacttctacaccgtgcccatccccaagaccggcaccctgagctgcaccgtggccctgagacccaagaccggcagccaggaccaggaggtgcacagaaccgtgttcatgagactgaacatcatcagccccgacctgagcggctgcaccagcaagggcctggtgctgcccgccgtgctgggcatcaccttcggcgccttcctgatcggcgccctgctgaccgccgccctgtggtacatctacagccacaccagaagccccagcaagagagagcccgtggtggccgtggccgcccccgccagcagcgagagcagcagcaccaaccacagcatcggcagcacccagagcaccccctgcagcaccagcagcatggcctag

SEQ ID NO: 43172 - DNA, 1431 bp, Artificial Sequence
  derived and/or modified sequence
atgctggaggccagccaggacatgggcagaaccctggagtggagacccagaacccccgccctggtgagaggctgccacctggagggcgtggccggccacaaggaggcccacatcctgagagtgctgcccggccacagcgccggccccagaaccgtgaccgtgaaggtggagctgagctgcgcccccggcgacctggacgccgtgctgatcctgcagggccccccctacgtgagctggctgatcgacgccaaccacaacatgcagatctggaccaccggcgagtacagcttcaagatcttccccgagaagaacatcagaggcttcaagctgcccgacaccccccagggcctgctgggcgaggccagaatgctgaacgccagcatcgtggccagcttcgtggagctgcccctggccagcatcgtgagcctgcacgccagcagctgcggcggcagactgcagaccagccccgcccccatccagaccaccccccccaaggacacctgcagccccgagctgctgatgagcctgatccagaccaagtgcgccgacgacgccatgaccctggtgctgaagaaggagctggtggcccacctgaagtgcaccatcaccggcctgaccttctgggaccccagctgcgaggccgaggacagaggcgacaagttcgtgctgagaagcgcctacagcagctgcggcatgcaggtgagcgccagcatgatcagcaacgaggccgtggtgaacatcctgagcagcagcagcccccagagaaagaaggtgcactgcctgaacatggacagcctgagcttccagctgggcctgtacctgagcccccacttcctgcaggccagcaacaccatcgagcccggccagcagagcttcgtgcaggtgagagtgagccccagcgtgagcgagttcctgctgcagctggacagctgccacctggacctgggccccgagggcggcaccgtggagctgatccagggcagagccgccaagggcaactgcgtgagcctgctgagccccagccccgagggcgaccccagattcagcttcctgctgcacttctacaccgtgcccatccccaagaccggcaccctgagctgcaccgtggccctgagacccaagaccggcagccaggaccaggaggtgcacagaaccgtgttcatgagactgaacatcatcagccccgacctgagcggctgcaccagcaagggcctggtgctgcccgccgtgctgggcatcaccttcggcgccttcctgatcggcgccctgctgaccgccgccctgtggtacatctacagccacaccagaagccccagcaagagagagcccgtggtggccgtggccgcccccgccagcagcgagagcagcagcaccaaccacagcatcggcagcacccagagcaccccctgcagcaccagcagcatggcctag

SEQ ID NO: 43173 - DNA, 3048 bp, Artificial Sequence
  derived and/or modified sequence
ggcaggcggcctggcccagccccttctctaaggaagcgcatttcctgcctccctgggccggccgggctggatgagccaggagctccctgctgccggtcataccacagccttcatctgcgccctggggccaggactgctgctgtcactgccatccattggagcccagcaccccctccccgcccatccttcggacagcaactccagcccagccccgcgtccctgtgtccacttctcctgacccctcggccgccaccccagaaggctggagcagggacgccgtcgctccggccgcctgctcccctcgggtccccgtgcgagcccacgccggccccggtgcccgcccgcagccctgccactggacacaggataaggcccagcgcacaggcccccacgtggacagcatggaccgcggcacgctccctctggctgttgccctgctgctggccagctgcagcctcagccccacaagtcttgcagaaacagtccattgtgaccttcagcctgtgggccccgagaggggcgaggtgacatataccactagccaggtctcgaagggctgcgtggctcaggcccccaatgccatccttgaagtccatgtcctcttcctggagttcccaacgggcccgtcacagctggagctgactctccaggcatccaagcaaaatggcacctggccccgagaggtgcttctggtcctcagtgtaaacagcagtgtcttcctgcatctccaggccctgggaatcccactgcacttggcctacaattccagcctggtcaccttccaagagcccccgggggtcaacaccacagagctgccatccttccccaagacccagatccttgagtgggcagctgagaggggccccatcacctctgctgctgagctgaatgacccccagagcatcctcctccgactgggccaagcccaggggtcactgtccttctgcatgctggaagccagccaggacatgggccgcacgctcgagtggcggccgcgtactccagccttggtccggggctgccacttggaaggcgtggccggccacaaggaggcgcacatcctgagggtcctgccgggccactcggccgggccccggacggtgacggtgaaggtggaactgagctgcgcacccggggatctcgatgccgtcctcatcctgcagggtcccccctacgtgtcctggctcatcgacgccaaccacaacatgcagatctggaccactggagaatactccttcaagatctttccagagaaaaacattcgtggcttcaagctcccagacacacctcaaggcctcctgggggaggcccggatgctcaatgccagcattgtggcatccttcgtggagctaccgctggccagcattgtctcacttcatgcctccagctgcggtggtaggctgcagacctcacccgcaccgatccagaccactcctcccaaggacacttgtagcccggagctgctcatgtccttgatccagacaaagtgtgccgacgacgccatgaccctggtactaaagaaagagcttgttgcgcatttgaagtgcaccatcacgggcctgaccttctgggaccccagctgtgaggcagaggacaggggtgacaagtttgtcttgcgcagtgcttactccagctgtggcatgcaggtgtcagcaagtatgatcagcaatgaggcggtggtcaatatcctgtcgagctcatcaccacagcggaaaaaggtgcactgcctcaacatggacagcctctctttccagctgggcctctacctcagcccacacttcctccaggcctccaacaccatcgagccggggcagcagagctttgtgcaggtcagagtgtccccatccgtctccgagttcctgctccagttagacagctgccacctggacttggggcctgagggaggcaccgtggaactcatccagggccgggcggccaagggcaactgtgtgagcctgctgtccccaagccccgagggtgacccgcgcttcagcttcctcctccacttctacacagtacccatacccaaaaccggcaccctcagctgcacggtagccctgcgtcccaagaccgggtctcaagaccaggaagtccataggactgtcttcatgcgcttgaacatcatcagccctgacctgtctggttgcacaagcaaaggcctcgtcctgcccgccgtgctgggcatcacctttggtgccttcctcatcggggccctgctcactgctgcactctggtacatctactcgcacacgcgttcccccagcaagcgggagcccgtggtggcggtggctgccccggcctcctcggagagcagcagcaccaaccacagcatcgggagcacccagagcaccccctgctccaccagcagcatggcatagccccggccccccgcgctcgcccagcaggagagactgagcagccgccagctgggagcactggtgtgaactcaccctgggagccagtcctccactcgacccagaatggagcctgctctccgcgcctacccttcccgcctccctctcagaggcctgctgccagtgcagccactggcttggaacaccttggggtccctccaccccacagaaccttcaacccagtgggtctgggatatggctgcccaggagacagaccacttgccacgctgttgtaaaaacccaagtccctgtcatttgaacctggatccagcactggtgaactgagctgggcaggaagggagaacttgaaacagattcaggccagcccagccaggccaacagcacctccccgctgggaagagaagagggcccagcccagagccacctggatctatccctgcggcctccacacctgaacttgcctaactaactggcaggggagacaggagcctagcggagcccagcctgggagcccagagggtggcaagaacagtgggcgttgggagcctagctcctgccacatggagccccctctgccggtcgggcagccagcagagggggagtagccaagctgcttgtcctgggcctgcccctgtgtattcaccaccaataaatcagaccatgaaaccagtga

SEQ ID NO: 43174 - DNA, 2654 bp, Artificial Sequence
  derived and/or modified sequence
accacagccttcatctgcgccctggggccaggactgctgctgtcactgccatccattggagcccagcaccccctccccgcccatccttcggacagcaactccagcccagccccgcgtccctgtgtccacttctcctgacccctcggccgccaccccagaaggctggagcagggacgccgtcgctccggccgcctgctcccctcgggtccccgtgcgagcccacgccggccccggtgcccgcccgcagccctgccactggacacaggataaggcccagcgcacaggcccccacgtggacagcatggaccgcggcacgctccctctggctgttgccctgctgctggccagctgcagcctcagccccacaagtcttgcagaaacagtccattgtgaccttcagcctgtgggccccgagaggggcgaggtgacatataccactagccaggtctcgaagggctgcgtggctcaggcccccaatgccatccttgaagtccatgtcctcttcctggagttcccaacgggcccgtcacagctggagctgactctccaggcatccaagcaaaatggcacctggccccgagaggtgcttctggtcctcagtgtaaacagcagtgtcttcctgcatctccaggccctgggaatcccactgcacttggcctacaattccagcctggtcaccttccaagagcccccgggggtcaacaccacagagctgccatccttccccaagacccagatccttgagtgggcagctgagaggggccccatcacctctgctgctgagctgaatgacccccagagcatcctcctccgactgggccaagcccaggggtcactgtccttctgcatgctggaagccagccaggacatgggccgcacgctcgagtggcggccgcgtactccagccttggtccggggctgccacttggaaggcgtggccggccacaaggaggcgcacatcctgagggtcctgccgggccactcggccgggccccggacggtgacggtgaaggtggaactgagctgcgcacccggggatctcgatgccgtcctcatcctgcagggtcccccctacgtgtcctggctcatcgacgccaaccacaacatgcagatctggaccactggagaatactccttcaagatctttccagagaaaaacattcgtggcttcaagctcccagacacacctcaaggcctcctgggggaggcccggatgctcaatgccagcattgtggcatccttcgtggagctaccgctggccagcattgtctcacttcatgcctccagctgcggtggtaggctgcagacctcacccgcaccgatccagaccactcctcccaaggacacttgtagcccggagctgctcatgtccttgatccagacaaagtgtgccgacgacgccatgaccctggtactaaagaaagagcttgttgcgcatttgaagtgcaccatcacgggcctgaccttctgggaccccagctgtgaggcagaggacaggggtgacaagtttgtcttgcgcagtgcttactccagctgtggcatgcaggtgtcagcaagtatgatcagcaatgaggcggtggtcaatatcctgtcgagctcatcaccacagcggaaaaaggtgcactgcctcaacatggacagcctctctttccagctgggcctctacctcagcccacacttcctccaggcctccaacaccatcgagccggggcagcagagctttgtgcaggtcagagtgtccccatccgtctccgagttcctgctccagttagacagctgccacctggacttggggcctgagggaggcaccgtggaactcatccagggccgggcggccaagggcaactgtgtgagcctgctgtccccaagccccgagggtgacccgcgcttcagcttcctcctccacttctacacagtacccatacccaaaaccggcaccctcagctgcacggtagccctgcgtcccaagaccgggtctcaagaccaggaagtccataggactgtcttcatgcgcttgaacatcatcagccctgacctgtctggttgcacaagcaaaggcctcgtcctgcccgccgtgctgggcatcacctttggtgccttcctcatcggggccctgctcactgctgcactctggtacatctactcgcacacgcgttcccccagcaagcgggagcccgtggtggcggtggctgccccggcctcctcggagagcagcagcaccaaccacagcatcgggagcacccagagcaccccctgctccaccagcagcatggcatagccccggccccccgcgctcgcccagcaggagagactgagcagccgccagctgggagcactggtgtgaactcaccctgggagccagtcctccactctcagaggcctgctgccagtgcagccactggcttggaacaccttggggtccctccaccccacagaaccttcaacccagtgggtctgggatatggctgcccaggagacagaccacttgccacgctgttgtaaaaacccaagtccctgtcatttgaacctggatccagcactggtgaactgagctgggcaggaagggagaacttgaaacagattcaggccagcccagccaggccaacagcacctccccgctgggaagagaagagggcccagcccagagccacctg

SEQ ID NO: 43175 - DNA, 2149 bp, Artificial Sequence
  derived and/or modified sequence
aaggctgctgtgaggatcaaatgagttcactcgtgtaaagctgcctaggctcccagtaagcatgatgggagcatctgcagtgattattggtggtctgcaaatggggaaactgaggctcagagaggttaggcttctgctcaaggtgaccagcattttaagaggcagagctgggatttgatccaggccatctggctccagagctgtttttcttgatcatcctccaaggtcttgcagaaacagtccattgtgaccttcagcctgtgggccccgagaggggcgaggtgacatataccactagccaggtctcgaagggctgcgtggctcaggcccccaatgccatccttgaagtccatgtcctcttcctggagttcccaacgggcccgtcacagctggagctgactctccaggcatccaagcaaaatggcacctggccccgagaggtgcttctggtcctcagtgtaaacagcagtgtcttcctgcatctccaggccctgggaatcccactgcacttggcctacaattccagcctggtcaccttccaagagcccccgggggtcaacaccacagagctgccatccttccccaagacccagatccttgagtgggcagctgagaggggccccatcacctctgctgctgagctgaatgacccccagagcatcctcctccgactgggccaagcccaggggtcactgtccttctgcatgctggaagccagccaggacatgggccgcacgctcgagtggcggccgcgtactccagccttggtccggggctgccacttggaaggcgtggccggccacaaggaggcgcacatcctgagggtcctgccgggccactcggccgggccccggacggtgacggtgaaggtggaactgagctgcgcacccggggatctcgatgccgtcctcatcctgcagggtcccccctacgtgtcctggctcatcgacgccaaccacaacatgcagatctggaccactggagaatactccttcaagatctttccagagaaaaacattcgtggcttcaagctcccagacacacctcaaggcctcctgggggaggcccggatgctcaatgccagcattgtggcatccttcgtggagctaccgctggccagcattgtctcacttcatgcctccagctgcggtggtaggctgcagacctcacccgcaccgatccagaccactcctcccaaggacacttgtagcccggagctgctcatgtccttgatccagacaaagtgtgccgacgacgccatgaccctggtactaaagaaagagcttgttgcgcatttgaagtgcaccatcacgggcctgaccttctgggaccccagctgtgaggcagaggacaggggtgacaagtttgtcttgcgcagtgcttactccagctgtggcatgcaggtgtcagcaagtatgatcagcaatgaggcggtggtcaatatcctgtcgagctcatcaccacagcggaaaaaggtgcactgcctcaacatggacagcctctctttccagctgggcctctacctcagcccacacttcctccaggcctccaacaccatcgagccggggcagcagagctttgtgcaggtcagagtgtccccatccgtctccgagttcctgctccagttagacagctgccacctggacttggggcctgagggaggcaccgtggaactcatccagggccgggcggccaagggcaactgtgtgagcctgctgtccccaagccccgagggtgacccgcgcttcagcttcctcctccacttctacacagtacccatacccaaaaccggcaccctcagctgcacggtagccctgcgtcccaagaccgggtctcaagaccaggaagtccataggactgtcttcatgcgcttgaacatcatcagccctgacctgtctggttgcacaagcaaaggcctcgtcctgcccgccgtgctgggcatcacctttggtgccttcctcatcggggccctgctcactgctgcactctggtacatctactcgcacacgcgttcccccagcaagcgggagcccgtggtggcggtggctgccccggcctcctcggagagcagcagcaccaaccacagcatcgggagcacccagagcaccccctgctccaccagcagcatggcatagccccggccccccgc

SEQ ID NO: 43176 - DNA, 1977 bp, Artificial Sequence
  derived and/or modified sequence
atggataggggaaccttacctttggccgttgctctgcttctcgcttcctgttcgctttcccccacctctctggccgagactgtccattgcgacttgcagcccgtaggacctgaaaggggggaggtcacgtataccacttctcaggtgagcaaaggctgtgtggcgcaagctccgaatgccatactcgaggtgcacgtgctgttcctggagttcccaacagggccatctcagctagagctgactttgcaggcctctaagcaaaacggcacgtggccaagagaggtgctcttagtgttaagcgtgaacagctccgtatttctccacctgcaagctctaggaattcctctccatctggcatacaatagttctctggtcaccttccaggagcctccgggggtgaataccactgaactgccgtcttttcctaagacccaaatcctggagtgggccgccgagaggggccccatcacgagcgctgcggagctaaacgatccccagtcaattctgctgcggctgggccaggcccaaggaagcctgtctttctgcatgctggaggccagtcaggatatgggaagaaccttagagtggcgtccgagaactcccgcactggtgcgcgggtgccacctggagggggtagccggccataaggaagctcacatcctgagagtgctcccgggacactccgctgggccaaggacggtgacagtgaaggtggagttgtcctgcgcccctggcgatctcgacgccgtcctcatcctacagggccccccctatgtcagctggctaatagatgcaaaccataacatgcaaatctggaccaccggagaatactccttcaaaatcttccccgaaaaaaacatccgcgggttcaagctgcctgacacccctcagggcttgctcggcgaggctcggatgctaaatgccagcatagttgcttcctttgtggagctgccattagcaagcatcgtgagcttacacgcctcctcatgtgggggccgactgcagacatcgccagctccaatccaaaccacccctcctaaggatacctgtagccccgagctactgatgtcccttatacaaaccaagtgtgcagacgatgctatgaccctggtgctcaaaaaggagctggtggctcatctgaagtgtaccatcaccggactcactttttgggatccgtcgtgtgaggccgaggaccgcggagataaattcgtcctacgttccgcttatagctcctgtggaatgcaggtctcagcttccatgattagtaatgaggctgtcgtgaacatactttctagtagctctccccagcggaaaaaagtgcattgcctgaatatggactcactctcctttcagttagggctgtatctttcacctcattttcttcaggcctcaaatacaattgagcctgggcaacagagttttgtccaagtgagggtttccccatccgtgagtgagttcctcttgcagctcgatagctgtcacttagatctgggcccagaaggtggcacagtggaactgattcagggacgggctgctaaagggaattgtgtgtcactattatcaccctcgcctgaaggagaccctagatttagtttcttgctccacttctatacagtcccaattccgaaaacgggtactctcagctgcactgtcgcactcaggcctaagaccggttcacaggaccaggaagtccatcggacagtatttatgcggctaaatatcatatccccagatttgtcagggtgcacaagcaaggggctcgtgctgccagccgtgctgggcatcaccttcggcgccttcctaattggcgcattgctgacagcagccctgtggtatatttactcccacacccggagcccctcaaagcgggagccagtggtcgctgtggctgccccggcctcttctgagagctccagtactaaccactctattgggtctactcagagtactccatgcagcacctcctcgatggcatag

SEQ ID NO: 43177 - DNA, 1977 bp, Artificial Sequence
  derived and/or modified sequence
atggacaggggcaccttacccctcgccgttgcattattactggcaagctgttctttgagcccaacgtccctcgccgaaactgtgcactgcgatttgcagccagtcggccccgagcggggcgaggtgacgtacacaacttcgcaggtttccaaggggtgtgtagcccaggcccctaatgcaatcttagaggtgcacgtcttatttctcgaattccctacaggtccttcccagctggagctgacattacaggcgtccaaacagaacgggacgtggcctagagaggtactgctagtgctctccgtgaattcaagcgttttcctgcacttgcaggctcttggcattcccttacacctagcttataatagtagcctcgtgacatttcaagaacctcccggtgtgaatactactgaactgccatcgtttcccaagacacagatcctggagtgggctgcggagaggggtcctataacttcagccgccgagctgaatgatcctcagtcaattttattgcggctggggcaggcccaaggcagtctgtcattttgcatgctggaggctagccaagacatgggccgaaccctggaatggcgtcctcgcacaccagcgttagtacgaggttgccacctcgaaggcgtggcaggtcataaggaggcccacatactcagagtcttaccaggccatagtgcaggccccagaacggtgactgtcaaggtcgaattgagctgtgctcctggggacctcgatgcagtcctaatcctgcagggccctccttacgtgagttggctgatagatgctaatcacaatatgcagatctggaccaccggggaatacagcttcaagatcttcccagaaaaaaatattcgggggttcaagttgcccgacactccccagggactgctaggagaagcacggatgctgaacgcctctattgttgcgtcattcgtcgagctgccccttgcgagcatcgtatctctccacgctagtagctgcggggggcgcctgcagacaagtccagccccaattcagacaacacctcccaaagacacatgctctccagagttattgatgtcactcattcagacaaaatgcgctgatgacgctatgacacttgtcctaaaaaaagagctcgtcgctcatctgaagtgcacaatcaccggcctgaccttctgggatccctcctgcgaggctgaggataggggagacaaatttgtcttgagatcagcatactcaagctgcggaatgcaggtgagcgcatcaatgataagcaatgaggccgtggttaacatcctcagtagtagctcccctcagaggaagaaggtccactgtctcaacatggattcgcttagtttccaactcggactgtatctgtcaccccactttctgcaagccagcaatacaatcgaacccggccaacagtcctttgtccaggtcagggtttccccaagcgtatcagaattcctgttgcagttggactcctgccacctggacctggggccggagggcggcacagtagaactaatccaaggcagggccgcaaagggaaattgcgtctctctgctgtcaccttctccggaaggggatcctagattttctttcctgctgcacttctataccgtgccaatacctaagacaggaactcttagctgtactgtggcgctgagacccaagaccggcagccaggatcaagaggttcaccgcacagtgttcatgcggttgaatatcatttctccagatttgagcggctgcacatcaaaaggtctggtccttcctgcggtgctggggataacttttggcgccttcctcattggcgccctgctgactgccgccctgtggtatatctattcacacactcgctcacccagtaagcgtgaaccagttgtggcagtggcagcacctgccagtagcgaaagctcttctacaaatcactccattggttccactcagtcaaccccctgtagcacttccagcatggcgtag

SEQ ID NO: 43178 - DNA, 1431 bp, Artificial Sequence
  derived and/or modified sequence
atgcttgaggctagccaggacatgggcaggactctagagtggcgcccacgcacccctgcccttgtccgcgggtgccaccttgagggtgtggctggccataaagaggcacacattctgcgcgtccttccagggcactccgccggcccacgcaccgtaaccgtcaaggttgaactgtcctgtgcccccggggatctcgacgccgtgcttatcctccagggccctccttatgtatcctggttgatcgatgctaaccataacatgcagatctggacaaccggggaatactcctttaaaatctttccggagaagaatattagggggtttaagctgcccgataccccccagggtctcctgggcgaggcgagaatgctcaacgcttcaattgtggcctcgttcgtcgaattgcccctcgcttccatagtcagcctgcacgccagctcttgtggtggacggctccagacttcgccagccccaatccagacaactccgccgaaagacacttgttcacccgagctacttatgtcgttgattcagacaaagtgcgcagacgacgccatgacactggtcctaaaaaaagagctggtggcccatttaaagtgcacaatcactgggctgaccttctgggaccctagttgcgaggccgaagacaggggcgataagttcgtgctgcgtagcgcctactcgagctgtgggatgcaggtctccgcctctatgatctctaacgaggctgtcgttaacatcctttctagttcatctccccagcgcaagaaggtccattgcctgaatatggattcccttagcttccaactgggcctgtacctttccccacatttcttgcaggcatcaaataccattgaaccagggcagcaaagcttcgtgcaggtgagggtgtcgcctagtgtgagcgaattcctcctgcagctggatagctgtcatctggacctgggcccagagggtggcactgtggaactcattcagggccgcgccgcgaagggtaactgcgtgagcctgctgtcaccctcaccagaaggggacccacgtttttccttcctcctgcatttttacaccgtcccaattcctaagaccggcacactgagttgcaccgtggcactgagacctaagacaggctcgcaggaccaggaagtacataggacagtctttatgaggttaaatatcattagtcccgatctgagcggatgcacctccaaagggctggtccttccagccgtgctagggatcaccttcggcgcctttttgatcggagcgctgctgaccgctgccctgtggtacatatacagtcacacccgctctcccagcaagagagagcctgtggtcgctgttgcagcccccgcatcctcggaatccagctcgaccaaccactcgataggttcaacccagagtactccctgctctacttccagcatggcctag

SEQ ID NO: 43179 - DNA, 1977 bp, Artificial Sequence
  derived and/or modified sequence
atggaccggggcaccctgcccctggccgtggccctgctgctggccagctgcagcctgagccccaccagcctggccgagaccgtgcactgtgacctgcagcctgtgggccctgagcggggggaggtgacctacaccaccagccaggtgtccaagggctgtgtggcccaggccccaaatgccatcctggaggtgcacgtgctcttcctggagttccccaccggccccagccagctggagctgaccctgcaggccagcaagcagaatggcacctggccccgggaggtgctgctggtgctgtctgtgaacagcagcgtcttcctgcacctgcaggccctgggcatccccctgcacctggcctacaacagcagcctggtgaccttccaggagcccccaggagtgaacaccacagagctgcccagcttccccaagacccagatcctggagtgggccgctgagcggggccccatcaccagcgctgctgagctgaatgacccccagagcatcctgctgcggctgggccaggcccagggcagcctgtccttctgcatgctggaggccagccaggacatgggccgcaccctggagtggaggcccaggaccccagccctggtgcggggctgccacctggagggcgtggccggccacaaggaggcccacatcctgcgggtgctgcccggccacagcgctggccccaggacagtgacagtgaaggtggagctgagctgtgcccctggggacctggatgctgtgctgatcctgcagggccccccctacgtgtcctggctgattgatgccaaccacaacatgcagatctggaccaccggggagtacagcttcaagatcttccctgagaagaacatccggggcttcaagctgcctgacaccccccagggcctgctgggggaggccaggatgctgaatgccagcatcgtggccagctttgtggagctgcccctggccagcatcgtgtccctgcacgccagcagctgtggcggccgcctgcagaccagccctgcccccatccagaccaccccacccaaggacacctgcagccctgagctgctgatgagcctcatccagaccaagtgtgctgatgatgccatgaccctggtgctgaagaaggagctggtggcccacctgaagtgcaccatcaccggcctgaccttctgggaccccagctgtgaggctgaagatagaggagacaagtttgtgctgcggagcgcctacagcagctgtggcatgcaggtgtctgcctccatgatcagcaatgaagctgtggtgaacatcctgagcagcagcagcccccagaggaagaaggtgcactgcctgaacatggacagcctgtccttccagctgggcctgtacctgagcccccacttcctgcaggccagcaacaccatcgagcccggccagcagagctttgtgcaggtgcgggtgagccccagcgtgtctgagttcctgctgcagctggacagctgccacctggacctgggccctgagggcggcaccgtggagctgatccagggccgggccgccaagggcaactgtgtgtccctgctgagccccagccctgagggggacccccgcttctccttcctgctgcacttctacacagtgcccatccccaagacaggcaccctgagctgcaccgtggccctgcggcccaagacaggcagccaggaccaggaggtgcacaggacagtgttcatgaggctgaacatcatcagcccagacctgagcggctgcaccagcaagggcctggtgctgcctgctgtgctgggcatcacctttggagccttcctgattggagccctgctgacagctgccctgtggtacatctacagccacaccaggagccccagcaagcgggagcctgtggtggccgtggccgccccagccagcagcgagagcagcagcaccaaccacagcatcggcagcacccagagcaccccctgcagcaccagctccatggcctag

SEQ ID NO: 43180 - DNA, 1431 bp, Artificial Sequence
  derived and/or modified sequence
atgctggaggccagccaggacatgggccgcaccctggagtggaggcccaggaccccagccctggtgcggggctgccacctggagggcgtggccggccacaaggaggcccacatcctgcgggtgctgcccggccacagcgctggccccaggacagtgacagtgaaggtggagctgagctgtgcccctggggacctggatgctgtgctgatcctgcagggccccccctacgtgtcctggctgattgatgccaaccacaacatgcagatctggaccaccggggagtacagcttcaagatcttccctgagaagaacatccggggcttcaagctgcctgacaccccccagggcctgctgggggaggccaggatgctgaatgccagcatcgtggccagctttgtggagctgcccctggccagcatcgtgtccctgcacgccagcagctgtggcggccgcctgcagaccagccctgcccccatccagaccaccccacccaaggacacctgcagccctgagctgctgatgagcctcatccagaccaagtgtgctgatgatgccatgaccctggtgctgaagaaggagctggtggcccacctgaagtgcaccatcaccggcctgaccttctgggaccccagctgtgaggctgaagatagaggagacaagtttgtgctgcggagcgcctacagcagctgtggcatgcaggtgtctgcctccatgatcagcaatgaagctgtggtgaacatcctgagcagcagcagcccccagaggaagaaggtgcactgcctgaacatggacagcctgtccttccagctgggcctgtacctgagcccccacttcctgcaggccagcaacaccatcgagcccggccagcagagctttgtgcaggtgcgggtgagccccagcgtgtctgagttcctgctgcagctggacagctgccacctggacctgggccctgagggcggcaccgtggagctgatccagggccgggccgccaagggcaactgtgtgtccctgctgagccccagccctgagggggacccccgcttctccttcctgctgcacttctacacagtgcccatccccaagacaggcaccctgagctgcaccgtggccctgcggcccaagacaggcagccaggaccaggaggtgcacaggacagtgttcatgaggctgaacatcatcagcccagacctgagcggctgcaccagcaagggcctggtgctgcctgctgtgctgggcatcacctttggagccttcctgattggagccctgctgacagctgccctgtggtacatctacagccacaccaggagccccagcaagcgggagcctgtggtggccgtggccgccccagccagcagcgagagcagcagcaccaaccacagcatcggcagcacccagagcaccccctgcagcaccagctccatggcctag

SEQ ID NO: 43181 - DNA, 1977 bp, Artificial Sequence
  derived and/or modified sequence
atggaccggggcaccctgcccctggccgtggccctgctgctggcctcttgtagcctctcacctacgtccctcgccgagactgtgcactgtgacctgcagccagtgggccctgagagaggagaggtcacttacaccacaagtcaggtctcaaagggctgtgtggcccaggccccaaacgctatcctggaagttcacgtgctctttcttgagtttcctacgggcccaagtcagttagagctgactctgcaggcttctaaacagaatgggacatggcctagggaggtgcttctcgtacttagcgtgaacagctcggtttttttgcatttacaagcccttggaatacctctccatcttgcttataattcttctctggtaacatttcaggagcccccgggtgtgaacacaaccgaattaccaagttttccaaaaacccagattctcgaatgggccgctgaacgcggtccaattaccagcgcggctgagttgaatgatccacagtccattttgctcagactggggcaagctcaggggtctttatctttttgcatgctggaggcaagccaggacatgggtaggactctggagtggaggccaagaactcccgcccttgtgcgtggttgccacttagagggggttgcagggcacaaggaggctcatatccttcgcgtgttgcctggtcacagcgccggtccacggacagttactgttaaggttgaactcagctgcgctcccggtgatctggatgccgtcctgatcctgcaggggcccccttatgtgtcatggctcatcgacgccaaccacaatatgcagatatggacaactggcgaatatagcttcaaaatctttcctgaaaaaaatattcgggggtttaaattgccagatacgccacagggcctgctgggggaggcccggatgctgaatgcttctattgttgcttctttcgttgaacttccgctggccagtatagtgtcactgcatgcatcttcatgcggtgggcggctccagacaagtccagcccccattcagaccacacctccgaaggacacgtgtagccctgagcttctgatgtccctcatccagaccaaatgcgccgacgatgccatgaccctagtcctgaaaaaggaattggtggcacaccttaagtgtacaattacagggctgactttctgggatccgtcttgcgaggccgaagaccgaggcgacaagtttgtacttcgttcagcgtactcctcctgtggcatgcaggtcagtgcatccatgatttcaaatgaagcagtggtgaatatcttgtcaagttctagtcctcaacggaaaaaagtgcactgtctcaatatggatagtttgagctttcagctgggactctacctgtctccgcattttttgcaggcatccaatacaatcgagcccggccagcagtcctttgttcaggtacgggtttctccgagcgtgtccgagtttcttttgcagctcgattcatgtcacttggatcttggccccgaagggggcaccgtcgagcttatccagggccgagctgccaaaggaaattgtgtctcactgttgtctccctcgcccgaaggggatccccgattctccttcctgcttcatttttatacagttccaatccccaagaccggtacgttgagctgtacggttgctttaagacccaagaccgggagtcaggatcaagaggtacatcgaaccgttttcatgaggctgaatatcattagcccagacctgagcgggtgcacctcaaagggcctggtattgcccgcagtgctggggattacctttggagcatttctgatcggcgcccttctgactgcagcactgtggtacatttactcccacacacgaagtccctccaagcgggagcccgtggttgccgtggccgcacctgccagtagcgagtccagttcaactaaccattctataggatctactcagtccaccccctgttcaacttcaagcatggcatag

SEQ ID NO: 43182 - DNA, 1977 bp, Artificial Sequence
  derived and/or modified sequence
atggaccggggcaccctgcccctggccgtggccctgctgctggcctcttgctccctgtctcccacctctctcgcagagacggttcactgcgacctccaacctgtgggccccgagagaggggaggtcacctacacaacctcgcaagtctccaagggttgcgttgcacaggcccctaacgccatcctggaagttcacgtgctattcctggagtttcctacaggaccttctcagctagaactgactttacaagccagtaagcaaaacggcacatggcctcgggaggttcttcttgtgctcagtgtgaactcatctgtgttcttacaccttcaagccctgggcatacccctccacctggcgtacaattcttctctggtcacttttcaagaaccccccggtgtcaatacaaccgaactgccaagcttccctaagacccaaatactcgagtgggccgccgagcgagggcctataacctcagcagctgagctcaatgatcctcagtccatactgctgcgcctggggcaggcccagggcagtctctctttctgcatgttagaagctagccaagatatgggacggaccttggagtggcggcctagaacaccggcgcttgtgcgaggatgccatcttgagggagtggcaggccataaagaagctcacatcttgagagtgctccctggtcactctgcgggtcccaggaccgtcaccgtgaaagtcgagctctcctgtgcccccggagatcttgatgccgtacttattcttcagggccctccatacgtttcctggctgatcgacgccaatcataatatgcaaatatggacgactggcgaatacagttttaagatctttcccgaaaaaaacataagaggcttcaagctgcctgacactccacagggactcttaggcgaggcccgcatgctgaatgccagtatcgtggcgagttttgtggagcttcctctggcctctattgtctctctacacgcaagctcatgtgggggaagattacagacatcaccagcaccaatccagaccacaccccctaaggatacgtgttctcctgagctcctgatgtccctcatacaaactaaatgcgccgatgacgcaatgaccctggtgcttaaaaaagagcttgtcgcccacctgaaatgcaccatcactggacttaccttttgggatcccagctgcgaagctgaggatagaggggacaaatttgttcttcggtccgcttacagcagctgtggaatgcaggtgagtgcctcaatgatctccaacgaagccgttgtgaacatcctgtcttcatcgtcgccccagcggaaaaaagtccattgtctgaatatggattccctgagcttccaactggggttgtatttatctccgcactttttgcaggcttccaacactatcgagcccggtcagcagtcgttcgttcaggtcagagtctcccctagtgtttcagagtttctattgcagctcgatagctgtcacttggatctgggccctgagggtggcaccgtggaacttatacaagggagggccgcaaaaggcaactgtgtgagcctactttcccctagtccagagggggacccgcggttcagtttcttgctgcacttttatacagtgccaatccctaaaaccggaaccctgtcatgtactgtggcccttaggccgaaaaccggatcacaggatcaggaggtccaccgtactgtttttatgcggcttaacataatcagccccgacctctcaggttgcacctccaaaggcctagtgttgccagccgtgctggggatcacctttggtgctttccttattggcgctctgctgaccgccgccctgtggtatatctatagtcacactaggtcgccgagcaagcgcgagcctgttgtcgccgtggcggccccggcgtcgtcagagagcagctccacaaatcatagcatcggatctactcagtccactccgtgtagtacgagttcaatggcttag

SEQ ID NO: 43183 - DNA, 1431 bp, Artificial Sequence
  derived and/or modified sequence
atgctggaggccagccaggacatgggccggaccctggagtggcggcctcgaactcctgcactggtacgggggtgtcatctggaaggcgtggcgggacataaagaggctcacattctccgcgttctccctggccattccgcaggccccaggaccgtaaccgttaaggtggaactctcatgcgcccccggcgatctagacgcggtcctgatcctccagggcccaccctacgtcagctggctgattgacgcaaatcataacatgcagatttggaccaccggggaatactctttcaaaatttttcccgagaaaaatatacggggattcaaactccctgatactccacagggactcctgggagaggcccggatgctcaatgctagcattgttgccagctttgtggagctcccactggcttccatagtttcactgcacgcctccagctgcggaggtcgtctgcagaccagccccgcccccatccagactactcccccgaaggacacttgttctcctgagctcctgatgtccctgatccagacaaaatgcgcagatgacgccatgaccctggtgttaaaaaaagaactggttgcccacctgaagtgcacaattacaggtctgacattctgggaccccagctgcgaggctgaggacaggggagacaagttcgtgctgcggtctgcatacagctcttgtggaatgcaggtgtctgctagcatgatctccaatgaagccgtcgtcaacattttgtccagctcatcgccacaacggaaaaaggtccactgcctgaatatggattctttgtcttttcagctgggtttatacctgagcccgcatttcctccaggcctcaaacactatcgagcccggacagcagtcatttgttcaggtccgtgtgtcaccgtcagtgagcgagttcttgctccagttggattcatgccatctggacctcggtccggagggggggactgtggagctgatccagggccgggccgctaagggcaattgtgtttctcttctttcaccctccccagagggagatcctagattctccttcttgctccacttctataccgttccaatccctaagacgggcacactgtcatgtaccgtcgctttgcgacccaagaccggtagccaggaccaggaggttcaccgtaccgtgtttatgcggttaaatatcattagccctgacctctctggctgtactagcaagggactggtgttacccgcggtcttgggcattacttttggggcgtttctcataggcgctcttttgacagcggctctctggtacatctatagtcacacgcggagcccatctaagcgggagcctgtggtggccgtggctgccccagcttcctctgaatcatcctccaccaaccattcgatcgggagcactcagtcgacaccatgcagcactagcagtatggcatag

SEQ ID NO: 43184 - DNA, 1977 bp, Artificial Sequence
  derived and/or modified sequence
atggacaggggtactcttccactcgcagtggccctactgttagcatcgtgtagcctgtccccgacttccctggctgagaccgttcattgtgacttacaacctgtgggtccggaaaggggggaagtgacttatactacatcccaggtgagcaaaggttgtgtggctcaggctccaaacgctattctggaggtgcatgttctgtttctggagtttcctaccggacccagccagcttgaactgactctgcaagcatcaaaacagaacggaacctggcctcgtgaggtgctcctcgtcctaagcgtaaattctagcgtgttcttacacctacaagcgctggggatccctctgcacctcgcatataatagcagcctagtcacatttcaggaacctcccggtgtgaacacgacagagctccctagctttcctaagacacagattttagagtgggcagcagaaagaggacctatcaccagcgcggcagaactgaatgacccccaatcgatcctgttacgcctgggtcaagcgcagggctcactgtcgttttgtatgctcgaagcaagccaagatatgggaaggactctggagtggcgaccacggactcccgctttggtccggggatgtcacctggagggagtcgccggtcataaggaagcacacatcctgcgcgtcctgcccggtcactcggctggtcctaggactgtcaccgtaaaggtggaattgagttgtgcaccaggagacctggatgcagtgctgatcttacaggggccaccctacgtttcatggcttatagatgccaaccacaatatgcaaatctggactaccggcgagtatagctttaagatctttcccgagaagaacatccgaggattcaagctgcctgacaccccacagggactgctaggcgaggccagaatgctgaacgcaagcatcgtggcctccttcgtggagctcccactggcaagcatagtgagcttgcatgcaagttcctgtggaggccgtctgcagacaagtcctgccccaatacaaactactccacctaaagatacatgtagccccgagctgttgatgagcctgattcagactaaatgtgctgacgatgcaatgaccctggttctcaagaaagagcttgtggctcaccttaaatgcacgatcaccggattgacattctgggacccaagttgtgaggctgaagatcggggtgacaaatttgtgcttaggagcgcatactcatcttgtggaatgcaagtatcggcttccatgatctcaaacgaggccgtggtgaacattctcagttcttcatcaccacagaggaagaaagttcattgtctgaacatggatagtttatcatttcagctgggcctttatctctcaccccactttctgcaggcttctaacactatcgaaccaggacagcagagctttgttcaagttagagtgtcccctagcgtgtccgaattcctgcttcagctggattcctgccacctcgatctgggacctgagggcggtaccgtggagctgatacagggcagggccgctaaagggaactgtgtttcccttctgagcccctccccagagggcgacccccgattcagttttttgctacacttctatacagttccaatccctaaaacagggaccctgagttgtaccgtagcactccgacccaaaactggatcccaggatcaggaggtacacaggacggtctttatgcgactaaacatcatatcacctgacctttccggttgcacgtcaaagggactcgttctgcctgctgtcctcgggataacattcggtgccttcctgattggggctctgctcaccgccgctttgtggtatatctacagccacactcgctctccaagtaaacgcgagccagtcgtcgccgtagctgccccagcttccagtgagtcctcctctacgaaccatagcatcggatcgacacagagcacaccctgttccacatcttccatggcctag

SEQ ID NO: 43185 - DNA, 1977 bp, Artificial Sequence
  derived and/or modified sequence
atggacagagggacacttcctcttgccgtggccttattactcgcctcctgctcgctgtctccgacttcactggcagagactgtgcactgcgacttacagcctgtaggacccgaacgcggagaagtgacctacactacctcacaagtgagcaagggttgcgtcgcccaagcaccaaatgcgattcttgaggttcatgtactctttctggagtttccaacgggaccttctcaactggagctcacactccaggctagtaagcagaacgggacttggcccagagaagtcttattggtcctgtccgttaactcaagcgtgtttctgcacttgcaggctttgggtatacctctccatttagcctacaatagctccctcgtaacattccaggaaccgccaggcgttaacacgactgaacttccatctttccccaaaacacagatcctcgagtgggcggctgagagagggcctattaccagcgcagcggagctgaacgatccgcagagcattctactcaggctggggcaggcacagggatctttgagcttctgtatgcttgaggcaagccaggacatgggtcgcaccctcgagtggcggcctaggacaccggctcttgtaagaggttgtcacctcgagggggtggccggtcacaaagaggcccatattttgcgggtactgccaggtcattccgccggacccagaacagtcacagttaaagtggagctttcttgcgctcctggcgatctggatgcagtgctgattctccaaggacccccttacgtgagctggcttatcgatgcgaatcacaacatgcagatctggaccactggggagtactccttcaagattttcccagaaaaaaatatcagaggattcaagctcccagatacccctcagggcctgttgggggaagccagaatgctgaatgcctctattgtggctagttttgtggagctgccactggcctccattgtttccctgcacgcctcttcctgcgggggacgtctgcagacttcaccagcgcctattcagaccaccccgcctaaagatacatgttccccggagctgctcatgtctcttatccaaaccaaatgcgctgacgacgcaatgaccctggtgcttaagaaagagttagtagctcacctcaagtgcacaattactggcctgaccttctgggatcccagttgtgaggccgaagaccgcggtgataaatttgtgttaagaagtgcttactcaagttgtggcatgcaggtgtcagcctctatgatatccaatgaagcagtggtcaatatcctttcttcatcctctcctcagaggaagaaagtccactgcctaaacatggatagtctgtccttccaactcggactgtacctttctcctcattttttacaggctagcaatactattgaacctgggcagcagagctttgtccaagttagagtgagcccttccgtgtctgaattcctgctccagctcgactcctgccatctcgacctgggaccagaagggggtactgtggaattaattcagggcagagccgcaaaaggaaactgtgtcagcctactgtccccctctcctgagggtgatccgaggtttagttttctactgcacttctatactgtcccgatccccaagacaggcactttgagctgcactgtcgctctgaggcctaagacaggaagtcaggatcaagaggtccatcgtaccgtgttcatgcgactcaacatcatcagtccggatctgtccggatgcacaagtaagggattagttcttcctgccgtgctcggcatcacctttggtgcattcctgattggtgccctgctgacagcagccctgtggtacatctacagccacacacggagccctagtaaaagggaacctgtcgtcgcggttgcagcgcctgccagcagcgaatcctcctccaccaaccacagtattggaagtacccaaagcactccttgtagcacctcatcaatggcttag

SEQ ID NO: 43186 - DNA, 1431 bp, Artificial Sequence
  derived and/or modified sequence
atgctcgaggccagtcaggacatgggcaggacactggagtggaggcccaggacccccgcactcgtgcgaggatgtcatttggagggagtcgcaggccacaaagaggcccacatacttcgcgtcctacccggtcattcggctggcccacgcactgtcactgtcaaagtggagctcagctgtgcccctggagacctggatgcagttttgatcttgcagggacccccttacgtgtcgtggttgatcgatgctaatcacaacatgcagatctggactacaggcgaatattccttcaaaatctttcccgagaaaaatatcagaggtttcaaactgccagacacgccccagggcctgctcggggaagctcggatgttgaacgcaagcatcgttgcttcatttgtagaactccccttagccagcatcgtcagcctgcacgcctctagttgtgggggacgcctacagactagtcccgcaccaatccagaccactccaccaaaagacacatgttcccccgagctgctcatgtcgctcattcagacgaagtgtgcagacgacgccatgaccctagtgctgaagaaagagctcgtggctcatttgaagtgcaccataaccggcctgaccttctgggatccttcctgcgaggccgaagacaggggcgacaagttcgttctgaggagcgcatattcctcctgcggcatgcaagtctcggcttctatgatttctaacgaggcagtcgtgaacatactgtcttcgtctagcccccagcgcaagaaagtccactgtcttaacatggattctctgtccttccagctggggctttacctctctccacacttcctgcaggcatccaataccatagagccgggacagcaatcgtttgtgcaggtgcgggtgtccccttccgtcagcgaattcctgttacagctcgactcctgtcacctggacctcgggcctgaaggaggcacagtcgagctcattcaaggtcgcgctgccaaaggtaattgtgtgtctctgctctctccgtctcctgagggagaccccagattttcgtttctcctgcatttctataccgtaccaattccaaaaaccgggacattgtcctgcaccgtcgccctcagacccaagactggcagccaggatcaagaagtccatagaacagtcttcatgcgcctgaacatcatatcgccagatctgtctggatgcacatccaaaggcttggtcctccccgcagtgctgggcattacatttggtgcgttcctgatcggtgctctcctcacagcagctttatggtacatttactcacacacccgcagccccagtaagagggaacctgtggtcgcagtagcagccccagcttcctcagagtcatccagcaccaaccattctattgggtctacgcaaagcaccccatgtagcaccagtagtatggcttag

SEQ ID NO: 43187 - protein, 125 aa, Artificial Sequence
  derived and/or modified sequence
MDAVAVYHGKISRETGEKLLLATGLDGSYLLRDSESVPGVYCLCVLYHGYIYTYRVSQTETGSWSAETAPGVHKRYFRKIKNLISAFQKPDQGIVIPLQYPVEKKSSARSTQGIREDPDVCLKAP

SEQ ID NO: 43188 - DNA, 378 bp, Artificial Sequence
  derived and/or modified sequence
atggacgctgtggcagtatatcacggaaagatttccagagagactggggagaagctgctactcgccacaggcctggatggctcttaccttttaagagactcagagtccgtccccggggtttactgcctgtgcgtgttgtaccacggctacatttacacctatcgggtgtctcagacagaaacaggaagctggagcgccgagaccgcacccggcgtgcacaagcgatactttcggaagatcaaaaatctgatttcagcctttcaaaagcctgatcaaggaattgttatccccttgcagtatccagtggaaaagaaaagcagcgccaggtccactcaaggcatccgggaagaccccgatgtgtgtctaaaagccccctag

SEQ ID NO: 43189 - DNA, 177 bp, Artificial Sequence
  derived and/or modified sequence
atggacgctgtggcagtttaccacggcaagatcagccgcgaaactggtgaaaaactgctcctggccacaggactggacggctcctatctcctgcgtgacagtgagagcgtccctggggtgtactgcttatgcgtgcttcaccactggggctatatcaaatttatcaataaactgtag

SEQ ID NO: 43190 - DNA, 378 bp, Artificial Sequence
  derived and/or modified sequence
atggatgctgtggccgtgtaccacggcaagatcagccgggagactggagagaagctgctgctggccaccggcctggatggcagctacctgctgcgggacagcgagagcgtgcctggggtgtactgcctgtgtgtgctgtaccacggctacatctacacctacagagtgtcccagacagaaacaggctcctggagcgctgagacagcccctggggtgcacaagcgctacttcaggaagatcaagaacctgatcagcgccttccagaagccagaccagggcatcgtcatccccctgcagtaccctgtggagaagaagagcagcgcccggagcacccagggcatccgggaggaccctgatgtgtgcctgaaggccccctag

SEQ ID NO: 43191 - DNA, 177 bp, Artificial Sequence
  derived and/or modified sequence
atggatgctgtggccgtgtaccacggcaagatcagccgggagactggagagaagctgctgctggccaccggcctggatggcagctacctgctgcgggacagcgagagcgtgcctggggtgtactgcctgtgtgtgctgcaccactggggctacatcaagttcatcaacaagctgtag

SEQ ID NO: 43192 - DNA, 378 bp, Artificial Sequence
  derived and/or modified sequence
atggacgccgtggccgtgtaccacggcaagatcagccgggagaccggtgaaaagctccttctggccactggcctggacggaagctatctgcttcgagactctgaatcagtaccgggtgtttattgcctttgcgtgctgtatcatggatacatatacacatatcgggttagtcagacagagacaggctcatggagcgccgagacagcaccgggagtccataagagatacttccgcaagatcaagaacctgatctcggcctttcaaaagcccgatcagggcatcgtgatcccactgcagtaccccgttgaaaaaaaaagctctgccaggtctacgcaggggattagggaggaccctgacgtgtgtcttaaggctccctag

SEQ ID NO: 43193 - DNA, 177 bp, Artificial Sequence
  derived and/or modified sequence
atggacgccgtggccgtgtaccacggcaagatcagccgggagaccggggagaaactgttgttggctactggattagatggatcctatttgctgcgagacagcgagagtgtccctggagtttactgcctatgcgtcttacaccactggggatatattaaatttattaacaagctctag

SEQ ID NO: 43194 - DNA, 378 bp, Artificial Sequence
  derived and/or modified sequence
atggatgccgtggcggtgtatcatggcaagataagtcgcgagaccggagagaaactattgctggccacagggcttgacggctcctacctcttgagggatagcgagtcagtcccaggggtgtactgcctgtgcgtgctgtatcatgggtacatttatacataccgagtgtcacagactgagacaggatcctggtccgcagagaccgcacctggggtacacaagcggtacttcagaaaaattaaaaacctgatttcggcattccagaaacccgaccagggcatcgtgatccccctacagtaccctgtcgagaaaaagtccagcgcacgttccacacagggaattagagaagacccagacgtctgtctgaaggctccctag

SEQ ID NO: 43195 - DNA, 177 bp, Artificial Sequence
  derived and/or modified sequence
atggacgctgtggctgtgtaccacgggaaaataagtcgggaaacaggggagaagctcctactggccactggtctcgatgggagttatctgttgcgggattcggagtccgtccccggtgtttactgcctttgtgtcctccatcactgggggtacatcaagtttattaacaagctatag

SEQ ID NO: 43196 - DNA, 593 bp, Artificial Sequence
  derived and/or modified sequence
ttttttgcacatctggctgaactgggagtcaggtggttgacttgtgcctggctgcagtagcagcggcatctcccttgcacagttctcctcctcggcctgcccaagagtccaccaggccatggacgcagtggctgtgtatcatggcaaaatcagcagggaaaccggcgagaagctcctgcttgccactgggctggatggcagctatttgctgagggacagcgagagcgtgccaggcgtgtactgcctatgtgtgctgtatcacggttacatttatacataccgagtgtcccagacagaaacaggttcttggagtgctgagacagcacctggggtacataaaagatatttccggaaaataaaaaatctcatttcagcatttcagaagccagatcaaggcattgtaatacctctgcagtatccagttgagaagaagtcctcagctagaagtacacaagggataagagaagatcctgatgtctgcctgaaagccccatgaagaaaaataaaacaccttgtactttattttctataatttaaatatatgctaagtcttatatattgtagataatacagttcggtgagctacaaatgca

SEQ ID NO: 43197 - DNA, 267 bp, Artificial Sequence
  derived and/or modified sequence
gagtcaggtggttgacttgtgcctggctgcagtagcagcggcatctcccttgcacagttctcctcctcggcctgcccaagagtccaccaggccatggacgcagtggctgtgtatcatggcaaaatcagcagggaaaccggcgagaagctcctgcttgccactgggctggatggcagctatttgctgagggacagcgagagcgtgccaggcgtgtactgcctatgtgtgctacaccattggggttacattaaatttattaataaacta

SEQ ID NO: 43198 - DNA, 378 bp, Artificial Sequence
  derived and/or modified sequence
atggacgccgtggccgtgtaccacggcaagatcagcagagagaccggcgagaagctgctgctggccaccggcctggacggcagctacctgctgagagacagcgagagcgtgcccggcgtgtactgcctgtgcgtgctgtaccacggctacatctacacctacagagtgagccagaccgagaccggcagctggagcgccgagaccgcccccggcgtgcacaagagatacttcagaaagatcaagaacctgatcagcgccttccagaagcccgaccagggcatcgtgatccccctgcagtaccccgtggagaagaagagcagcgccagaagcacccagggcatcagagaggaccccgacgtgtgcctgaaggccccctag

SEQ ID NO: 43199 - DNA, 177 bp, Artificial Sequence
  derived and/or modified sequence
atggacgccgtggccgtgtaccacggcaagatcagcagagagaccggcgagaagctgctgctggccaccggcctggacggcagctacctgctgagagacagcgagagcgtgcccggcgtgtactgcctgtgcgtgctgcaccactggggctacatcaagttcatcaacaagctgtag

SEQ ID NO: 43200 - protein, 555 aa, Artificial Sequence
  derived and/or modified sequence
MNFETSRCATLQYCPDPYIQRFVETPAHFSWKESYYRSTMSQSTQTNEFLSPEVFQHIWDFLEQPICSVQPIDLNFVDEPSEDGATNKIEISMDCIRMQDSDLSDPMWPQYTNLGLLNSMDQQIQNGSSSTSPYNTDHAQNSVTAPSPYAQPSSTFDALSPSPAIPSNTDYPGPHSFDVSFQQSSTAKSATWTYSTELKKLYCQIAKTCPIQIKVMTPPPQGAVIRAMPVYKKAEHVTEVVKRCPNHELSREFNEGQIAPPSHLIRVEGNSHAQYVEDPITGRQSVLVPYEPPQVGTEFTTVLYNFMCNSSCVGGMNRRPILIIVTLETRDGQVLGRRCFEARICACPGRDRKADEDSIRKQQVSDSTKNGDGTKRPFRQNTHGIQMTSIKKRRSPDDELLYLPVRGRETYEMLLKIKESLELMQYLPQHTIETYRQQQQQQHQHLLQKQTSIQSPSSYGNSSPPLNKMNSMNKLPSVSQLINPQQRNALTPTTIPDGMGANIPMMGTHMPMAGDMNGLSPTQALPPPLSMPSTSHCTPPPPYPTDCSIVRIWQV

SEQ ID NO: 43201 - DNA, 1533 bp, Artificial Sequence
  derived and/or modified sequence
atgaacttcgagaccagcagatgcgccaccctgcagtactgccccgacccctacatccagagattcgtggagacccccgcccacttcagctggaaggagagctactacagaagcaccatgagccagagcacccagaccaacgagttcctgagccccgaggtgttccagcacatctgggacttcctggagcagcccatctgcagcgtgcagcccatcgacctgaacttcgtggacgagcccagcgaggacggcgccaccaacaagatcgagatcagcatggactgcatcagaatgcaggacagcgacctgagcgaccccatgtggccccagtacaccaacctgggcctgctgaacagcatggaccagcagatccagaacggcagcagcagcaccagcccctacaacaccgaccacgcccagaacagcgtgaccgcccccagcccctacgcccagcccagcagcaccttcgacgccctgagccccagccccgccatccccagcaacaccgactaccccggcccccacagcttcgacgtgagcttccagcagagcagcaccgccaagagcgccacctggacctacagcaccgagctgaagaagctgtactgccagatcgccaagacctgccccatccagatcaaggtgatgaccccccccccccagggcgccgtgatcagagccatgcccgtgtacaagaaggccgagcacgtgaccgaggtggtgaagagatgccccaaccacgagctgagcagagagttcaacgagggccagatcgccccccccagccacctgatcagagtggagggcaacagccacgcccagtacgtggaggaccccatcaccggcagacagagcgtgctggtgccctacgagcccccccaggtgggcaccgagttcaccaccgtgctgtacaacttcatgtgcaacagcagctgcgtgggcggcatgaacagaagacccatcctgatcatcgtgaccctggagaccagagacggccaggtgctgggcagaagatgcttcgaggccagaatctgcgcctgccccggcagagacagaaaggccgacgaggacagcatcagaaagcagcaggtgagcgacagcaccaagaacggcgacggcaccaagagacccttcagacagaacacccacggcatccagatgaccagcatcaagaagagaagaagccccgacgacgagctgctgtacctgcccgtgagaggcagagagacctacgagatgctgctgaagatcaaggagagcctggagctgatgcagtacctgccccagcacaccatcgagacctacagacagcagcagcagcagcagcaccagcacctgctgcagaagcagaccagcatccagagccccagcagctacggcaacagcagcccccccctgaacaagatgaacagcatgaacaagctgcccagcgtgagccagctgatcaacccccagcagagaaacgccctgacccccaccaccatccccgacggcatgggcgccaacagaagcggcaagagcgagaacccctag

SEQ ID NO: 43202 - DNA, 1668 bp, Artificial Sequence
  derived and/or modified sequence
atgaacttcgagaccagcagatgcgccaccctgcagtactgccccgacccctacatccagagattcgtggagacccccgcccacttcagctggaaggagagctactacagaagcaccatgagccagagcacccagaccaacgagttcctgagccccgaggtgttccagcacatctgggacttcctggagcagcccatctgcagcgtgcagcccatcgacctgaacttcgtggacgagcccagcgaggacggcgccaccaacaagatcgagatcagcatggactgcatcagaatgcaggacagcgacctgagcgaccccatgtggccccagtacaccaacctgggcctgctgaacagcatggaccagcagatccagaacggcagcagcagcaccagcccctacaacaccgaccacgcccagaacagcgtgaccgcccccagcccctacgcccagcccagcagcaccttcgacgccctgagccccagccccgccatccccagcaacaccgactaccccggcccccacagcttcgacgtgagcttccagcagagcagcaccgccaagagcgccacctggacctacagcaccgagctgaagaagctgtactgccagatcgccaagacctgccccatccagatcaaggtgatgaccccccccccccagggcgccgtgatcagagccatgcccgtgtacaagaaggccgagcacgtgaccgaggtggtgaagagatgccccaaccacgagctgagcagagagttcaacgagggccagatcgccccccccagccacctgatcagagtggagggcaacagccacgcccagtacgtggaggaccccatcaccggcagacagagcgtgctggtgccctacgagcccccccaggtgggcaccgagttcaccaccgtgctgtacaacttcatgtgcaacagcagctgcgtgggcggcatgaacagaagacccatcctgatcatcgtgaccctggagaccagagacggccaggtgctgggcagaagatgcttcgaggccagaatctgcgcctgccccggcagagacagaaaggccgacgaggacagcatcagaaagcagcaggtgagcgacagcaccaagaacggcgacggcaccaagagacccttcagacagaacacccacggcatccagatgaccagcatcaagaagagaagaagccccgacgacgagctgctgtacctgcccgtgagaggcagagagacctacgagatgctgctgaagatcaaggagagcctggagctgatgcagtacctgccccagcacaccatcgagacctacagacagcagcagcagcagcagcaccagcacctgctgcagaagcagaccagcatccagagccccagcagctacggcaacagcagcccccccctgaacaagatgaacagcatgaacaagctgcccagcgtgagccagctgatcaacccccagcagagaaacgccctgacccccaccaccatccccgacggcatgggcgccaacatccccatgatgggcacccacatgcccatggccggcgacatgaacggcctgagccccacccaggccctgcccccccccctgagcatgcccagcaccagccactgcacccccccccccccctaccccaccgactgcagcatcgtgagaatctggcaggtgtag

SEQ ID NO: 43203 - DNA, 1533 bp, Artificial Sequence
  derived and/or modified sequence
atgaacttcgagactagccgatgtgccacactgcaatactgccccgatccctacatacaacggttcgtggaaacccctgcgcatttctcctggaaagaatcatattacaggtcgacaatgtcacaaagcacccagactaacgaattccttagcccggaggtctttcagcacatttgggactttttagagcagccaatctgttcagtacagcccattgacctgaatttcgttgacgaaccatctgaagacggggcgacaaataagatcgagattagtatggactgtatacgaatgcaggacagtgatctgtccgatcccatgtggccgcagtataccaatctcggccttctgaacagtatggaccaacagatccaaaacggatcttcgtcaaccagcccatataacaccgatcatgcacagaatagtgtgacagcaccgagcccctacgctcagccgagctcaaccttcgacgcactgtctccatctccagcaatcccttccaacaccgactatccgggaccgcacagtttcgatgtctcgtttcagcagagctccactgcaaaatcggctacctggacttatagtacagaactgaaaaaactatattgccagatcgccaagacatgtccgattcagataaaagtcatgacacctcctccccagggagccgtcattcgggctatgcctgtgtacaagaaagccgaacacgtgactgaagttgtcaagagatgtcccaaccacgagttgtctcgggagttcaatgagggccagatcgcccctccctcccatctaataagagttgaggggaatagccatgcccagtatgtcgaggaccccatcacaggcaggcagtccgtgcttgtgccatacgagccaccccaggttggcaccgagttcacaactgtcctgtacaatttcatgtgtaattcgtcctgtgtgggcgggatgaaccggcggccaatcctgattatcgtcaccctcgagactagagacggacaagtcctcggcaggaggtgcttcgaagctcggatttgcgcctgccccggacgagaccggaaggcagatgaagattccattaggaaacaacaggtgagtgactctacaaagaatggtgatgggacgaaacgaccatttcggcagaacacccatggcatccagatgacctccattaaaaagcggcgatcaccggatgacgaactcttgtatctaccggttcgaggccgagagacctatgaaatgctgctcaaaatcaaagagagcctcgaactcatgcagtaccttccccagcacacgatcgagacctataggcagcaacaacagcagcaacatcaacacctgttacagaagcaaactagcatccagagccctagcagctacggaaatagcagtcctccattgaataaaatgaactcaatgaataaactgccctctgtcagccagctaatcaatccgcaacagcgcaacgcccttacacccaccactattccagacgggatgggcgctaataggtcaggaaagtccgaaaatccctag

SEQ ID NO: 43204 - DNA, 1668 bp, Artificial Sequence
  derived and/or modified sequence
atgaatttcgaaacatctcgatgtgccaccctccaatactgccctgacccgtatatccaaaggttcgtagaaacacctgcacatttcagttggaaagaaagttattatcgcagtactatgtcccaatctacacagacaaacgaatttctgagccccgaggtttttcaacacatctgggactttttagagcaacccatctgttcagtccagcctatcgatctgaatttcgtggatgagcccagtgaggacggagcaaccaataaaattgaaatcagcatggactgcatccgtatgcaggactctgacctgtctgaccctatgtggccccagtacaccaatctgggattacttaactccatggaccaacagatccagaatggctcaagcagcacatccccttacaatactgatcatgctcagaatagcgtgacagcccccagcccatacgctcagccgagctccactttcgatgccctgagcccctcaccagccattccatctaatacagattatccgggacctcacagctttgacgtgtcttttcagcagtcatctactgccaagtccgctacttggacatacagcaccgagctgaagaagctgtactgtcagatcgctaaaacgtgtccgatccaaataaaggtaatgacaccgccgccacagggagccgttataagggccatgcctgtttataagaaggccgagcatgtaactgaggtggttaagcgctgccccaatcacgagctctcacgggagtttaatgagggccaaatcgcccctccctcacacctcatacgcgttgaaggaaactcccatgcccagtatgtagaggaccctatcacgggcagacaatcagtgctcgtaccttatgaaccaccacaggtaggtactgaatttacgacagtgctgtataatttcatgtgtaatagctcatgcgttggcggcatgaatcgtcgcccaatcctgattatcgtgacacttgagacgagggacggacaggtgcttgggcgccggtgtttcgaggctcgcatctgcgcctgccctggtcgagacagaaaggcggacgaggactcaatccgaaaacagcaggtaagtgatagcacgaaaaatggcgatggcacaaagcggccttttaggcaaaacacacacggcatacagatgacgagcatcaagaagcggcggagcccagatgatgaactcctgtatctgccagtgcggggcagggaaacctatgaaatgctgttgaaaataaaggagtcgctggagttgatgcagtatctgccccagcataccatcgagacctacagacagcaacagcaacagcagcatcagcatttgctgcagaaacaaacctctatccagtccccttccagctacggaaatagttctccaccactgaacaaaatgaatagtatgaacaaactgccttctgtctcccagctaatcaacccacaacagagaaatgcgctgacccccaccactattccggacggaatgggcgccaacattccgatgatgggaactcacatgcctatggcgggagacatgaatgggctgtcaccaacccaggccctgccgcccccactgagcatgccaagcaccagtcattgtacgcctccgcccccctatccaacggattgtagcatcgtgcgaatttggcaagtgtag

SEQ ID NO: 43205 - DNA, 1533 bp, Artificial Sequence
  derived and/or modified sequence
atgaactttgagaccagccgctgtgccaccctgcagtactgcccagacccctacatccagagatttgtggagaccccagcccacttctcctggaaggagagctactaccgcagcaccatgagccagagcacccagaccaatgagttcctgagccctgaggtgttccagcacatctgggacttcctggagcagcccatctgcagcgtgcagcccatcgacctgaactttgtggatgagcccagtgaagatggagccaccaacaagattgagatctccatggactgcatccgcatgcaggacagcgacctgagtgaccccatgtggccccagtacaccaacctgggcctgctgaacagcatggaccagcagatccagaatggcagcagcagcaccagcccctacaacacagaccacgcccagaacagcgtgacagcccccagcccctatgcccagcccagcagcacctttgatgccctgagccccagccctgccatccccagcaacacagactacccaggcccccacagctttgatgtgtccttccagcagagcagcacagccaagagcgccacctggacctacagcacagagctgaagaagctgtactgccagatcgccaagacctgccccatccagatcaaggtgatgaccccaccaccccagggcgctgtgatccgggccatgcctgtgtacaagaaggccgagcacgtgacagaggtggtgaagcgctgccccaaccacgagctgagccgggagttcaatgaaggccagatcgccccacccagccacctgatccgggtggagggcaacagccacgcccagtatgtggaggaccccatcaccggccggcagagcgtgctggtgccctatgagcccccccaggtgggcacagagttcaccaccgtgctgtacaacttcatgtgcaacagcagctgtgtgggcggcatgaacagaagacccatcctgatcatcgtgaccctggagaccagagatggccaggtgctgggccgccgctgctttgaggcccgcatctgtgcctgccccggccgggacaggaaggcagatgaggacagcatcaggaagcagcaggtgtctgacagcaccaagaatggagatggcaccaagaggcccttccggcagaacacccacggcatccagatgaccagcatcaagaagagaagaagcccagatgatgagctgctgtacctgcctgtgcggggccgggagacctatgagatgctgctgaagatcaaggagagcctggagctgatgcagtacctgccccagcacaccatcgagacctaccggcagcagcagcagcagcagcaccagcacctgctgcagaagcagaccagcatccagagccccagcagctatggcaacagcagcccccccctgaacaagatgaacagcatgaacaagctgcccagcgtgtcccagctgatcaacccccagcagagaaatgccctgacccccaccaccatcccagatggcatgggcgccaacagaagtggcaagtctgagaacccctag

SEQ ID NO: 43206 - DNA, 1668 bp, Artificial Sequence
  derived and/or modified sequence
atgaactttgagaccagccgctgtgccaccctgcagtactgcccagacccctacatccagagatttgtggagaccccagcccacttctcctggaaggagagctactaccgcagcaccatgagccagagcacccagaccaatgagttcctgagccctgaggtgttccagcacatctgggacttcctggagcagcccatctgcagcgtgcagcccatcgacctgaactttgtggatgagcccagtgaagatggagccaccaacaagattgagatctccatggactgcatccgcatgcaggacagcgacctgagtgaccccatgtggccccagtacaccaacctgggcctgctgaacagcatggaccagcagatccagaatggcagcagcagcaccagcccctacaacacagaccacgcccagaacagcgtgacagcccccagcccctatgcccagcccagcagcacctttgatgccctgagccccagccctgccatccccagcaacacagactacccaggcccccacagctttgatgtgtccttccagcagagcagcacagccaagagcgccacctggacctacagcacagagctgaagaagctgtactgccagatcgccaagacctgccccatccagatcaaggtgatgaccccaccaccccagggcgctgtgatccgggccatgcctgtgtacaagaaggccgagcacgtgacagaggtggtgaagcgctgccccaaccacgagctgagccgggagttcaatgaaggccagatcgccccacccagccacctgatccgggtggagggcaacagccacgcccagtatgtggaggaccccatcaccggccggcagagcgtgctggtgccctatgagcccccccaggtgggcacagagttcaccaccgtgctgtacaacttcatgtgcaacagcagctgtgtgggcggcatgaacagaagacccatcctgatcatcgtgaccctggagaccagagatggccaggtgctgggccgccgctgctttgaggcccgcatctgtgcctgccccggccgggacaggaaggcagatgaggacagcatcaggaagcagcaggtgtctgacagcaccaagaatggagatggcaccaagaggcccttccggcagaacacccacggcatccagatgaccagcatcaagaagagaagaagcccagatgatgagctgctgtacctgcctgtgcggggccgggagacctatgagatgctgctgaagatcaaggagagcctggagctgatgcagtacctgccccagcacaccatcgagacctaccggcagcagcagcagcagcagcaccagcacctgctgcagaagcagaccagcatccagagccccagcagctatggcaacagcagcccccccctgaacaagatgaacagcatgaacaagctgcccagcgtgtcccagctgatcaacccccagcagagaaatgccctgacccccaccaccatcccagatggcatgggcgccaacatccccatgatgggcacccacatgcccatggccggggacatgaatggcctgagccccacccaggccctgcccccacccctgtccatgcccagcaccagccactgcaccccacctccaccctaccccacagactgcagcatcgtgcgcatctggcaggtgtag

SEQ ID NO: 43207 - DNA, 1533 bp, Artificial Sequence
  derived and/or modified sequence
atgaacttcgagaccagccggtgcgccaccctgcagtactgccccgatccatacatacagaggttcgtcgagactcctgcccattttagttggaaggaatcttactatcgtagtaccatgtctcagtctactcagacaaatgaattcctgagtcccgaagtgttccagcacatttgggacttccttgaacagccaatctgttctgtccagcccattgatttgaattttgtggacgagccaagtgaagatggcgctactaacaagatcgagatcagcatggactgcataaggatgcaggattcagacctttctgaccccatgtggcctcagtatacaaacctgggtctcctgaacagtatggaccagcagattcagaacggatcttccagcacatctccatataacacagatcatgcacagaattctgtgaccgcaccgagtccttacgcccaaccctcaagtactttcgacgcgctcagccccagtcctgcaatcccctctaacaccgattaccccggtcctcactcatttgacgtaagtttccagcaatcgagcaccgccaagtccgctacatggacctacagcaccgagctaaaaaaactctattgtcaaattgcgaaaacgtgtccaatccaaattaaagtgatgacaccccccccacagggggccgtgattagagccatgcccgtgtacaagaaggctgagcacgttaccgaggtggtgaaaaggtgcccaaaccatgagctaagtcgggagtttaacgaaggacaaatagcgccccctagccacctgattcgcgtggagggcaactcccacgcacagtatgtggaggatcccattaccgggaggcaatctgtgctggtcccttatgagcctccccaggtcggcacggaattcactacagtcctgtacaactttatgtgcaattccagctgcgtggggggcatgaatcgacggcccatccttatcattgtcactctggaaaccagagacggtcaggtgctgggccgacggtgcttcgaagcgaggatctgcgcttgccccggccgcgatagaaaagcagatgaagacagcatcaggaaacagcaggtgtccgactccactaaaaatggtgacggaactaaacggcccttccgccagaatacacacggaatccagatgactagcatcaagaagcgtcggtcccccgatgatgaactgttgtacctgcccgttcgaggccgggaaacctatgaaatgctgctgaagatcaaagaatctctcgagctcatgcagtatctgccacaacatacaatcgagacttataggcagcagcagcagcagcagcaccagcacctattgcagaagcagacaagcatccagagtccgtcaagctacggtaattcctcgcccccactgaacaaaatgaatagcatgaacaaactcccttcagtctcccagctcataaatccccagcagcgaaacgccttaacccccaccacaattcctgatgggatgggggcaaataggagtggcaaatcggagaacccatag

SEQ ID NO: 43208 - DNA, 1668 bp, Artificial Sequence
  derived and/or modified sequence
atgaacttcgagaccagccggtgcgccaccctgcagtactgccccgacccttacatccagaggttcgtcgaaacgcctgcccatttctcttggaaagagtcttactacaggtcaacaatgtcacagtcaacgcagactaacgagttcctcagccctgaagtcttccagcatatctgggattttctggaacaaccaatctgctccgttcagccaatagatctgaattttgtcgacgagcctagtgaggacggcgcaactaataaaatagaaatttctatggattgtatccgcatgcaggacagtgatctaagtgaccccatgtggccacaatacaccaacctgggcctgctaaatagcatggaccagcagatccagaacggatcaagttccaccagcccgtacaacactgaccacgcacagaactctgttaccgcaccatcaccatatgcccagccatcctctacctttgacgctctatctccctcccccgccatcccttccaacactgattaccccgggccgcattcatttgacgtctcttttcaacagtcttcaaccgccaaatcggcaacgtggacctactcaacagagctgaaaaaactttactgccagatagctaaaacctgcccgatccaaattaaagtgatgactccgcccccccaaggggccgtcatccgggcgatgccagtttacaaaaaggccgaacatgtgaccgaggttgtgaaaagatgccccaatcacgagctgtcccgcgagttcaatgaaggccagattgcaccccccagccatctcattcgggtcgaaggcaacagtcacgctcaatacgttgaggaccctattacaggacgccaatctgttctagtcccatatgaaccccctcaggtcggtacggagttcaccactgtgctgtataatttcatgtgcaatagtagttgcgttggcgggatgaataggcgcccaatcctcatcatcgtcacccttgagacacgggacggccaggtgctcgggaggcgatgttttgaggctcgcatttgtgcctgtccgggaagggacaggaaggctgacgaggactctatcaggaagcagcaggtaagtgactcaacaaaaaatggagatggcaccaagcgacccttccgtcagaatacacatggaattcagatgaccagtataaaaaagcgacgttcaccagacgacgaactgctttacctgcctgtgcggggccgtgagacatacgaaatgcttttgaagattaaggagagtctggaactcatgcagtatctgcctcagcacacaattgaaacctaccggcagcagcagcagcaacagcatcagcaccttctgcaaaagcagacatcaattcagagtccctcttcatacggaaattcctcaccaccgctgaacaagatgaattcaatgaacaaactgccatccgtcagccagctgatcaacccccaacagcgcaacgccctgactcctacaacaattccagacggaatgggggcaaacatcccaatgatggggacccacatgcctatggccggagacatgaatgggctgtcccccacacaggcccttccccctcctctgagtatgccttctaccagtcactgcactcctccacctccctaccccacggattgcagcattgtaaggatctggcaagtttag

SEQ ID NO: 43209 - DNA, 1533 bp, Artificial Sequence
  derived and/or modified sequence
atgaattttgagacttcaaggtgcgctacactccagtattgtccggacccttatatccaaaggtttgtggaaactcccgctcatttcagctggaaggagagctattatcgttcgactatgagccagtccactcagacaaatgagttcctttctcccgaagttttccagcacatctgggatttcctagagcaaccaatctgctctgtgcagccgatcgatttgaattttgttgacgagccaagcgaagatggcgcaactaataagatagagattagtatggattgtatccggatgcaggacagcgacctttccgacccaatgtggcctcagtatacaaacctcggactactgaatagtatggaccagcagattcagaatggctcttcatccacatcaccgtacaacactgatcatgctcagaactccgtgaccgcccctagtccgtatgcccagcccagctcaacctttgacgccctttccccttccccggcaatcccctcaaacaccgactatcccggtcctcattccttcgacgtcagcttccagcagagcagtacggccaaatctgccacctggacttattcaaccgagctaaagaagctgtactgccagattgcaaagacatgcccgatccagatcaaggtcatgacgccaccccctcagggtgctgtgattagagcgatgccagtgtacaagaaggcagagcatgtcacggaggttgtaaagcgctgtccaaaccacgagctgtctcgggaatttaatgagggccagattgctcctccttctcatctcattagagtcgaggggaacagccacgcccagtacgtcgaagaccccatcacgggcaggcagtccgtgctggtgccatacgaaccaccacaagtgggaactgagtttaccacagtgctgtataactttatgtgtaactcttcctgtgtgggcggaatgaacaggagaccgattctgataatagtgaccctagagaccagggatggccaagtgctcggccgtcggtgttttgaggcccgtatctgtgcatgccccggtcgggatcggaaagctgacgaagatagcatccggaagcagcaagtttccgacagtactaaaaatggcgacgggacaaagagaccttttagacagaatacacatggcatacaaatgacctccatcaagaagaggcgatcgccagacgatgagttgctttatctgccagtgcggggaagggaaacctatgagatgttgttgaagataaaggagagcctggaactgatgcagtatctgcctcagcacactatcgagacataccgtcagcagcaacagcagcaacaccagcatctgttgcaaaagcagacctcaatacagagccccagtagctatggcaatagcagcccacctcttaacaaaatgaacagtatgaataagctcccttccgtgagtcagctaatcaatccccaacagagaaatgcattgacccctaccaccataccagacgggatgggggctaacaggagtggaaagtctgaaaatccatag

SEQ ID NO: 43210 - DNA, 1668 bp, Artificial Sequence
  derived and/or modified sequence
atgaatttcgagactagccggtgcgccactctgcagtattgccccgacccttatatccagcggttcgttgagacccctgcacatttttcctggaaagagtcctactataggagtacaatgtcccagagtacacagaccaacgaattccttagccctgaagtctttcagcacatctgggacttcctggaacaacctatctgctctgttcaacctatcgaccttaatttcgtcgatgagccgagcgaagatggcgcaaccaataagattgagatatcaatggactgcattaggatgcaggatagcgacctcagcgacccaatgtggccccagtacactaatctggggctgctcaacagcatggaccagcagatccagaacggaagtagcagcacaagtccatacaatacggaccatgcccagaactcggtcactgcaccttccccctacgcgcagccgtctagtaccttcgacgctctgagccccagtccagctatcccctccaacaccgactatcctgggcctcactccttcgacgtgtcgtttcagcaatccagcactgcaaaaagtgcgacatggacttacagcacagaacttaagaaactatattgtcagatcgcgaaaacgtgtcccatccaaattaaggttatgacccctccccctcagggagccgtaattcgcgctatgcctgtctacaagaaggctgagcacgttaccgaggtggttaaacgctgcccaaatcacgaactgtcgcgagagtttaacgagggccagatcgctcccccaagccacctaatccgtgtcgaggggaactctcacgcccaatacgtcgaggaccccataactggccgacagtcggtactggtcccttacgaaccacctcaagtgggtacagaattcacgacggtgctctataacttcatgtgcaattcatcttgcgtgggtgggatgaaccgaagaccgattcttataatcgttactctcgagactcgggacggccaagtgctaggacgccgatgcttcgaggccagaatctgcgcctgcccaggacgcgacaggaaagctgacgaggacagtatcaggaaacaacaggtgtcggattcaactaaaaatggggatggtacaaagcgaccttttcgacagaatacccacgggatccagatgacttccatcaagaaacggagatctcccgatgatgaactgctctatttgcccgtgcgcggacgagagacttatgagatgctcctaaagataaaagaaagccttgagttgatgcagtacttaccccaacacacaattgagacgtatcggcagcaacagcagcagcagcaccagcacttactgcagaaacagaccagcattcagtccccatcgtcttatggtaactcctcccccccactgaataaaatgaatagcatgaataagttgccaagtgtgtctcagcttattaacccccagcagcgaaacgcacttacgccaaccacaatccccgacggtatgggagctaatattccaatgatgggaacgcatatgcctatggccggtgatatgaacggcctcagccctacacaagctctgccaccacctctgagcatgcccagtacatcccattgcacaccgccaccaccataccctacagattgttctatcgtccggatctggcaggtctag

SEQ ID NO: 43211 - DNA, 2032 bp, Artificial Sequence
  derived and/or modified sequence
tcgttgatatcaaagacagttgaaggaaatgaattttgaaacttcacggtgtgccaccctacagtactgccctgacccttacatccagcgtttcgtagaaaccccagctcatttctcttggaaagaaagttattaccgatccaccatgtcccagagcacacagacaaatgaattcctcagtccagaggttttccagcatatctgggattttctggaacagcctatatgttcagttcagcccattgacttgaactttgtggatgaaccatcagaagatggtgcgacaaacaagattgagattagcatggactgtatccgcatgcaggactcggacctgagtgaccccatgtggccacagtacacgaacctggggctcctgaacagcatggaccagcagattcagaacggctcctcgtccaccagtccctataacacagaccacgcgcagaacagcgtcacggcgccctcgccctacgcacagcccagctccaccttcgatgctctctctccatcacccgccatcccctccaacaccgactacccaggcccgcacagtttcgacgtgtccttccagcagtcgagcaccgccaagtcggccacctggacgtattccactgaactgaagaaactctactgccaaattgcaaagacatgccccatccagatcaaggtgatgaccccacctcctcagggagctgttatccgcgccatgcctgtctacaaaaaagctgagcacgtcacggaggtggtgaagcggtgccccaaccatgagctgagccgtgaattcaacgagggacagattgcccctcctagtcatttgattcgagtagaggggaacagccatgcccagtatgtagaagatcccatcacaggaagacagagtgtgctggtaccttatgagccaccccaggttggcactgaattcacgacagtcttgtacaatttcatgtgtaacagcagttgtgttggagggatgaaccgccgtccaattttaatcattgttactctggaaaccagagatgggcaagtcctgggccgacgctgctttgaggcccggatctgtgcttgcccaggaagagacaggaaggcggatgaagatagcatcagaaagcagcaagtttcggacagtacaaagaacggtgatggtacgaagcgcccgtttcgtcagaacacacatggtatccagatgacatccatcaagaaacgaagatccccagatgatgaactgttatacttaccagtgaggggccgtgagacttatgaaatgctgttgaagatcaaagagtccctggaactcatgcagtaccttcctcagcacacaattgaaacgtacaggcaacagcaacagcagcagcaccagcacttacttcagaaacagacctcaatacagtctccatcttcatatggtaacagctccccacctctgaacaaaatgaacagcatgaacaagctgccttctgtgagccagcttatcaaccctcagcagcgcaacgccctcactcctacaaccattcctgatggcatgggagccaacagatctggcaagtctgaaaatccctgagcaatttcgacatgcgatctggaagggcatcctggaccaccggcagctccacgaattctcctccccttctcatctcctgcggaccccaagcagtgcctctacagtcagtgtgggctccagtgagacccggggtgagcgtgttattgatgctgtgcgattcaccctccgccagaccatctctttcccaccccgagatgagtggaatgacttcaactttgacatggatgctcgccgcaataagcaacagcgcatcaaagaggagggggagtgagcctcaccatgtgagctcttcctatccctctcctaactgccagccccctaaaagcactcctgcttaatcttcaaagccttctccctagctcctccccttcctcttgtctgatttcttaggggaaggagaagtaagaggctacctcttacctaacatctgacctggcatctaattctgattctggctttaagccttcaaaa

SEQ ID NO: 43212 - DNA, 1668 bp, Artificial Sequence
  derived and/or modified sequence
atgaattttgaaacttcacggtgtgccaccctacagtactgccctgacccttacatccagcgtttcgtagaaaccccagctcatttctcttggaaagaaagttattaccgatccaccatgtcccagagcacacagacaaatgaattcctcagtccagaggttttccagcatatctgggattttctggaacagcctatatgttcagttcagcccattgacttgaactttgtggatgaaccatcagaagatggtgcgacaaacaagattgagattagcatggactgtatccgcatgcaggactcggacctgagtgaccccatgtggccacagtacacgaacctggggctcctgaacagcatggaccagcagattcagaacggctcctcgtccaccagtccctataacacagaccacgcgcagaacagcgtcacggcgccctcgccctacgcacagcccagctccaccttcgatgctctctctccatcacccgccatcccctccaacaccgactacccaggcccgcacagtttcgacgtgtccttccagcagtcgagcaccgccaagtcggccacctggacgtattccactgaactgaagaaactctactgccaaattgcaaagacatgccccatccagatcaaggtgatgaccccacctcctcagggagctgttatccgcgccatgcctgtctacaaaaaagctgagcacgtcacggaggtggtgaagcggtgccccaaccatgagctgagccgtgaattcaacgagggacagattgcccctcctagtcatttgattcgagtagaggggaacagccatgcccagtatgtagaagatcccatcacaggaagacagagtgtgctggtaccttatgagccaccccaggttggcactgaattcacgacagtcttgtacaatttcatgtgtaacagcagttgtgttggagggatgaaccgccgtccaattttaatcattgttactctggaaaccagagatgggcaagtcctgggccgacgctgctttgaggcccggatctgtgcttgcccaggaagagacaggaaggcggatgaagatagcatcagaaagcagcaagtttcggacagtacaaagaacggtgatggtacgaagcgcccgtttcgtcagaacacacatggtatccagatgacatccatcaagaaacgaagatccccagatgatgaactgttatacttaccagtgaggggccgtgagacttatgaaatgctgttgaagatcaaagagtccctggaactcatgcagtaccttcctcagcacacaattgaaacgtacaggcaacagcaacagcagcagcaccagcacttacttcagaaacagacctcaatacagtctccatcttcatatggtaacagctccccacctctgaacaaaatgaacagcatgaacaagctgccttctgtgagccagcttatcaaccctcagcagcgcaacgccctcactcctacaaccattcctgatggcatgggagccaacattcccatgatgggcacccacatgccaatggctggagacatgaatggactcagccccacccaggcactccctcccccactctccatgccatccacctcccactgcacacccccacctccgtatcccacagattgcagcattgtcaggatctggcaagtctga

SEQ ID NO: 43213 - protein, 487 aa, Artificial Sequence
  derived and/or modified sequence
MNFETSRCATLQYCPDPYIQRFVETPAHFSWKESYYRSTMSQSTQTNEFLSPEVFQHIWDFLEQPICSVQPIDLNFVDEPSEDGATNKIEISMDCIRMQDSDLSDPMWPQYTNLGLLNSMDQQIQNGSSSTSPYNTDHAQNSVTAPSPYAQPSSTFDALSPSPAIPSNTDYPGPHSFDVSFQQSSTAKSATWTYSTELKKLYCQIAKTCPIQIKVMTPPPQGAVIRAMPVYKKAEHVTEVVKRCPNHELSREFNEGQIAPPSHLIRVEGNSHAQYVEDPITGRQSVLVPYEPPQVGTEFTTVLYNFMCNSSCVGGMNRRPILIIVTLETRDGQVLGRRCFEARICACPGRDRKADEDSIRKQQVSDSTKNGDGTKRPFRQNTHGIQMTSIKKRRSPDDELLYLPVRGRETYEMLLKIKESLELMQYLPQHTIETYRQQQQQQHQHLLQKHLLSACFRNELVEPRRETPKQSDVFFRHSKPPNRSVYP

SEQ ID NO: 43214 - DNA, 1464 bp, Artificial Sequence
  derived and/or modified sequence
atgaacttcgagaccagcagatgcgccaccctgcagtactgccccgacccctacatccagagattcgtggagacccccgcccacttcagctggaaggagagctactacagaagcaccatgagccagagcacccagaccaacgagttcctgagccccgaggtgttccagcacatctgggacttcctggagcagcccatctgcagcgtgcagcccatcgacctgaacttcgtggacgagcccagcgaggacggcgccaccaacaagatcgagatcagcatggactgcatcagaatgcaggacagcgacctgagcgaccccatgtggccccagtacaccaacctgggcctgctgaacagcatggaccagcagatccagaacggcagcagcagcaccagcccctacaacaccgaccacgcccagaacagcgtgaccgcccccagcccctacgcccagcccagcagcaccttcgacgccctgagccccagccccgccatccccagcaacaccgactaccccggcccccacagcttcgacgtgagcttccagcagagcagcaccgccaagagcgccacctggacctacagcaccgagctgaagaagctgtactgccagatcgccaagacctgccccatccagatcaaggtgatgaccccccccccccagggcgccgtgatcagagccatgcccgtgtacaagaaggccgagcacgtgaccgaggtggtgaagagatgccccaaccacgagctgagcagagagttcaacgagggccagatcgccccccccagccacctgatcagagtggagggcaacagccacgcccagtacgtggaggaccccatcaccggcagacagagcgtgctggtgccctacgagcccccccaggtgggcaccgagttcaccaccgtgctgtacaacttcatgtgcaacagcagctgcgtgggcggcatgaacagaagacccatcctgatcatcgtgaccctggagaccagagacggccaggtgctgggcagaagatgcttcgaggccagaatctgcgcctgccccggcagagacagaaaggccgacgaggacagcatcagaaagcagcaggtgagcgacagcaccaagaacggcgacggcaccaagagacccttcagacagaacacccacggcatccagatgaccagcatcaagaagagaagaagccccgacgacgagctgctgtacctgcccgtgagaggcagagagacctacgagatgctgctgaagatcaaggagagcctggagctgatgcagtacctgccccagcacaccatcgagacctacagacagcagcagcagcagcagcaccagcacctgctgcagaagcacctgctgagcgcctgcttcagaaacgagctggtggagcccagaagagagacccccaagcagagcgacgtgttcttcagacacagcaagccccccaacagaagcgtgtacccctag

SEQ ID NO: 43215 - DNA, 1464 bp, Artificial Sequence
  derived and/or modified sequence
atgaattttgagaccagtagatgcgctaccctccaatattgtcccgatccttacatccagagatttgttgagacacccgctcacttttcttggaaggaatcctactataggtctactatgtctcagagcacccagacaaatgaattcttgtctcccgaggtctttcagcatatatgggatttcttggagcagcctatttgttcagtgcagcccattgaccttaatttcgtagacgagccgagtgaggacggagcgactaacaagatcgaaatcagtatggactgcattagaatgcaggacagcgacttgagcgatccgatgtggccacaatatacaaaccttggcttgctgaactcaatggaccaacaaatccagaatggttcctccagcaccagtccttacaacacggaccacgcacaaaattctgtgaccgctccttccccatacgcacaaccatctagtaccttcgacgcactgtctccgtccccggctatcccctccaacaccgattacccagggccacacagcttcgatgtcagctttcagcaatcctccaccgccaagtctgcgacatggacttattctactgaacttaaaaaactgtattgccagatagccaagacgtgcccaattcagatcaaagtgatgacaccaccacctcagggtgccgtcataagagccatgcccgtgtacaagaaagcggagcacgtcacagaggtagttaaaagatgtcctaaccacgagctcagtcgagaattcaatgagggccaaattgccccaccttcccatcttattcgcgttgaaggcaattcacacgcacagtacgtggaagatcctataacaggcagacagagtgtactggtaccctacgagccaccacaagtgggaacagagttcaccactgttttatataactttatgtgtaacagtagctgtgtcggaggaatgaacagacgccctatcctcattatcgtcacgttagaaacacgagacgggcaggttctggggcgccgctgctttgaagcccgtatatgcgcatgtccaggccgagataggaaggccgacgaagattcaatcagaaagcaacaggtgagcgattcaacgaaaaatggcgatggcacaaagcggccgttcagacagaacacccatggaattcagatgaccagcattaagaagcggaggtcacctgacgatgaactgctttacctccctgtgcgaggccgggaaacttatgaaatgctgctaaagataaaagaaagtctggagctgatgcagtacttacctcagcatacgatcgagacctataggcagcagcagcagcagcagcatcaacatctccttcagaaacacttattgagcgcgtgctttagaaacgaactggtggaacccaggagggaaactcctaaacagtctgacgtgttcttccgccactccaaaccaccaaacagaagcgtctacccctag

SEQ ID NO: 43216 - DNA, 1464 bp, Artificial Sequence
  derived and/or modified sequence
atgaactttgagaccagccgctgtgccaccctgcagtactgcccagacccctacatccagagatttgtggagaccccagcccacttctcctggaaggagagctactaccgcagcaccatgagccagagcacccagaccaatgagttcctgagccctgaggtgttccagcacatctgggacttcctggagcagcccatctgcagcgtgcagcccatcgacctgaactttgtggatgagcccagtgaagatggagccaccaacaagattgagatctccatggactgcatccgcatgcaggacagcgacctgagtgaccccatgtggccccagtacaccaacctgggcctgctgaacagcatggaccagcagatccagaatggcagcagcagcaccagcccctacaacacagaccacgcccagaacagcgtgacagcccccagcccctatgcccagcccagcagcacctttgatgccctgagccccagccctgccatccccagcaacacagactacccaggcccccacagctttgatgtgtccttccagcagagcagcacagccaagagcgccacctggacctacagcacagagctgaagaagctgtactgccagatcgccaagacctgccccatccagatcaaggtgatgaccccaccaccccagggcgctgtgatccgggccatgcctgtgtacaagaaggccgagcacgtgacagaggtggtgaagcgctgccccaaccacgagctgagccgggagttcaatgaaggccagatcgccccacccagccacctgatccgggtggagggcaacagccacgcccagtatgtggaggaccccatcaccggccggcagagcgtgctggtgccctatgagcccccccaggtgggcacagagttcaccaccgtgctgtacaacttcatgtgcaacagcagctgtgtgggcggcatgaacagaagacccatcctgatcatcgtgaccctggagaccagagatggccaggtgctgggccgccgctgctttgaggcccgcatctgtgcctgccccggccgggacaggaaggcagatgaggacagcatcaggaagcagcaggtgtctgacagcaccaagaatggagatggcaccaagaggcccttccggcagaacacccacggcatccagatgaccagcatcaagaagagaagaagcccagatgatgagctgctgtacctgcctgtgcggggccgggagacctatgagatgctgctgaagatcaaggagagcctggagctgatgcagtacctgccccagcacaccatcgagacctaccggcagcagcagcagcagcagcaccagcacctgctgcagaagcacctgctgagcgcctgcttcagaaatgagctggtggagccccggcgggagacccccaagcagagtgatgtgttcttccgccacagcaagccacccaacagatctgtgtacccctag

SEQ ID NO: 43217 - DNA, 1464 bp, Artificial Sequence
  derived and/or modified sequence
atgaacttcgagaccagccggtgcgccaccctgcagtactgccccgacccctatattcaaagattcgtggaaacccccgctcacttcagttggaaagagtcctattaccgcagcactatgtcacagtctactcagaccaatgagtttttgagcccagaagtgtttcagcacatatgggatttcttggagcaaccaatttgctctgtgcagcccattgatctgaacttcgtcgatgagccaagcgaagatggagcgaccaacaagattgagataagcatggattgtatccggatgcaggattccgacctcagcgatcccatgtggcctcagtataccaatctcggcctgctgaactctatggaccaacagatacagaacggcagctcttccacaagtccatataacaccgaccatgctcagaatagcgtgaccgctcctagcccctatgcacaacctagctctactttcgacgcactctctccatctcccgcaattccaagcaataccgactaccccggcccccacagctttgacgtatcatttcagcagtcctccacggccaagtccgcaacttggacctattccaccgagctgaagaaactatactgccagatcgcaaagacttgtcctatccagatcaaagttatgaccccacctcctcagggggccgtgatcagagccatgccagtctataaaaaagccgagcacgtgacggaagtcgtcaaaaggtgcccaaaccacgaattgtcacgggaattcaacgagggtcaaattgccccaccctctcatctgataagagtggaagggaacagccatgcccaatacgtcgaagatcctataacaggacgccaatccgtgctggtgccatacgagcctccccaggttggtactgaattcactaccgttctatacaactttatgtgtaacagctcttgtgtcggaggaatgaaccgccgacctatcttaatcattgtcacccttgagaccagagatggacaggtcctgggacgtaggtgttttgaggctcgcatctgcgcctgccctggtcgtgaccgtaaagccgacgaagacagtattagaaagcagcaggtgtcagacagtacaaagaacggcgatggcaccaagagaccattcagacagaacacacacggaatccagatgacctctatcaagaagcgccgctcgcccgatgatgaactgctctacttgcccgtgcggggaagggagacttatgagatgctgttaaagatcaaggaatccctcgaactgatgcagtacctgccccagcatacaatcgagacatatcgtcagcagcaacagcagcagcaccagcatctgctgcagaaacacctattgtctgcatgtttcagaaatgagctggtcgagccccggcgggagacacccaaacagtcagacgtgttcttccggcatagtaagccgcctaatcggtcagtctacccgtag

SEQ ID NO: 43218 - DNA, 1464 bp, Artificial Sequence
  derived and/or modified sequence
atgaattttgaaaccagtcgatgtgccacgcttcaatactgtccagacccctatattcagcgcttcgtggaaacccccgcacactttagctggaaggagtcctattatcgttccaccatgtctcagtcaacacaaaccaatgagttcttgtcccccgaagttttccagcatatctgggacttccttgaacagcccatatgtagtgtgcagcctatagatctcaacttcgttgacgagccaagtgaagatggggcaaccaataagatcgaaatcagcatggattgtattcggatgcaggactccgacctgagcgatcctatgtggcctcagtataccaatcttggcctgctgaattccatggatcagcagatccaaaacgggtcctccagtacctccccatacaatactgaccatgcccagaattctgttacggcaccctccccttacgctcagcctagcagcacattcgacgcactctccccgagcccggctatcccttcaaacaccgactaccccggaccccattcttttgacgtttcgttccaacagtctagtactgccaaaagtgctacttggacatactctacagaactcaaaaaactttactgccaaattgccaaaacctgccccatccagataaaggttatgacaccacctccccagggggcagtgatccgtgcgatgcccgtttacaagaaggcagaacacgtcaccgaggtagttaaaaggtgcccaaatcacgaactgtcgcgcgagtttaatgaagggcagatcgcccctccttctcacctcatcagggtggaagggaactctcacgcacaatacgtcgaagatccgatcactggcagacagtccgtcctcgtaccctatgagccgcctcaggtgggcactgagttcacaacagtgttgtataacttcatgtgtaattcctcctgtgtgggagggatgaatcggaggccaatcctcattatcgtcaccctcgagacccgggatggtcaggtgctgggcaggcgctgtttcgaggctcgtatttgcgcctgtccaggccgagacaggaaggcagacgaggacagcattaggaagcagcaggtctccgacagcacgaaaaacggggacgggacaaagcgcccttttcgtcagaacacacacgggatccagatgacgtctattaaaaaaagaagaagcccagatgacgagttgctctacctgccagtgcggggtcgggagacgtacgaaatgctcctgaaaattaaagagtcattggagctcatgcagtacctgccccagcacaccattgagacatacagacagcagcagcagcagcagcaccagcacctgctgcaaaaacatttgttatcggcatgctttcggaacgagctggtagaaccaagacgcgagactcctaaacaaagtgatgtttttttccggcacagcaaaccaccaaaccgcagcgtgtacccttag

SEQ ID NO: 43219 - DNA, 2810 bp, Artificial Sequence
  derived and/or modified sequence
tcgttgatatcaaagacagttgaaggaaatgaattttgaaacttcacggtgtgccaccctacagtactgccctgacccttacatccagcgtttcgtagaaaccccagctcatttctcttggaaagaaagttattaccgatccaccatgtcccagagcacacagacaaatgaattcctcagtccagaggttttccagcatatctgggattttctggaacagcctatatgttcagttcagcccattgacttgaactttgtggatgaaccatcagaagatggtgcgacaaacaagattgagattagcatggactgtatccgcatgcaggactcggacctgagtgaccccatgtggccacagtacacgaacctggggctcctgaacagcatggaccagcagattcagaacggctcctcgtccaccagtccctataacacagaccacgcgcagaacagcgtcacggcgccctcgccctacgcacagcccagctccaccttcgatgctctctctccatcacccgccatcccctccaacaccgactacccaggcccgcacagtttcgacgtgtccttccagcagtcgagcaccgccaagtcggccacctggacgtattccactgaactgaagaaactctactgccaaattgcaaagacatgccccatccagatcaaggtgatgaccccacctcctcagggagctgttatccgcgccatgcctgtctacaaaaaagctgagcacgtcacggaggtggtgaagcggtgccccaaccatgagctgagccgtgaattcaacgagggacagattgcccctcctagtcatttgattcgagtagaggggaacagccatgcccagtatgtagaagatcccatcacaggaagacagagtgtgctggtaccttatgagccaccccaggttggcactgaattcacgacagtcttgtacaatttcatgtgtaacagcagttgtgttggagggatgaaccgccgtccaattttaatcattgttactctggaaaccagagatgggcaagtcctgggccgacgctgctttgaggcccggatctgtgcttgcccaggaagagacaggaaggcggatgaagatagcatcagaaagcagcaagtttcggacagtacaaagaacggtgatggtacgaagcgcccgtttcgtcagaacacacatggtatccagatgacatccatcaagaaacgaagatccccagatgatgaactgttatacttaccagtgaggggccgtgagacttatgaaatgctgttgaagatcaaagagtccctggaactcatgcagtaccttcctcagcacacaattgaaacgtacaggcaacagcaacagcagcagcaccagcacttacttcagaaacatctcctttcagcctgcttcaggaatgagcttgtggagccccggagagaaactccaaaacaatctgacgtcttctttagacattccaagcccccaaaccgatcagtgtacccatagagccctatctctatattttaagtgtgtgtgttgtatttccatgtgtatatgtgagtgtgtgtgtgtgtatgtgtgtgcgtgtgtatctagccctcataaacaggacttgaagacactttggctcagagacccaactgctcaaaggcacaaagccactagtgagagaatcttttgaagggactcaaacctttacaagaaaggatgttttctgcagattttgtatccttagaccggccattggtgggtgaggaaccactgtgtttgtctgtgagctttctgttgtttcctgggagggaggggtcaggtggggaaaggggcattaagatgtttattggaacccttttctgtcttcttctgttgtttttctaaaattcacagggaagcttttgagcaggtctcaaacttaagatgtctttttaagaaaaggagaaaaaagttgttattgtctgtgcataagtaagttgtaggtgactgagagactcagtcagacccttttaatgctggtcatgtaataatattgcaagtagtaagaaacgaaggtgtcaagtgtactgctgggcagcgaggtgatcattaccaaaagtaatcaactttgtgggtggagagttctttgtgagaacttgcattatttgtgtcctcccctcatgtgtaggtagaacatttcttaatgctgtgtacctgcctctgccactgtatgttggcatctgttatgctaaagtttttcttgtacatgaaaccctggaagacctactacaaaaaaactgttgtttggcccccatagcaggtgaactcattttgtgcttttaatagaaagacaaatccaccccagtaatattgcccttacgtagttgtttaccattattcaaagctcaaaatagaatttgaagccctctcacaaaatctgtgattaatttgcttaattagagcttctatccctcaagcctacctaccataaaaccagccatattactgatactgttcagtgcatttagccaggagacttacgttttgagtaagtgagatccaagcagacgtgttaaaatcagcactcctggactggaaattaaagattgaaagggtagactacttttcttttttttactcaaaagtttagagaatctctgtttctttccattttaaaaacatattttaagataatagcataaagactttaaaaatgttcctcccctccatcttcccacacccagtcaccagcactgtattttctgtcaccaagacaatgatttcttgttattgaggctgttgcttttgtggatgtgtgattttaattttcaataaacttttgcatcttggttta

SEQ ID NO: 43220 - protein, 586 aa, Artificial Sequence
  derived and/or modified sequence
MLYLENNAQTQFSEPQYTNLGLLNSMDQQIQNGSSSTSPYNTDHAQNSVTAPSPYAQPSSTFDALSPSPAIPSNTDYPGPHSFDVSFQQSSTAKSATWTYSTELKKLYCQIAKTCPIQIKVMTPPPQGAVIRAMPVYKKAEHVTEVVKRCPNHELSREFNEGQIAPPSHLIRVEGNSHAQYVEDPITGRQSVLVPYEPPQVGTEFTTVLYNFMCNSSCVGGMNRRPILIIVTLETRDGQVLGRRCFEARICACPGRDRKADEDSIRKQQVSDSTKNGDGTKRPFRQNTHGIQMTSIKKRRSPDDELLYLPVRGRETYEMLLKIKESLELMQYLPQHTIETYRQQQQQQHQHLLQKQTSIQSPSSYGNSSPPLNKMNSMNKLPSVSQLINPQQRNALTPTTIPDGMGANIPMMGTHMPMAGDMNGLSPTQALPPPLSMPSTSHCTPPPPYPTDCSIVSFLARLGCSSCLDYFTTQGLTTIYQIEHYSMDDLASLKIPEQFRHAIWKGILDHRQLHEFSSPSHLLRTPSSASTVSVGSSETRGERVIDAVRFTLRQTISFPPRDEWNDFNFDMDARRNKQQRIKEEGE

SEQ ID NO: 43221 - protein, 595 aa, Artificial Sequence
  derived and/or modified sequence
MNFETSRCATLQYCPDPYIQRFVETPAHFSWKESYYRSTMSQSTQTNEFLSPEVFQHIWDFLEQPICSVQPIDLNFVDEPSEDGATNKIEISMDCIRMQDSDLSDPMWYSTELKKLYCQIAKTCPIQIKVMTPPPQGAVIRAMPVYKKAEHVTEVVKRCPNHELSREFNEGQIAPPSHLIRVEGNSHAQYVEDPITGRQSVLVPYEPPQVGTEFTTVLYNFMCNSSCVGGMNRRPILIIVTLETRDGQVLGRRCFEARICACPGRDRKADEDSIRKQQVSDSTKNGDGTKRPFRQNTHGIQMTSIKKRRSPDDELLYLPVRGRETYEMLLKIKESLELMQYLPQHTIETYRQQQQQQHQHLLQKQTSIQSPSSYGNSSPPLNKMNSMNKLPSVSQLINPQQRNALTPTTIPDGMGANIPMMGTHMPMAGDMNGLSPTQALPPPLSMPSTSHCTPPPPYPTDCSIVSFLARLGCSSCLDYFTTQGLTTIYQIEHYSMDDLASLKIPEQFRHAIWKGILDHRQLHEFSSPSHLLRTPSSASTVSVGSSETRGERVIDAVRFTLRQTISFPPRDEWNDFNFDMDARRNKQQRIKEEGE

SEQ ID NO: 43222 - protein, 416 aa, Artificial Sequence
  derived and/or modified sequence
MLYLENNAQTQFSEPQYTNLGLLNSMDQQIQNGSSSTSPYNTDHAQNSVTAPSPYAQPSSTFDALSPSPAIPSNTDYPGPHSFDVSFQQSSTAKSATWTYSTELKKLYCQIAKTCPIQIKVMTPPPQGAVIRAMPVYKKAEHVTEVVKRCPNHELSREFNEGQIAPPSHLIRVEGNSHAQYVEDPITGRQSVLVPYEPPQVGTEFTTVLYNFMCNSSCVGGMNRRPILIIVTLETRDGQVLGRRCFEARICACPGRDRKADEDSIRKQQVSDSTKNGDGTKRPFRQNTHGIQMTSIKKRRSPDDELLYLPVRGRETYEMLLKIKESLELMQYLPQHTIETYRQQQQQQHQHLLQKQTSIQSPSSYGNSSPPLNKMNSMNKLPSVSQLINPQQRNALTPTTIPDGMGANRSGKSENP

SEQ ID NO: 43223 - protein, 501 aa, Artificial Sequence
  derived and/or modified sequence
MLYLENNAQTQFSEYSTELKKLYCQIAKTCPIQIKVMTPPPQGAVIRAMPVYKKAEHVTEVVKRCPNHELSREFNEGQIAPPSHLIRVEGNSHAQYVEDPITGRQSVLVPYEPPQVGTEFTTVLYNFMCNSSCVGGMNRRPILIIVTLETRDGQVLGRRCFEARICACPGRDRKADEDSIRKQQVSDSTKNGDGTKRPFRQNTHGIQMTSIKKRRSPDDELLYLPVRGRETYEMLLKIKESLELMQYLPQHTIETYRQQQQQQHQHLLQKQTSIQSPSSYGNSSPPLNKMNSMNKLPSVSQLINPQQRNALTPTTIPDGMGANIPMMGTHMPMAGDMNGLSPTQALPPPLSMPSTSHCTPPPPYPTDCSIVSFLARLGCSSCLDYFTTQGLTTIYQIEHYSMDDLASLKIPEQFRHAIWKGILDHRQLHEFSSPSHLLRTPSSASTVSVGSSETRGERVIDAVRFTLRQTISFPPRDEWNDFNFDMDARRNKQQRIKEEGE

SEQ ID NO: 43224 - DNA, 1761 bp, Artificial Sequence
  derived and/or modified sequence
atgctgtacctggagaacaacgcccagacccagttcagcgagccccagtacaccaacctgggcctgctgaacagcatggaccagcagatccagaacggcagcagcagcaccagcccctacaacaccgaccacgcccagaacagcgtgaccgcccccagcccctacgcccagcccagcagcaccttcgacgccctgagccccagccccgccatccccagcaacaccgactaccccggcccccacagcttcgacgtgagcttccagcagagcagcaccgccaagagcgccacctggacctacagcaccgagctgaagaagctgtactgccagatcgccaagacctgccccatccagatcaaggtgatgaccccccccccccagggcgccgtgatcagagccatgcccgtgtacaagaaggccgagcacgtgaccgaggtggtgaagagatgccccaaccacgagctgagcagagagttcaacgagggccagatcgccccccccagccacctgatcagagtggagggcaacagccacgcccagtacgtggaggaccccatcaccggcagacagagcgtgctggtgccctacgagcccccccaggtgggcaccgagttcaccaccgtgctgtacaacttcatgtgcaacagcagctgcgtgggcggcatgaacagaagacccatcctgatcatcgtgaccctggagaccagagacggccaggtgctgggcagaagatgcttcgaggccagaatctgcgcctgccccggcagagacagaaaggccgacgaggacagcatcagaaagcagcaggtgagcgacagcaccaagaacggcgacggcaccaagagacccttcagacagaacacccacggcatccagatgaccagcatcaagaagagaagaagccccgacgacgagctgctgtacctgcccgtgagaggcagagagacctacgagatgctgctgaagatcaaggagagcctggagctgatgcagtacctgccccagcacaccatcgagacctacagacagcagcagcagcagcagcaccagcacctgctgcagaagcagaccagcatccagagccccagcagctacggcaacagcagcccccccctgaacaagatgaacagcatgaacaagctgcccagcgtgagccagctgatcaacccccagcagagaaacgccctgacccccaccaccatccccgacggcatgggcgccaacatccccatgatgggcacccacatgcccatggccggcgacatgaacggcctgagccccacccaggccctgcccccccccctgagcatgcccagcaccagccactgcacccccccccccccctaccccaccgactgcagcatcgtgagcttcctggccagactgggctgcagcagctgcctggactacttcaccacccagggcctgaccaccatctaccagatcgagcactacagcatggacgacctggccagcctgaagatccccgagcagttcagacacgccatctggaagggcatcctggaccacagacagctgcacgagttcagcagccccagccacctgctgagaacccccagcagcgccagcaccgtgagcgtgggcagcagcgagaccagaggcgagagagtgatcgacgccgtgagattcaccctgagacagaccatcagcttcccccccagagacgagtggaacgacttcaacttcgacatggacgccagaagaaacaagcagcagagaatcaaggaggagggcgagtag

SEQ ID NO: 43225 - DNA, 1749 bp, Artificial Sequence
  derived and/or modified sequence
atgctgtacctggagaacaacgcccagacccagttcagcgagccccagtacaccaacctgggcctgctgaacagcatggaccagcagatccagaacggcagcagcagcaccagcccctacaacaccgaccacgcccagaacagcgtgaccgcccccagcccctacgcccagcccagcagcaccttcgacgccctgagccccagccccgccatccccagcaacaccgactaccccggcccccacagcttcgacgtgagcttccagcagagcagcaccgccaagagcgccacctggacctacagcaccgagctgaagaagctgtactgccagatcgccaagacctgccccatccagatcaaggtgatgaccccccccccccagggcgccgtgatcagagccatgcccgtgtacaagaaggccgagcacgtgaccgaggtggtgaagagatgccccaaccacgagctgagcagagagttcaacgagggccagatcgccccccccagccacctgatcagagtggagggcaacagccacgcccagtacgtggaggaccccatcaccggcagacagagcgtgctggtgccctacgagcccccccaggtgggcaccgagttcaccaccgtgctgtacaacttcatgtgcaacagcagctgcgtgggcggcatgaacagaagacccatcctgatcatcgtgaccctggagaccagagacggccaggtgctgggcagaagatgcttcgaggccagaatctgcgcctgccccggcagagacagaaaggccgacgaggacagcatcagaaagcagcaggtgagcgacagcaccaagaacggcgacgccttcagacagaacacccacggcatccagatgaccagcatcaagaagagaagaagccccgacgacgagctgctgtacctgcccgtgagaggcagagagacctacgagatgctgctgaagatcaaggagagcctggagctgatgcagtacctgccccagcacaccatcgagacctacagacagcagcagcagcagcagcaccagcacctgctgcagaagcagaccagcatccagagccccagcagctacggcaacagcagcccccccctgaacaagatgaacagcatgaacaagctgcccagcgtgagccagctgatcaacccccagcagagaaacgccctgacccccaccaccatccccgacggcatgggcgccaacatccccatgatgggcacccacatgcccatggccggcgacatgaacggcctgagccccacccaggccctgcccccccccctgagcatgcccagcaccagccactgcacccccccccccccctaccccaccgactgcagcatcgtgagcttcctggccagactgggctgcagcagctgcctggactacttcaccacccagggcctgaccaccatctaccagatcgagcactacagcatggacgacctggccagcctgaagatccccgagcagttcagacacgccatctggaagggcatcctggaccacagacagctgcacgagttcagcagccccagccacctgctgagaacccccagcagcgccagcaccgtgagcgtgggcagcagcgagaccagaggcgagagagtgatcgacgccgtgagattcaccctgagacagaccatcagcttcccccccagagacgagtggaacgacttcaacttcgacatggacgccagaagaaacaagcagcagagaatcaaggaggagggcgagtag

SEQ ID NO: 43226 - DNA, 1761 bp, Artificial Sequence
  derived and/or modified sequence
atgctgtatctggagaacaacgcacagactcaattttctgagccgcagtacaccaacctgggcctgctgaatagcatggaccaacaaatccagaatggaagctcgtctactagcccgtacaatactgaccatgctcaaaactctgttactgcaccaagtccttacgcccagccgtcgtctaccttcgatgccctttcacccagccccgctataccttccaacactgactatcctggcccacactctttcgacgtatcattccagcagagcagcactgcaaagagcgccacctggacgtactctaccgagctgaagaaattgtactgccagatagcgaaaacatgccctatccagatcaaggttatgactcctcctcctcagggcgcagtgattagggccatgcccgtgtacaagaaggccgaacacgttactgaggtcgttaaaaggtgccctaatcatgagctgtcccgcgagtttaacgagggccagatcgcgccaccgagccacctgatccgggttgagggaaactctcatgcccaatacgtggaggatccaatcacagggcgacagtcagtgctcgttccatatgaacctccccaagtgggcaccgagtttacaactgtgctgtacaactttatgtgcaactcttcatgtgtggggggcatgaaccgaaggccaatcctgatcatcgtgactctggagacccgagatggacaggtcctaggtcgaaggtgcttcgaagccaggatctgcgcttgtccaggccgagataggaaagcagacgaggattctatccgtaagcaacaagtgtctgattcaaccaagaatggagatggaactaagaggccctttaggcagaacacccacggaatccagatgacctctattaagaagcgtcggtctccggacgacgaacttttgtatctgcctgtgcgcggtcgcgaaacttatgaaatgttgctcaagattaaggaatccctggagctgatgcagtacctcccacagcatactattgaaacttatcgtcagcaacaacagcagcagcatcaacatttgttgcagaaacagacctccatccagtcacccagttcttatggcaactctagcccacctttgaataagatgaattctatgaataaactaccctccgtttctcagctcattaacccccagcagcgaaatgccctaacaccaacaactatcccggacgggatgggggcgaatatcccgatgatgggaacccacatgcctatggccggagacatgaacgggttgtcccctacccaggcgctgccacctccactttctatgccttctaccagtcactgcacgccccctcccccatatcccaccgactgtagtatcgtgtcattcttagctagactggggtgctcgtcatgtctggattatttcacaacccaggggctgacaacgatttaccagatagaacactattcaatggacgacctggcttcactgaaaattcctgaacaattccggcacgcgatctggaaagggattctggatcaccgccagctgcatgaattctccagtcctagccatctcctcagaacacccagctcagcaagcacagtatcagtgggttctagtgagactcgcggagaacgggttatcgatgccgtccgcttcaccctgcggcaaaccatttcttttcctccacgcgacgagtggaacgactttaacttcgacatggatgccagaaggaacaaacaacagcgtattaaggaggagggcgaatag

SEQ ID NO: 43227 - DNA, 1749 bp, Artificial Sequence
  derived and/or modified sequence
atgctgtacctggagaataacgcccagactcagttttctgagccacagtacactaatttggggctgctgaactctatggaccagcaaatccagaatggcagttcgagtacgtctccatataacacagaccacgcacagaactcagttacagcgccatcaccctatgcacagccctcttctacgttcgacgccttgtcaccgtctcctgctatcccatccaataccgattatcctggaccacacagctttgatgtgagttttcagcagagctcaaccgcaaagagcgctacttggacgtatagcactgagctaaaaaagctgtactgccaaatagctaagacttgtccgatccaaattaaggtcatgaccccccctcctcagggcgcggtgatcagggctatgcccgtgtataaaaaggccgagcacgtcacagaggtcgtcaagcggtgccctaatcacgagctgtcacgagaattcaacgagggtcaaatcgcccccccctcccacttaatcagagtagaaggaaactctcacgctcagtatgtggaggaccctatcactggccggcaatccgtgctcgtgccgtacgaaccccctcaggtgggcaccgaattcacaaccgtactgtacaatttcatgtgcaactcatcatgtgtgggaggtatgaatcgccgcccaatacttatcattgtcaccctggagactcgggacgggcaggttctgggtcgtcgctgttttgaggcaaggatttgtgcatgcccgggacgcgatagaaaggccgatgaggacagcatacgtaaacagcaggtgtcggattctacgaagaacggcgacgcatttcgacagaacacccatggcattcagatgacgtccattaagaagcgcaggtctcctgacgatgagctgctgtatctgccagtcagaggcagagaaacttatgagatgttactaaagataaaagaatctctagagctcatgcaatacctcccacagcacacaattgaaacctatcggcaacagcagcagcaacaacatcagcatcttctgcagaaacagacgagcatccagagcccttcctcctacggtaactccagtccccctctgaacaaaatgaacagtatgaataaactgccatccgttagccagttaataaatccacaacagaggaacgcccttactcccaccaccatccccgacggcatgggtgccaacattcccatgatgggtacgcacatgcctatggcaggagacatgaatggactgagcccgacccaagcacttccccccccattgtccatgcctagcacctcccactgtacgccccccccaccttatcccactgattgcagtatcgtatcctttttggcccgcctgggctgcagcagctgtctggattatttcactacccagggcttaaccactatctatcaaatcgaacactactccatggatgatcttgcaagccttaaaatcccagagcagttccgtcacgccatttggaagggtattctggatcaccgccagctccacgaattttcttcaccttcccacttgttgaggactcccagctctgcctcgaccgtttccgtgggatcgtccgagaccaggggagagagagtaatcgacgctgtccgatttacactgaggcagaccatatcctttccgccaagggacgaatggaacgactttaactttgacatggatgccaggagaaacaagcagcaacgtataaaggaagaaggagaatag

SEQ ID NO: 43228 - DNA, 1761 bp, Artificial Sequence
  derived and/or modified sequence
atgctgtacctggagaacaatgcccagacccagttcagcgagccccagtacaccaacctgggcctgctgaacagcatggaccagcagatccagaatggcagcagcagcaccagcccctacaacacagaccacgcccagaacagcgtgacagcccccagcccctatgcccagcccagcagcacctttgatgccctgagccccagccctgccatccccagcaacacagactacccaggcccccacagctttgatgtgtccttccagcagagcagcacagccaagagcgccacctggacctacagcacagagctgaagaagctgtactgccagatcgccaagacctgccccatccagatcaaggtgatgaccccaccaccccagggcgctgtgatccgggccatgcctgtgtacaagaaggccgagcacgtgacagaggtggtgaagcgctgccccaaccacgagctgagccgggagttcaatgaaggccagatcgccccacccagccacctgatccgggtggagggcaacagccacgcccagtatgtggaggaccccatcaccggccggcagagcgtgctggtgccctatgagcccccccaggtgggcacagagttcaccaccgtgctgtacaacttcatgtgcaacagcagctgtgtgggcggcatgaacagaagacccatcctgatcatcgtgaccctggagaccagagatggccaggtgctgggccgccgctgctttgaggcccgcatctgtgcctgccccggccgggacaggaaggcagatgaggacagcatcaggaagcagcaggtgtctgacagcaccaagaatggagatggcaccaagaggcccttccggcagaacacccacggcatccagatgaccagcatcaagaagagaagaagcccagatgatgagctgctgtacctgcctgtgcggggccgggagacctatgagatgctgctgaagatcaaggagagcctggagctgatgcagtacctgccccagcacaccatcgagacctaccggcagcagcagcagcagcagcaccagcacctgctgcagaagcagaccagcatccagagccccagcagctatggcaacagcagcccccccctgaacaagatgaacagcatgaacaagctgcccagcgtgtcccagctgatcaacccccagcagagaaatgccctgacccccaccaccatcccagatggcatgggcgccaacatccccatgatgggcacccacatgcccatggccggggacatgaatggcctgagccccacccaggccctgcccccacccctgtccatgcccagcaccagccactgcaccccacctccaccctaccccacagactgcagcatcgtgtccttcctggcccggctgggctgcagcagctgcctggactacttcaccacccagggcctgaccaccatctaccagatcgagcactacagcatggatgacctggccagcctgaagatccctgagcagttcagacatgccatctggaagggcatcctggaccaccggcagctgcacgagttcagcagccccagccacctgctgcggacccccagcagcgccagcacagtgtctgtgggcagcagcgagaccagaggagagcgggtgattgatgctgtgcgcttcaccctgcggcagaccatctccttccccccaagagatgagtggaatgacttcaactttgacatggatgcccggaggaacaagcagcagaggatcaaggaggagggggagtag

SEQ ID NO: 43229 - DNA, 1749 bp, Artificial Sequence
  derived and/or modified sequence
atgctgtacctggagaacaatgcccagacccagttcagcgagccccagtacaccaacctgggcctgctgaacagcatggaccagcagatccagaatggcagcagcagcaccagcccctacaacacagaccacgcccagaacagcgtgacagcccccagcccctatgcccagcccagcagcacctttgatgccctgagccccagccctgccatccccagcaacacagactacccaggcccccacagctttgatgtgtccttccagcagagcagcacagccaagagcgccacctggacctacagcacagagctgaagaagctgtactgccagatcgccaagacctgccccatccagatcaaggtgatgaccccaccaccccagggcgctgtgatccgggccatgcctgtgtacaagaaggccgagcacgtgacagaggtggtgaagcgctgccccaaccacgagctgagccgggagttcaatgaaggccagatcgccccacccagccacctgatccgggtggagggcaacagccacgcccagtatgtggaggaccccatcaccggccggcagagcgtgctggtgccctatgagcccccccaggtgggcacagagttcaccaccgtgctgtacaacttcatgtgcaacagcagctgtgtgggcggcatgaacagaagacccatcctgatcatcgtgaccctggagaccagagatggccaggtgctgggccgccgctgctttgaggcccgcatctgtgcctgccccggccgggacaggaaggcagatgaggacagcatcaggaagcagcaggtgtctgacagcaccaagaatggagatgccttccggcagaacacccacggcatccagatgaccagcatcaagaagagaagaagcccagatgatgagctgctgtacctgcctgtgcggggccgggagacctatgagatgctgctgaagatcaaggagagcctggagctgatgcagtacctgccccagcacaccatcgagacctaccggcagcagcagcagcagcagcaccagcacctgctgcagaagcagaccagcatccagagccccagcagctatggcaacagcagcccccccctgaacaagatgaacagcatgaacaagctgcccagcgtgtcccagctgatcaacccccagcagagaaatgccctgacccccaccaccatcccagatggcatgggcgccaacatccccatgatgggcacccacatgcccatggccggggacatgaatggcctgagccccacccaggccctgcccccacccctgtccatgcccagcaccagccactgcaccccacctccaccctaccccacagactgcagcatcgtgtccttcctggcccggctgggctgcagcagctgcctggactacttcaccacccagggcctgaccaccatctaccagatcgagcactacagcatggatgacctggccagcctgaagatccctgagcagttcagacatgccatctggaagggcatcctggaccaccggcagctgcacgagttcagcagccccagccacctgctgcggacccccagcagcgccagcacagtgtctgtgggcagcagcgagaccagaggagagcgggtgattgatgctgtgcgcttcaccctgcggcagaccatctccttccccccaagagatgagtggaatgacttcaactttgacatggatgcccggaggaacaagcagcagaggatcaaggaggagggggagtag

SEQ ID NO: 43230 - DNA, 1761 bp, Artificial Sequence
  derived and/or modified sequence
atgctgtacctggagaacaacgcccagacccagttcagcgagccccagtacaccaacctggggttgctcaactcgatggaccaacaaatccaaaacggatcaagtagtacatcaccctacaatacggatcacgcacagaactccgtgactgccccatccccatatgctcagccttcctcaacttttgacgccctatctcccagcccagctattccttccaatacagattaccccggcccacactccttcgatgtgagctttcagcagagttctaccgccaagagcgccacttggacctatagcactgagcttaaaaagctgtactgccagatcgctaaaacttgtcccatccaaattaaggtaatgacgcctcctccgcaaggagccgtaatacgagccatgcctgtgtacaagaaggccgaacacgttacagaagtagtgaaacgctgccccaatcacgagctgtcccgtgaattcaacgaaggccagattgctcccccatcacacctcatcagagtggagggaaactctcatgcgcagtatgttgaagatcccatcacaggccgtcagagcgtgcttgtcccatacgagccaccccaggttggaaccgaattcaccactgtactctacaatttcatgtgtaatagctcctgcgtgggcggcatgaataggcgccccatactgattatcgtcactcttgagacccgagacgggcaggtgctcggtcgtcggtgttttgaagccagaatttgtgcatgcccagggcgggatcggaaggctgacgaggattccatccggaaacagcaagtgtcagacagcaccaagaacggcgacggaacaaaacggccattccgccagaatacccatggtatccagatgaccagcatcaagaaaagacgctctcccgatgacgagctcttgtacctacctgttcgaggcagggagacctacgagatgctgctcaaaattaaagagagtctcgaactcatgcagtatctgccacagcataccatcgagacctaccgtcagcagcagcagcaacagcaccagcatttactccaaaagcaaacctctattcagagtccctctagctatgggaactcatcccctcccctgaacaagatgaacagtatgaataagcttccgtccgtgagccagctgatcaatccgcagcagcggaacgctttaacacctacgaccataccggatggtatgggcgctaatatcccgatgatgggtacccacatgccaatggccggagacatgaatggactgtccccgactcaggccttacccccacccctttccatgcccagcacctctcattgtacaccgcctccaccatatccaaccgattgctctatcgtatctttcttggctaggctaggctgtagtagctgccttgattacttcacgactcaggggctgacaactatctaccagattgagcactacagtatggacgatctggcctcgctgaaaatcccagaacagttcagacacgccatctggaagggaatcctcgaccatagacagttgcatgaattctcctcccccagtcaccttctgcgcacaccctcttccgctagcactgtctccgtaggctcaagcgagacaaggggcgagcgcgtaatcgacgcagtgcgcttcacacttaggcaaactatttcttttccacctagggacgaatggaacgacttcaacttcgacatggatgccaggcggaataaacagcagcgcattaaggaggaaggggaatag

SEQ ID NO: 43231 - DNA, 1749 bp, Artificial Sequence
  derived and/or modified sequence
atgctgtacctggagaacaacgcccagacccagttcagcgagccccaatatacaaacttagggctgctgaattcaatggatcagcagatacagaacggaagctcttctaccagtccatacaatacagatcacgctcagaatagtgtgactgccccgagtccttatgctcaaccttcctccaccttcgacgccctgtccccgtctcccgcgatcccaagtaatactgattacccaggaccacatagctttgacgtgtcctttcagcagtcaagtaccgccaagtcggcgacatggacctattcaaccgaactcaagaaactgtactgccagatcgccaagacatgccccatccagattaaggtgatgaccccgccgccccagggagcggtaatccgcgcaatgcccgtttataaaaaagccgagcatgtaacagaggttgtgaagcggtgcccgaaccacgagcttagtcgcgagttcaacgaggggcagatagctccaccgtcccatttgatccgggtagagggaaacagccatgcccagtatgtagaagaccctatcaccggcaggcagtctgtgttagtcccatatgaacctcctcaggtgggcacagaattcactactgtgctgtacaactttatgtgcaattcctcatgcgtcggcggaatgaacagacggcccattctcattatcgtaaccctggagacgagggacgggcaggtactgggacgacggtgcttcgaagcccggatatgcgcgtgtcctggacgagatcgtaaagcggatgaggacagcatcagaaagcagcaggtctctgatagtaccaagaacggcgatgccttccggcagaatacacacgggattcagatgacctcaatcaagaagcgcaggtcccccgacgatgagttgctatatctgccggtaagaggtcgggagacatacgaaatgctgcttaagatcaaggagagcctagagctgatgcagtatctcccgcaacacaccattgaaacataccgccagcagcaacagcagcaacatcaacacttactccagaaacaaacatccatccagtcacctagcagctatggaaattctagtccccccctgaataagatgaactctatgaataagctgccgagcgtctcccaactgatcaaccctcagcagcgcaatgccctgactccaactacaatccctgacgggatgggcgcgaatatacccatgatgggtacacatatgcccatggcaggggatatgaacgggctgtcccctacgcaggccctgcctcctcccctatcgatgccttctacttcccactgcacccctcctcctccgtacccaacggattgctctattgtgtcctttctggcaaggctgggctgcagtagctgtttagattatttcactacacagggtttgacgacaatctatcagattgagcactattcgatggatgatcttgcatcgctgaaaattcccgaacagtttcgtcatgccatctggaaaggaatcctggaccacaggcagctacatgagtttagctcaccatcccacctgctcagaacaccatcttccgcctctacggtgagcgtaggatcttcagagacgcgaggagaacgggttatcgacgccgtgcgctttacactccgtcagaccatctcctttcccccgcgggacgaatggaacgacttcaattttgatatggacgctcgaagaaataaacagcagcgtataaaggaagaaggggaatag

SEQ ID NO: 43232 - DNA, 1761 bp, Artificial Sequence
  derived and/or modified sequence
atgttatatctggagaataacgctcagacacagttcagcgagcctcagtatacaaacctgggactgctaaactcaatggatcagcagatccagaatggctcttcttccacatccccctataacaccgaccacgcccaaaactcggtcacagctccgtctccttacgcccagccatcatccactttcgatgcgctgagcccctcccctgctatcccctccaacactgattaccctggacctcatagctttgatgtgtcattccagcaatcttccaccgcgaagagcgccacctggacttacagcacggaacttaaaaaactttactgccagatagccaaaacttgccctattcagattaaggtgatgactcctccacctcaaggagccgtcattcgcgcaatgccggtatacaagaaagccgagcatgtgaccgaagtggtgaagaggtgcccaaatcatgagctgagccgggaatttaatgagggccagatcgccccaccaagccacttgatacgtgtcgaaggcaatagccacgcgcagtatgtggaagacccaatcacagggcgtcagagcgtactcgtaccttacgaacctccacaggtcggaaccgaatttacaaccgttttatataactttatgtgcaatagctcttgtgtgggcggaatgaatcgcagacccattttaataattgtgactctggagactcgcgacggccaggtgctgggtcgcaggtgttttgaagcacgcatttgtgcgtgcccgggacgggaccggaaagccgatgaggatagcatcagaaagcagcaagtgagcgacagtacaaagaatggtgacggtactaaaaggcctttccggcagaatacccatgggattcagatgacttccattaagaagcgacgcagtcccgacgatgaattgctctatttgcctgtgcggggaagggagacatacgaaatgctgttgaagatcaaagaaagcctcgagctcatgcagtacctgccccagcacaccatcgaaacatatagacagcagcagcagcagcagcatcagcacttgctacagaagcagacgagcatacagagccctagcagttatggcaattcctcgccaccgctgaataaaatgaattccatgaacaagctcccctcagttagccaattgattaaccctcaacagaggaatgcccttacccctacaacgatccccgatgggatgggagcaaacattcccatgatgggcacacatatgcccatggccggagatatgaatgggctcagccccacccaagccctccccccacccctgagcatgccttctacttcccattgcacaccccctcccccataccctactgactgcagcatcgtcagcttcctggcccgactgggatgttcctcctgtctcgactactttactacgcaaggcctgacgacaatataccagattgagcactattcaatggacgacttggcttctctcaagattcccgaacaatttcggcacgcaatatggaaagggatcctggaccataggcagttgcacgagttcagctcgcctagccacttacttagaacaccttcctcagcgtcaactgtttcagtcggctcatcggagaccagaggtgagcgcgtcatagacgcagtccgattcacactgcggcagaccattagctttccgccaagggatgagtggaacgattttaatttcgacatggacgctcggaggaacaagcagcagaggatcaaggaggagggcgagtag

SEQ ID NO: 43233 - DNA, 1749 bp, Artificial Sequence
  derived and/or modified sequence
atgttgtacttggagaacaatgcacagacccagttctccgaaccgcagtacacgaacttgggtttactgaacagcatggaccagcagatccagaacgggagcagtagtacctctccttacaataccgatcatgcccaaaatagtgtcaccgcgccatcaccctatgctcagccttcctctacattcgatgcactcagcccatccccagctatccccagcaacactgactaccccggaccacatagctttgacgtgtcctttcagcagtcttcaacagccaagagcgctacttggacttactcaacggagttgaagaaactatactgccaaatcgcgaagacgtgtccgattcagataaaggtgatgacaccccctccccagggcgctgtgatacgcgctatgccagtatataagaaggccgaacatgttaccgaggtcgtgaaacggtgcccaaatcacgaactctctagagaattcaacgaggggcagatagccccacctagccatttgatcagggttgagggtaacagccacgcacaatacgtcgaagaccctatcaccggtcggcagtccgtgctggtcccgtatgaaccaccacaggtgggtacggaattcactactgtactgtacaactttatgtgcaacagtagctgcgttgggggtatgaatcgcaggcccatactgatcattgtaacattagaaactagagatgggcaagttttgggacgccgttgcttcgaggccagaatttgcgcatgcccagggagagatcgcaaggccgacgaggattccatcagaaaacaacaggtgagtgattcaacaaagaacggcgatgcctttaggcagaacacccacggaatccagatgacttcaatcaaaaagcgacgtagtccggacgatgagttgctgtacttgccagtgcgtggtcgtgagacttatgagatgctgctcaaaataaaggagtctctggagcttatgcaatacctcccacagcacaccatagagacatacaggcaacagcagcagcagcagcatcaacacctgctacagaagcaaacctcgattcagagcccttcctcatacggaaactcatcaccaccgctgaataaaatgaatagcatgaacaagcttcctagcgtgtctcagttgatcaatccccagcaacgtaacgctcttactcccacgacaatcccagatggtatgggtgcaaatattccgatgatggggacacatatgcctatggcaggtgatatgaacgggctgtctcctacgcaggccttgccaccgcctctcagcatgccttcgacttcgcactgcactcccccaccgccatatcctaccgactgttcaatcgttagcttcctggcacgcttggggtgcagtagctgcttggactattttacaactcagggcttgaccactatataccagatcgagcactatagtatggatgatctggctagcctaaaaattccggagcagttcagacacgctatatggaaggggatcctagaccataggcagctgcatgagttttccagcccaagtcacctgcttaggactccatcctctgctagcacggtgagtgttggaagttccgaaacaaggggggagcgagtgattgatgccgtgcgtttcacattgcggcagaccataagcttccccccacgggatgagtggaacgattttaatttcgatatggatgccaggcgaaataagcagcagcggatcaaagaggagggagagtag

SEQ ID NO: 43234 - DNA, 4668 bp, Artificial Sequence
  derived and/or modified sequence
agagagagaaagagagagagggacttgagttctgttatcttcttaagtagattcatattgtaagggtctcggggtgggggggttggcaaaatcctggagccagaagaaaggacagcagcattgatcaatcttacagctaacatgttgtacctggaaaacaatgcccagactcaatttagtgagccacagtacacgaacctggggctcctgaacagcatggaccagcagattcagaacggctcctcgtccaccagtccctataacacagaccacgcgcagaacagcgtcacggcgccctcgccctacgcacagcccagctccaccttcgatgctctctctccatcacccgccatcccctccaacaccgactacccaggcccgcacagtttcgacgtgtccttccagcagtcgagcaccgccaagtcggccacctggacgtattccactgaactgaagaaactctactgccaaattgcaaagacatgccccatccagatcaaggtgatgaccccacctcctcagggagctgttatccgcgccatgcctgtctacaaaaaagctgagcacgtcacggaggtggtgaagcggtgccccaaccatgagctgagccgtgaattcaacgagggacagattgcccctcctagtcatttgattcgagtagaggggaacagccatgcccagtatgtagaagatcccatcacaggaagacagagtgtgctggtaccttatgagccaccccaggttggcactgaattcacgacagtcttgtacaatttcatgtgtaacagcagttgtgttggagggatgaaccgccgtccaattttaatcattgttactctggaaaccagagatgggcaagtcctgggccgacgctgctttgaggcccggatctgtgcttgcccaggaagagacaggaaggcggatgaagatagcatcagaaagcagcaagtttcggacagtacaaagaacggtgatggtacgaagcgcccgtttcgtcagaacacacatggtatccagatgacatccatcaagaaacgaagatccccagatgatgaactgttatacttaccagtgaggggccgtgagacttatgaaatgctgttgaagatcaaagagtccctggaactcatgcagtaccttcctcagcacacaattgaaacgtacaggcaacagcaacagcagcagcaccagcacttacttcagaaacagacctcaatacagtctccatcttcatatggtaacagctccccacctctgaacaaaatgaacagcatgaacaagctgccttctgtgagccagcttatcaaccctcagcagcgcaacgccctcactcctacaaccattcctgatggcatgggagccaacattcccatgatgggcacccacatgccaatggctggagacatgaatggactcagccccacccaggcactccctcccccactctccatgccatccacctcccactgcacacccccacctccgtatcccacagattgcagcattgtcagtttcttagcgaggttgggctgttcatcatgtctggactatttcacgacccaggggctgaccaccatctatcagattgagcattactccatggatgatctggcaagtctgaaaatccctgagcaatttcgacatgcgatctggaagggcatcctggaccaccggcagctccacgaattctcctccccttctcatctcctgcggaccccaagcagtgcctctacagtcagtgtgggctccagtgagacccggggtgagcgtgttattgatgctgtgcgattcaccctccgccagaccatctctttcccaccccgagatgagtggaatgacttcaactttgacatggatgctcgccgcaataagcaacagcgcatcaaagaggagggggagtgagcctcaccatgtgagctcttcctatccctctcctaactgccagccccctaaaagcactcctgcttaatcttcaaagccttctccctagctcctccccttcctcttgtctgatttcttaggggaaggagaagtaagaggctacctcttacctaacatctgacctggcatctaattctgattctggctttaagccttcaaaactatagcttgcagaactgtagctgccatggctaggtagaagtgagcaaaaaagagttgggtgtctccttaagctgcagagatttctcattgacttttataaagcatgttcacccttatagtctaagactatatatataaatgtataaatatacagtatagatttttgggtggggggcattgagtattgtttaaaatgtaatttaaatgaaagaaaattgagttgcacttattgaccattttttaatttacttgttttggatggcttgtctatactccttcccttaaggggtatcatgtatggtgataggtatctagagcttaatgctacatgtgagtgacgatgatgtacagattctttcagttctttggattctaaatacatgccacatcaaacctttgagtagatccatttccattgcttattatgtaggtaagactgtagatatgtattcttttctcagtgttggtatattttatattactgacatttcttctagtgatgatggttcacgttggggtgatttaatccagttataagaagaagttcatgtccaaacgtcctctttagtttttggttgggaatgaggaaaattcttaaaaggcccatagcagccagttcaaaaacacccgacgtcatgtatttgagcatatcagtaacccccttaaatttaataccagataccttatcttacaatattgattgggaaaacatttgctgccattacagaggtattaaaactaaatttcactactagattgactaactcaaatacacatttgctactgttgtaagaattctgattgatttgattgggatgaatgccatctatctagttctaacagtgaagttttactgtctattaatattcagggtaaataggaatcattcagaaatgttgagtctgtactaaacagtaagatatctcaatgaaccataaattcaactttgtaaaaatcttttgaagcatagataatattgtttggtaaatgtttcttttgtttggtaaatgtttcttttaaagaccctcctattctataaaactctgcatgtagaggcttgtttacctttctctctctaaggtttacaataggagtggtgatttgaaaaatataaaattatgagattggttttcctgtggcataaattgcatcactgtatcattttcttttttaaccggtaagagtttcagtttgttggaaagtaactgtgagaacccagtttcccgtccatctcccttagggactacccatagacatgaaaggtccccacagagcaagagataagtctttcatggctgctgttgcttaaaccacttaaacgaagagttcccttgaaactttgggaaaacatgttaatgacaatattccagatctttcagaaatataacacatttttttgcatgcatgcaaatgagctctgaaatcttcccatgcattctggtcaagggctgtcattgcacataagcttccattttaattttaaagtgcaaaagggccagcgtggctctaaaaggtaatgtgtggattgcctctgaaaagtgtgtatatattttgtgtgaaattgcatactttgtattttgattattttttttttcttcttgggatagtgggatttccagaaccacacttgaaacctttttttatcgtttttgtattttcatgaaaataccatttagtaagaataccacatcaaataagaaataatgctacaattttaagaggggagggaagggaaagtttttttttattatttttttaaaattttgtatgttaaagagaatgagtccttgatttcaaagttttgttgtacttaaatggtaataagcactgtaaacttctgcaacaagcatgcagctttgcaaacccattaaggggaagaatgaaagctgttccttggtcctagtaagaagacaaactgcttcccttactttgctgagggtttgaataaacctaggacttccgagctatgtcagtactattcaggtaacactagggccttggaaattcctgtactgtgtctcatggatttggcactagccaaagcgaggcacccttactggcttacctcctcatggcagcctactctccttgagtgtatgagtagccagggtaaggggtaaaaggatagtaagcatagaaaccactagaaagtgggcttaatggagttcttgtggcctcagctcaatgcagttagctgaagaattgaaaagtttttgtttggagacgtttataaacagaaatggaaagcagagttttcattaaatccttttaccttttttttttcttggtaatcccctaaaataacagtatgtgggatattgaatgttaaagggatatttttttctattatttttataattgtacaaaattaagcaaatgttaaaagttttatatgctttattaatgttttcaaaaggtattatacatgtgatacattttttaagcttcagttgcttgtcttctggtactttctgttatgggcttttggggagccagaagccaatctacaatctctttttgtttgccaggacatgcaataaaatttaaaaaataaataaaaactaa

SEQ ID NO: 43235 - DNA, 1749 bp, Artificial Sequence
  derived and/or modified sequence
atgttgtacctggaaaacaatgcccagactcaatttagtgagccacagtacacgaacctggggctcctgaacagcatggaccagcagattcagaacggctcctcgtccaccagtccctataacacagaccacgcgcagaacagcgtcacggcgccctcgccctacgcacagcccagctccaccttcgatgctctctctccatcacccgccatcccctccaacaccgactacccaggcccgcacagtttcgacgtgtccttccagcagtcgagcaccgccaagtcggccacctggacgtattccactgaactgaagaaactctactgccaaattgcaaagacatgccccatccagatcaaggtgatgaccccacctcctcagggagctgttatccgcgccatgcctgtctacaaaaaagctgagcacgtcacggaggtggtgaagcggtgccccaaccatgagctgagccgtgaattcaacgagggacagattgcccctcctagtcatttgattcgagtagaggggaacagccatgcccagtatgtagaagatcccatcacaggaagacagagtgtgctggtaccttatgagccaccccaggttggcactgaattcacgacagtcttgtacaatttcatgtgtaacagcagttgtgttggagggatgaaccgccgtccaattttaatcattgttactctggaaaccagagatgggcaagtcctgggccgacgctgctttgaggcccggatctgtgcttgcccaggaagagacaggaaggcggatgaagatagcatcagaaagcagcaagtttcggacagtacaaagaacggtgatgcgtttcgtcagaacacacatggtatccagatgacatccatcaagaaacgaagatccccagatgatgaactgttatacttaccagtgaggggccgtgagacttatgaaatgctgttgaagatcaaagagtccctggaactcatgcagtaccttcctcagcacacaattgaaacgtacaggcaacagcaacagcagcagcaccagcacttacttcagaaacagacctcaatacagtctccatcttcatatggtaacagctccccacctctgaacaaaatgaacagcatgaacaagctgccttctgtgagccagcttatcaaccctcagcagcgcaacgccctcactcctacaaccattcctgatggcatgggagccaacattcccatgatgggcacccacatgccaatggctggagacatgaatggactcagccccacccaggcactccctcccccactctccatgccatccacctcccactgcacacccccacctccgtatcccacagattgcagcattgtcagtttcttagcgaggttgggctgttcatcatgtctggactatttcacgacccaggggctgaccaccatctatcagattgagcattactccatggatgatctggcaagtctgaaaatccctgagcaatttcgacatgcgatctggaagggcatcctggaccaccggcagctccacgaattctcctccccttctcatctcctgcggaccccaagcagtgcctctacagtcagtgtgggctccagtgagacccggggtgagcgtgttattgatgctgtgcgattcaccctccgccagaccatctctttcccaccccgagatgagtggaatgacttcaactttgacatggatgctcgccgcaataagcaacagcgcatcaaagaggagggggagtga

SEQ ID NO: 43236 - protein, 461 aa, Artificial Sequence
  derived and/or modified sequence
MLYLENNAQTQFSEPQYTNLGLLNSMDQQIQNGSSSTSPYNTDHAQNSVTAPSPYAQPSSTFDALSPSPAIPSNTDYPGPHSFDVSFQQSSTAKSATWTYSTELKKLYCQIAKTCPIQIKVMTPPPQGAVIRAMPVYKKAEHVTEVVKRCPNHELSREFNEGQIAPPSHLIRVEGNSHAQYVEDPITGRQSVLVPYEPPQVGTEFTTVLYNFMCNSSCVGGMNRRPILIIVTLETRDGQVLGRRCFEARICACPGRDRKADEDSIRKQQVSDSTKNGDGTKRPFRQNTHGIQMTSIKKRRSPDDELLYLPVRGRETYEMLLKIKESLELMQYLPQHTIETYRQQQQQQHQHLLQKQTSIQSPSSYGNSSPPLNKMNSMNKLPSVSQLINPQQRNALTPTTIPDGMGANIPMMGTHMPMAGDMNGLSPTQALPPPLSMPSTSHCTPPPPYPTDCSIVRIWQV

SEQ ID NO: 43237 - DNA, 1251 bp, Artificial Sequence
  derived and/or modified sequence
atgctgtacctggagaacaacgcccagacccagttcagcgagccccagtacaccaacctgggcctgctgaacagcatggaccagcagatccagaacggcagcagcagcaccagcccctacaacaccgaccacgcccagaacagcgtgaccgcccccagcccctacgcccagcccagcagcaccttcgacgccctgagccccagccccgccatccccagcaacaccgactaccccggcccccacagcttcgacgtgagcttccagcagagcagcaccgccaagagcgccacctggacctacagcaccgagctgaagaagctgtactgccagatcgccaagacctgccccatccagatcaaggtgatgaccccccccccccagggcgccgtgatcagagccatgcccgtgtacaagaaggccgagcacgtgaccgaggtggtgaagagatgccccaaccacgagctgagcagagagttcaacgagggccagatcgccccccccagccacctgatcagagtggagggcaacagccacgcccagtacgtggaggaccccatcaccggcagacagagcgtgctggtgccctacgagcccccccaggtgggcaccgagttcaccaccgtgctgtacaacttcatgtgcaacagcagctgcgtgggcggcatgaacagaagacccatcctgatcatcgtgaccctggagaccagagacggccaggtgctgggcagaagatgcttcgaggccagaatctgcgcctgccccggcagagacagaaaggccgacgaggacagcatcagaaagcagcaggtgagcgacagcaccaagaacggcgacggcaccaagagacccttcagacagaacacccacggcatccagatgaccagcatcaagaagagaagaagccccgacgacgagctgctgtacctgcccgtgagaggcagagagacctacgagatgctgctgaagatcaaggagagcctggagctgatgcagtacctgccccagcacaccatcgagacctacagacagcagcagcagcagcagcaccagcacctgctgcagaagcagaccagcatccagagccccagcagctacggcaacagcagcccccccctgaacaagatgaacagcatgaacaagctgcccagcgtgagccagctgatcaacccccagcagagaaacgccctgacccccaccaccatccccgacggcatgggcgccaacagaagcggcaagagcgagaacccctag

SEQ ID NO: 43238 - DNA, 1386 bp, Artificial Sequence
  derived and/or modified sequence
atgctgtacctggagaacaacgcccagacccagttcagcgagccccagtacaccaacctgggcctgctgaacagcatggaccagcagatccagaacggcagcagcagcaccagcccctacaacaccgaccacgcccagaacagcgtgaccgcccccagcccctacgcccagcccagcagcaccttcgacgccctgagccccagccccgccatccccagcaacaccgactaccccggcccccacagcttcgacgtgagcttccagcagagcagcaccgccaagagcgccacctggacctacagcaccgagctgaagaagctgtactgccagatcgccaagacctgccccatccagatcaaggtgatgaccccccccccccagggcgccgtgatcagagccatgcccgtgtacaagaaggccgagcacgtgaccgaggtggtgaagagatgccccaaccacgagctgagcagagagttcaacgagggccagatcgccccccccagccacctgatcagagtggagggcaacagccacgcccagtacgtggaggaccccatcaccggcagacagagcgtgctggtgccctacgagcccccccaggtgggcaccgagttcaccaccgtgctgtacaacttcatgtgcaacagcagctgcgtgggcggcatgaacagaagacccatcctgatcatcgtgaccctggagaccagagacggccaggtgctgggcagaagatgcttcgaggccagaatctgcgcctgccccggcagagacagaaaggccgacgaggacagcatcagaaagcagcaggtgagcgacagcaccaagaacggcgacggcaccaagagacccttcagacagaacacccacggcatccagatgaccagcatcaagaagagaagaagccccgacgacgagctgctgtacctgcccgtgagaggcagagagacctacgagatgctgctgaagatcaaggagagcctggagctgatgcagtacctgccccagcacaccatcgagacctacagacagcagcagcagcagcagcaccagcacctgctgcagaagcagaccagcatccagagccccagcagctacggcaacagcagcccccccctgaacaagatgaacagcatgaacaagctgcccagcgtgagccagctgatcaacccccagcagagaaacgccctgacccccaccaccatccccgacggcatgggcgccaacatccccatgatgggcacccacatgcccatggccggcgacatgaacggcctgagccccacccaggccctgcccccccccctgagcatgcccagcaccagccactgcacccccccccccccctaccccaccgactgcagcatcgtgagaatctggcaggtgtag

SEQ ID NO: 43239 - DNA, 1251 bp, Artificial Sequence
  derived and/or modified sequence
atgttatacctggaaaataacgcccagacccagttctccgagccacaatacacaaacttagggctgctcaatagcatggaccagcagattcagaatgggtcctcatcaaccagcccctataacacagatcatgcccaaaactcagtaacggccccttctccctatgcgcagccatcctccacatttgatgccctgtcacccagccctgctattccttccaataccgactacccaggtccccattcttttgatgtcagctttcagcagtcctctacagcaaaatccgctacctggacttactcgactgaactgaaaaagctttactgccagatcgccaagacctgtcccatccagattaaggtcatgactcccccaccccaaggagcggtgataagggccatgcccgtgtacaaaaaggcggaacacgtaaccgaggtcgtgaaaagatgtcccaatcatgagctatcacgggaattcaacgagggccagattgcgcccccatcccacctgatacgggtggaggggaattctcacgctcagtacgttgaggacccgatcaccggacgacagtctgtgttggtcccttacgaacctcctcaggttggcacagagtttacaacagtcttgtataactttatgtgtaactccagctgtgtcggcgggatgaatagaaggcccatcctgataatagtgactttggagacaagagatggccaggtgctcggccgtcgctgtttcgaagcccgaatctgtgcctgcccaggcagggacaggaaggccgacgaagattccatacggaagcaacaagtcagcgactctactaagaacggcgatggtactaagcggccttttagacaaaacactcacggaattcagatgacctctatcaagaagaggaggtcccccgacgacgagctgctgtatttacccgttcgggggagagagacttacgaaatgctgttaaaaatcaaggaaagcttggagctcatgcaataccttccacagcatacaatcgagacataccgacagcaacagcaacaacagcaccaacacctgctgcagaagcagactagtatccaatccccctcttcatacggaaactcctcccctccccttaataagatgaatagcatgaataaacttccttccgttagtcaactcatcaacccccagcagcgaaacgccctcaccccaactacaatccctgacgggatgggagcgaaccgctctggaaaaagcgagaatccttag

SEQ ID NO: 43240 - DNA, 1386 bp, Artificial Sequence
  derived and/or modified sequence
atgttgtatctcgagaataatgcccagacccagttctcagaaccacaatataccaatctgggactattgaattccatggaccagcagattcaaaacggctcttcctcaacgagcccatataatacagaccatgcacagaatagtgtgactgcaccctccccttatgcacagccttccagcactttcgacgcgctatctccatctcccgccatcccctcaaacacagactatcccggccctcacagtttcgacgtcagctttcagcaaagctccaccgctaagtccgctacctggacctactccaccgagctgaagaaactgtactgtcagatcgctaaaacttgtcctatccagattaaggtgatgaccccccctccacaaggagcagtgatacgggcaatgcccgtatacaagaaggccgagcacgtgactgaagtggtgaaaagatgccccaaccatgaactgtccagagaattcaacgaggggcagatcgccccacccagccacctgatcagggtggaggggaattcgcatgcacagtacgtggaagaccctatcaccggcagacagagtgttctggtcccttacgagcctccacaagtgggcacagagtttaccacagtgctgtacaactttatgtgcaacagcagctgtgtgggcggcatgaatcggcgcccaatcctgattattgttactctggaaacccgcgatggacaggtcctgggaaggagatgttttgaggcccggatctgcgcctgccccgggcgggatcgcaaggccgacgaggatagcattcgcaaacagcaagtttccgatagcaccaaaaatggagatgggacaaagcgcccatttcgacagaacacccacggaatccaaatgacctccatcaaaaagaggaggagccctgatgacgagttactctacctgccagtgagggggagggaaacatacgagatgttgctaaaaatcaaagagtcattggagctcatgcagtacctgccacagcatacgattgaaacttatagacagcagcaacaacagcaacaccagcacctccttcagaagcagacctccatacagtccccaagttcctacggaaattcctcaccacccctgaataagatgaacagcatgaacaaactcccctcagtgagccagctgatcaacccacaacagaggaatgctctgactcccacaacaatacccgatggcatgggggcgaatatccccatgatgggaactcacatgccaatggcaggggatatgaacggattgtctcccacccaggctttgccccctcctctttctatgccttcgaccagccactgcacacccccccctccatacccaaccgactgctccatcgttaggatttggcaggtgtag

SEQ ID NO: 43241 - DNA, 1251 bp, Artificial Sequence
  derived and/or modified sequence
atgctgtacctggagaacaatgcccagacccagttcagcgagccccagtacaccaacctgggcctgctgaacagcatggaccagcagatccagaatggcagcagcagcaccagcccctacaacacagaccacgcccagaacagcgtgacagcccccagcccctatgcccagcccagcagcacctttgatgccctgagccccagccctgccatccccagcaacacagactacccaggcccccacagctttgatgtgtccttccagcagagcagcacagccaagagcgccacctggacctacagcacagagctgaagaagctgtactgccagatcgccaagacctgccccatccagatcaaggtgatgaccccaccaccccagggcgctgtgatccgggccatgcctgtgtacaagaaggccgagcacgtgacagaggtggtgaagcgctgccccaaccacgagctgagccgggagttcaatgaaggccagatcgccccacccagccacctgatccgggtggagggcaacagccacgcccagtatgtggaggaccccatcaccggccggcagagcgtgctggtgccctatgagcccccccaggtgggcacagagttcaccaccgtgctgtacaacttcatgtgcaacagcagctgtgtgggcggcatgaacagaagacccatcctgatcatcgtgaccctggagaccagagatggccaggtgctgggccgccgctgctttgaggcccgcatctgtgcctgccccggccgggacaggaaggcagatgaggacagcatcaggaagcagcaggtgtctgacagcaccaagaatggagatggcaccaagaggcccttccggcagaacacccacggcatccagatgaccagcatcaagaagagaagaagcccagatgatgagctgctgtacctgcctgtgcggggccgggagacctatgagatgctgctgaagatcaaggagagcctggagctgatgcagtacctgccccagcacaccatcgagacctaccggcagcagcagcagcagcagcaccagcacctgctgcagaagcagaccagcatccagagccccagcagctatggcaacagcagcccccccctgaacaagatgaacagcatgaacaagctgcccagcgtgtcccagctgatcaacccccagcagagaaatgccctgacccccaccaccatcccagatggcatgggcgccaacagaagtggcaagtctgagaacccctag

SEQ ID NO: 43242 - DNA, 1386 bp, Artificial Sequence
  derived and/or modified sequence
atgctgtacctggagaacaatgcccagacccagttcagcgagccccagtacaccaacctgggcctgctgaacagcatggaccagcagatccagaatggcagcagcagcaccagcccctacaacacagaccacgcccagaacagcgtgacagcccccagcccctatgcccagcccagcagcacctttgatgccctgagccccagccctgccatccccagcaacacagactacccaggcccccacagctttgatgtgtccttccagcagagcagcacagccaagagcgccacctggacctacagcacagagctgaagaagctgtactgccagatcgccaagacctgccccatccagatcaaggtgatgaccccaccaccccagggcgctgtgatccgggccatgcctgtgtacaagaaggccgagcacgtgacagaggtggtgaagcgctgccccaaccacgagctgagccgggagttcaatgaaggccagatcgccccacccagccacctgatccgggtggagggcaacagccacgcccagtatgtggaggaccccatcaccggccggcagagcgtgctggtgccctatgagcccccccaggtgggcacagagttcaccaccgtgctgtacaacttcatgtgcaacagcagctgtgtgggcggcatgaacagaagacccatcctgatcatcgtgaccctggagaccagagatggccaggtgctgggccgccgctgctttgaggcccgcatctgtgcctgccccggccgggacaggaaggcagatgaggacagcatcaggaagcagcaggtgtctgacagcaccaagaatggagatggcaccaagaggcccttccggcagaacacccacggcatccagatgaccagcatcaagaagagaagaagcccagatgatgagctgctgtacctgcctgtgcggggccgggagacctatgagatgctgctgaagatcaaggagagcctggagctgatgcagtacctgccccagcacaccatcgagacctaccggcagcagcagcagcagcagcaccagcacctgctgcagaagcagaccagcatccagagccccagcagctatggcaacagcagcccccccctgaacaagatgaacagcatgaacaagctgcccagcgtgtcccagctgatcaacccccagcagagaaatgccctgacccccaccaccatcccagatggcatgggcgccaacatccccatgatgggcacccacatgcccatggccggggacatgaatggcctgagccccacccaggccctgcccccacccctgtccatgcccagcaccagccactgcaccccacctccaccctaccccacagactgcagcatcgtgcgcatctggcaggtgtag

SEQ ID NO: 43243 - DNA, 1251 bp, Artificial Sequence
  derived and/or modified sequence
atgctgtacctggagaacaacgcccagacccagttcagcgagccccagtacactaatctgggtttgctgaactctatggaccaacagattcaaaatggaagctcaagtacctcgccttataataccgaccatgcccaaaattctgttactgctccaagtccttatgctcagcctagttccacatttgacgctctttcgcctagccccgccatcccctctaacacggactacccgggacctcattcgtttgatgttagtttccaacagtctagcactgccaaatcagccacttggacatatagcaccgaactgaagaaactgtattgccagatagcaaaaacatgtcccatccaaatcaaagtgatgacgcctcccccccagggcgcagtaatccgagcaatgcctgtatataaaaaggctgaacatgtaaccgaggtcgtgaaaaggtgccctaatcacgaactgagtcgggagttcaacgagggtcagatagcccctcctagccacctcattagggttgagggcaatagccatgcccagtacgtggaagatccgattacagggcgccagagcgtgttggtcccctatgagccccctcaggtcggaaccgaatttaccacagtattgtataacttcatgtgcaattcatcctgcgtggggggcatgaaccggcgaccaattttgattatcgtgaccctcgaaacacgcgacggacaagtgttgggacgaaggtgctttgaggccagaatctgtgcttgccctggccgggaccgaaaagcagatgaggacagcatcaggaaacagcaggtgagtgattctaccaaaaacggagatggaacaaaaagaccctttagacagaatacccatggaatccagatgacctccattaaaaaacgcagaagcccagacgatgagcttttatatctgccagtgcgcggacgggagacttatgaaatgctcctgaagatcaaggagtcattggagcttatgcagtacctaccgcagcacactatcgaaacatatcgccaacaacagcagcaacagcatcaacacctgcttcaaaagcagacatccattcaatccccgtcttcctacggcaacagctcccctccacttaacaaaatgaacagtatgaacaagttaccctccgtgtctcagctgataaacccacaacagagaaacgctctgacaccaacaacgatccctgatggaatgggggcaaaccgcagcggaaaaagcgagaatccatag

SEQ ID NO: 43244 - DNA, 1386 bp, Artificial Sequence
  derived and/or modified sequence
atgctgtacctggagaacaacgcccagacccagttcagcgagccccagtacactaacctaggcttgttgaattccatggaccaacagatccagaacggctcgagttctacctcaccatataatacagaccatgcccaaaacagtgtcacggctcctagtccatatgcccaaccttcctccactttcgacgcactgagcccctctcccgccatccccagcaacaccgactacccgggccctcactcttttgacgtctccttccagcaatcctctacagcaaagtctgccacctggacatattcaacggagctcaagaaactctattgccagatcgctaagacatgccccattcagataaaagtgatgacaccccccccccaaggggctgtaatcagggccatgcccgtgtataagaaggccgaacatgtaacagaggtggtcaagcgctgcccaaatcatgaactcagccgggaattcaatgaggggcagatcgcgcccccatcccatcttattcgcgtagaaggtaactctcatgcccagtacgtcgaggacccgatcacaggacggcagtcggtcctggtgccatatgagcccccacaagtcggcactgaatttacaacggttctgtacaacttcatgtgcaattccagctgcgttggaggtatgaataggcggccgatactgatcatcgtcacgctggagactcgcgatggccaggtattggggcgccgttgtttcgaagcacggatctgtgcctgccccggtcgagatcgaaaggccgacgaggatagcatccgcaagcagcaggtgagcgatagcacaaaaaacggagacggcacaaaacgtcccttcaggcaaaatactcacggtattcaaatgacctcaatcaagaaacgacggagcccagacgacgaacttctgtatctgcccgtccggggccgggagacgtacgagatgctgctgaagattaaagagtccctggaactaatgcagtatctccctcaacatactatcgaaacgtaccgtcaacagcagcagcagcagcaccagcacttacttcagaaacagacatctattcaatctccgtctagttacgggaacagtagtccacctctcaataagatgaactcaatgaacaagctgccgtccgtgtcccagctgatcaatcctcagcagcggaacgctttgacaccaacaaccattcccgatgggatgggcgccaacatcccaatgatgggtacgcatatgcctatggctggagacatgaatgggttgtcccccacccaggcgctaccacctcctctgtcaatgccatccacatcccactgtacgccacctcctccgtatcctactgactgtagcattgtaagaatatggcaggtgtag

SEQ ID NO: 43245 - DNA, 1251 bp, Artificial Sequence
  derived and/or modified sequence
atgctatacttggaaaacaatgctcaaacacagttctctgagcctcaatatacaaacctgggcttgttaaattcgatggatcagcagattcagaacgggagttcctcaacatcaccttacaatactgaccacgcacagaattctgtcacagccccatccccatatgcacagccttcgagcactttcgacgccctgagtccttcccccgctatcccctcaaatacagattaccctgggccacattccttcgacgtgtccttccagcagagcagcaccgcaaagagcgcaacatggacctattctactgagttaaagaagctgtactgccagatcgcaaagacctgcccaatccagattaaggtgatgacccctcctccccagggggcagtgatccgcgcaatgcccgtgtataaaaaagcagagcacgtcaccgaagtggtgaaaaggtgtccaaatcacgagttgagcagggagttcaacgaaggacagatcgcgccacccagccacctgattagagtagaggggaattctcatgcacagtatgtcgaagatccaatcacaggtagacaatcagtgctggtgccgtacgagccccctcaagtggggaccgagtttaccacagtcctgtataactttatgtgcaactccagctgcgtcggaggaatgaacagacggccaattcttatcatcgtcacccttgagaccagggacggccaggtgttaggccgaaggtgtttcgaggctcgcatttgtgcctgtccagggagggacagaaaagcggacgaggattccatccgaaagcaacaggtatcagattctactaaaaatggggatggtaccaagagaccatttcgccagaacacccacggtatccagatgacaagtatcaaaaaacgcagaagcccagatgacgagctcttgtacctgccagtgagaggcagggagacatatgaaatgttgttgaaaattaaggaaagcctcgaactgatgcagtacctcccacagcatacaatcgagacttacagacaacagcagcaacagcaacaccagcacctcttacagaaacagactagcattcagtcaccatccagttacggcaattcatcacctcctctcaataaaatgaattccatgaataaactcccaagcgtatcccagctgatcaatccgcagcagaggaatgctctgacccccaccaccatccccgatgggatgggcgctaacaggagcggtaagtcagaaaacccttag

SEQ ID NO: 43246 - DNA, 1386 bp, Artificial Sequence
  derived and/or modified sequence
atgctgtatctcgagaacaacgcacagactcagtttagcgagccacagtacacaaacttggggctgcttaatagtatggatcagcagatccagaacggctcctcctcaaccagtccctacaacaccgaccacgcccagaactccgtgacagccccatctccttatgcgcagcctagtagtacgttcgatgcactatctccttctccagccatcccgtcaaatacggactatcccggacctcactcatttgacgtttcttttcagcaatctagcacagcaaagagcgctacgtggacttattccacagagctgaagaaactgtactgtcaaattgctaaaacatgccctatccagattaaggtgatgaccccaccaccccaaggagcagttatccgagcaatgcctgtttacaagaaggccgagcacgtgaccgaggtagtgaaaaggtgtcccaatcacgagctgtccagggaattcaacgaaggccagatagcccctcccagccaccttatcagggttgagggaaattctcacgcacagtatgtagaggatccaattacaggacgccaatcggtcctagtaccgtacgagcctccccaggtaggtactgagtttaccaccgttctgtacaactttatgtgtaacagttcatgcgtcggaggcatgaatcggcgtccaatactgattattgtgaccttggagaccagagacggccaggtcctcggaaggcggtgttttgaggcaagaatctgtgcttgccccggaagggacagaaaggccgatgaagactctatcagaaagcagcaggtgtcggattccacaaaaaacggcgacggcaccaaacgacctttccgtcagaacacgcacgggatccagatgacatctatcaaaaagaggcgcagccccgatgatgagctgctgtatctccctgtcagggggagggagacatatgagatgcttctaaagataaaggaatcactcgaactgatgcaatatctcccccaacacacaatagaaacctataggcagcagcagcagcagcaacaccagcatctactgcagaagcaaacaagcatacaaagtccctcctcttacgggaatagcagcccccctctgaataaaatgaatagcatgaacaagttaccatcagtttcgcagctgattaaccctcaacagcgtaacgcgctcacacccacaactattcccgacgggatgggcgcaaacatccccatgatggggacacacatgccgatggccggagatatgaatggtctgtcaccaacacaggccctacctcctccactgtctatgccatctacatctcactgtactccaccacccccttatcctaccgactgtagtatcgtgcgtatttggcaggtctag

SEQ ID NO: 43247 - DNA, 1251 bp, Artificial Sequence
  derived and/or modified sequence
atgttgtacctggaaaacaatgcccagactcaatttagtgagccacagtacacgaacctggggctcctgaacagcatggaccagcagattcagaacggctcctcgtccaccagtccctataacacagaccacgcgcagaacagcgtcacggcgccctcgccctacgcacagcccagctccaccttcgatgctctctctccatcacccgccatcccctccaacaccgactacccaggcccgcacagtttcgacgtgtccttccagcagtcgagcaccgccaagtcggccacctggacgtattccactgaactgaagaaactctactgccaaattgcaaagacatgccccatccagatcaaggtgatgaccccacctcctcagggagctgttatccgcgccatgcctgtctacaaaaaagctgagcacgtcacggaggtggtgaagcggtgccccaaccatgagctgagccgtgaattcaacgagggacagattgcccctcctagtcatttgattcgagtagaggggaacagccatgcccagtatgtagaagatcccatcacaggaagacagagtgtgctggtaccttatgagccaccccaggttggcactgaattcacgacagtcttgtacaatttcatgtgtaacagcagttgtgttggagggatgaaccgccgtccaattttaatcattgttactctggaaaccagagatgggcaagtcctgggccgacgctgctttgaggcccggatctgtgcttgcccaggaagagacaggaaggcggatgaagatagcatcagaaagcagcaagtttcggacagtacaaagaacggtgatggtacgaagcgcccgtttcgtcagaacacacatggtatccagatgacatccatcaagaaacgaagatccccagatgatgaactgttatacttaccagtgaggggccgtgagacttatgaaatgctgttgaagatcaaagagtccctggaactcatgcagtaccttcctcagcacacaattgaaacgtacaggcaacagcaacagcagcagcaccagcacttacttcagaaacagacctcaatacagtctccatcttcatatggtaacagctccccacctctgaacaaaatgaacagcatgaacaagctgccttctgtgagccagcttatcaaccctcagcagcgcaacgccctcactcctacaaccattcctgatggcatgggagccaacagatctggcaagtctgaaaatccctga

SEQ ID NO: 43248 - DNA, 1386 bp, Artificial Sequence
  derived and/or modified sequence
atgttgtacctggaaaacaatgcccagactcaatttagtgagccacagtacacgaacctggggctcctgaacagcatggaccagcagattcagaacggctcctcgtccaccagtccctataacacagaccacgcgcagaacagcgtcacggcgccctcgccctacgcacagcccagctccaccttcgatgctctctctccatcacccgccatcccctccaacaccgactacccaggcccgcacagtttcgacgtgtccttccagcagtcgagcaccgccaagtcggccacctggacgtattccactgaactgaagaaactctactgccaaattgcaaagacatgccccatccagatcaaggtgatgaccccacctcctcagggagctgttatccgcgccatgcctgtctacaaaaaagctgagcacgtcacggaggtggtgaagcggtgccccaaccatgagctgagccgtgaattcaacgagggacagattgcccctcctagtcatttgattcgagtagaggggaacagccatgcccagtatgtagaagatcccatcacaggaagacagagtgtgctggtaccttatgagccaccccaggttggcactgaattcacgacagtcttgtacaatttcatgtgtaacagcagttgtgttggagggatgaaccgccgtccaattttaatcattgttactctggaaaccagagatgggcaagtcctgggccgacgctgctttgaggcccggatctgtgcttgcccaggaagagacaggaaggcggatgaagatagcatcagaaagcagcaagtttcggacagtacaaagaacggtgatggtacgaagcgcccgtttcgtcagaacacacatggtatccagatgacatccatcaagaaacgaagatccccagatgatgaactgttatacttaccagtgaggggccgtgagacttatgaaatgctgttgaagatcaaagagtccctggaactcatgcagtaccttcctcagcacacaattgaaacgtacaggcaacagcaacagcagcagcaccagcacttacttcagaaacagacctcaatacagtctccatcttcatatggtaacagctccccacctctgaacaaaatgaacagcatgaacaagctgccttctgtgagccagcttatcaaccctcagcagcgcaacgccctcactcctacaaccattcctgatggcatgggagccaacattcccatgatgggcacccacatgccaatggctggagacatgaatggactcagccccacccaggcactccctcccccactctccatgccatccacctcccactgcacacccccacctccgtatcccacagattgcagcattgtcaggatctggcaagtctga

SEQ ID NO: 43249 - protein, 393 aa, Artificial Sequence
  derived and/or modified sequence
MLYLENNAQTQFSEPQYTNLGLLNSMDQQIQNGSSSTSPYNTDHAQNSVTAPSPYAQPSSTFDALSPSPAIPSNTDYPGPHSFDVSFQQSSTAKSATWTYSTELKKLYCQIAKTCPIQIKVMTPPPQGAVIRAMPVYKKAEHVTEVVKRCPNHELSREFNEGQIAPPSHLIRVEGNSHAQYVEDPITGRQSVLVPYEPPQVGTEFTTVLYNFMCNSSCVGGMNRRPILIIVTLETRDGQVLGRRCFEARICACPGRDRKADEDSIRKQQVSDSTKNGDGTKRPFRQNTHGIQMTSIKKRRSPDDELLYLPVRGRETYEMLLKIKESLELMQYLPQHTIETYRQQQQQQHQHLLQKHLLSACFRNELVEPRRETPKQSDVFFRHSKPPNRSVYP

SEQ ID NO: 43250 - DNA, 1182 bp, Artificial Sequence
  derived and/or modified sequence
atgctgtacctggagaacaacgcccagacccagttcagcgagccccagtacaccaacctgggcctgctgaacagcatggaccagcagatccagaacggcagcagcagcaccagcccctacaacaccgaccacgcccagaacagcgtgaccgcccccagcccctacgcccagcccagcagcaccttcgacgccctgagccccagccccgccatccccagcaacaccgactaccccggcccccacagcttcgacgtgagcttccagcagagcagcaccgccaagagcgccacctggacctacagcaccgagctgaagaagctgtactgccagatcgccaagacctgccccatccagatcaaggtgatgaccccccccccccagggcgccgtgatcagagccatgcccgtgtacaagaaggccgagcacgtgaccgaggtggtgaagagatgccccaaccacgagctgagcagagagttcaacgagggccagatcgccccccccagccacctgatcagagtggagggcaacagccacgcccagtacgtggaggaccccatcaccggcagacagagcgtgctggtgccctacgagcccccccaggtgggcaccgagttcaccaccgtgctgtacaacttcatgtgcaacagcagctgcgtgggcggcatgaacagaagacccatcctgatcatcgtgaccctggagaccagagacggccaggtgctgggcagaagatgcttcgaggccagaatctgcgcctgccccggcagagacagaaaggccgacgaggacagcatcagaaagcagcaggtgagcgacagcaccaagaacggcgacggcaccaagagacccttcagacagaacacccacggcatccagatgaccagcatcaagaagagaagaagccccgacgacgagctgctgtacctgcccgtgagaggcagagagacctacgagatgctgctgaagatcaaggagagcctggagctgatgcagtacctgccccagcacaccatcgagacctacagacagcagcagcagcagcagcaccagcacctgctgcagaagcacctgctgagcgcctgcttcagaaacgagctggtggagcccagaagagagacccccaagcagagcgacgtgttcttcagacacagcaagccccccaacagaagcgtgtacccctag

SEQ ID NO: 43251 - DNA, 1182 bp, Artificial Sequence
  derived and/or modified sequence
atgctgtatctcgaaaacaatgctcagacgcagtttagcgagccacagtacactaaccttggcctcctaaattctatggaccagcagatccaaaatggttcatcctctacatctccttacaacacagaccacgcgcaaaacagcgtgaccgcacccagtccatacgcccaacctagcagcacgtttgacgcgctgtctccgagccccgccatcccaagcaacaccgattacccaggccctcactcattcgatgtaagctttcaacagtcctccactgctaagtcagcaacgtggacgtacagcaccgaactgaaaaagttatattgtcagattgctaaaacttgccccatccagattaaagtcatgacacctcctccacagggagccgtaattcgcgctatgccagtttataagaaggcagagcacgtaacagaagtcgtcaaaaggtgccccaatcacgagttatcccgggaattcaatgaggggcagatagcaccccctagccacctcattagggtcgaaggaaatagtcacgcgcaatacgtcgaggatccgattactggccgccaaagcgtcttggtgccctatgaaccaccccaagtggggacagagttcaccacggtgctgtacaactttatgtgtaattcgtcatgcgtgggcggcatgaatcgtaggccaatcttgatcattgtgacgcttgagacccgagatggccaggtgctgggccgaagatgttttgaggcgaggatctgcgcctgccccgggagagaccgtaaggcagacgaggattctatacggaaacagcaggtgtccgattcaacaaagaacggggacggtactaaacgaccgttccgccagaacactcacggcatacagatgaccagcatcaaaaaacggagatcaccagatgacgagctactataccttccagtgagagggcgggagacctacgagatgctgctaaagatcaaagagtctctcgagttgatgcagtatctgcctcagcacactattgagacatatcgccagcaacagcaacagcagcaccagcacttgttgcaaaagcatctgttgagcgcttgttttaggaacgagctggttgaaccacgacgggaaacaccaaaacaatcagacgtgttctttcggcactctaaaccccccaaccggtcagtgtacccttag

SEQ ID NO: 43252 - DNA, 1182 bp, Artificial Sequence
  derived and/or modified sequence
atgctgtacctggagaacaatgcccagacccagttcagcgagccccagtacaccaacctgggcctgctgaacagcatggaccagcagatccagaatggcagcagcagcaccagcccctacaacacagaccacgcccagaacagcgtgacagcccccagcccctatgcccagcccagcagcacctttgatgccctgagccccagccctgccatccccagcaacacagactacccaggcccccacagctttgatgtgtccttccagcagagcagcacagccaagagcgccacctggacctacagcacagagctgaagaagctgtactgccagatcgccaagacctgccccatccagatcaaggtgatgaccccaccaccccagggcgctgtgatccgggccatgcctgtgtacaagaaggccgagcacgtgacagaggtggtgaagcgctgccccaaccacgagctgagccgggagttcaatgaaggccagatcgccccacccagccacctgatccgggtggagggcaacagccacgcccagtatgtggaggaccccatcaccggccggcagagcgtgctggtgccctatgagcccccccaggtgggcacagagttcaccaccgtgctgtacaacttcatgtgcaacagcagctgtgtgggcggcatgaacagaagacccatcctgatcatcgtgaccctggagaccagagatggccaggtgctgggccgccgctgctttgaggcccgcatctgtgcctgccccggccgggacaggaaggcagatgaggacagcatcaggaagcagcaggtgtctgacagcaccaagaatggagatggcaccaagaggcccttccggcagaacacccacggcatccagatgaccagcatcaagaagagaagaagcccagatgatgagctgctgtacctgcctgtgcggggccgggagacctatgagatgctgctgaagatcaaggagagcctggagctgatgcagtacctgccccagcacaccatcgagacctaccggcagcagcagcagcagcagcaccagcacctgctgcagaagcacctgctgagcgcctgcttcagaaatgagctggtggagccccggcgggagacccccaagcagagtgatgtgttcttccgccacagcaagccacccaacagatctgtgtacccctag

SEQ ID NO: 43253 - DNA, 1182 bp, Artificial Sequence
  derived and/or modified sequence
atgctgtacctggagaacaacgcccagacccagttcagcgagccccagtatactaacctaggcttattaaattctatggaccagcaaattcagaacggctcttcttcaaccagcccatacaacaccgaccacgcccaaaacagtgtgactgccccatccccctacgcccagcctagttcgacattcgatgctctctccccgtctcctgccattccaagcaacactgactaccccgggccacatagctttgacgtgagctttcaacagtccagtacagctaaatcggctacgtggacatacagtaccgagctgaagaaactttactgccagatagctaaaacatgccccattcaaatcaaggtcatgacccctcccccacagggggctgtgatacgggccatgcctgtttacaaaaaagcggagcatgtgacagaagtggtgaagagatgtcctaaccatgagttgtcacgggaatttaatgagggacagattgctcctccaagccacttaattagagtggagggcaattcccacgcccaatatgtggaggaccccataacaggtcggcagtctgtcttggtcccttacgagcctccccaggtgggcaccgagtttaccaccgtactgtacaacttcatgtgtaattccagttgcgtggggggaatgaaccgacggccaatcctgatcattgtaaccctggaaacacgcgacggtcaggtcttggggcggcggtgtttcgaggctcgcatctgtgcttgtcccgggcgcgaccgaaaggccgacgaggattctatccggaagcaacaggttagcgacagcacaaagaatggggacggcaccaagaggccttttcggcagaacactcacggcatccaaatgactagcattaaaaagagacgcagccccgatgatgaactactgtatctgccagttcgtgggagagagacatacgaaatgctcctgaaaatcaaagagtcgctagaactcatgcagtatctcccccaacacactattgagacctacaggcagcagcagcagcaacagcaccagcatctgctgcagaagcatctgctgtcggcttgttttcggaatgagttggtggagccaagacgcgaaaccccaaaacagtctgacgtgttcttccgccatagcaagccaccaaacaggtcagtttatccttag

SEQ ID NO: 43254 - DNA, 1182 bp, Artificial Sequence
  derived and/or modified sequence
atgctgtatttagagaataacgctcaaacccagttctccgagcctcaatacactaacctcgggttattgaacagtatggaccagcagatccagaacggttccagtagtacgtcaccctacaataccgatcacgctcagaacagtgtcactgccccatctccctatgcacaaccttcctctacgttcgacgctttgtccccgtcccccgcaattccttctaatactgactatcccggtccacactcattcgatgtgtcttttcagcagtcttcaactgccaaaagtgctacttggacttacagcacagagctgaaaaagctgtattgtcagattgccaagacatgcccgatccaaattaaagtgatgacacctccgcctcagggagcagtgatccgcgcaatgccagtttataaaaaagcagaacacgtcacagaagtggtgaaaagatgtcctaatcatgagcttagccgggagtttaacgagggacagattgcaccccctagtcacctgataagggtcgagggcaactcacatgcccagtacgtcgaggacccaattactggccgtcaatccgtcctcgtgccctacgagcctcctcaggtggggacagaatttaccacggtcctctataacttcatgtgcaattcttcatgtgtgggcggaatgaatagacgtccgattctgatcatagtgacgttagagacccgagatggccaggtcctcggtcggcgttgctttgaagccaggatttgcgcctgcccgggaagagacagaaaggcagatgaggactcaatcagaaagcaacaggtgtctgatagtacaaagaacggcgatggaacgaagcgacccttccgccagaacacccacggaatacagatgaccagcatcaagaagcggaggtcccctgacgatgaactcctttacctgcccgtgagaggtagggaaacttacgagatgctcttaaagatcaaggagtctctggaactcatgcagtacttaccacagcacaccattgagacctataggcagcagcagcagcagcagcaccagcacctgctgcaaaagcatttattaagcgcctgcttcagaaacgagcttgttgagccacgccgagaaacaccaaagcagtctgacgtcttttttcggcattccaagccgccaaatagaagcgtgtatccttag

SEQ ID NO: 43255 - DNA, 2500 bp, Artificial Sequence
  derived and/or modified sequence
atgttgtacctggaaaacaatgcccagactcaatttagtgagccacagtacacgaacctggggctcctgaacagcatggaccagcagattcagaacggctcctcgtccaccagtccctataacacagaccacgcgcagaacagcgtcacggcgccctcgccctacgcacagcccagctccaccttcgatgctctctctccatcacccgccatcccctccaacaccgactacccaggcccgcacagtttcgacgtgtccttccagcagtcgagcaccgccaagtcggccacctggacgtattccactgaactgaagaaactctactgccaaattgcaaagacatgccccatccagatcaaggtgatgaccccacctcctcagggagctgttatccgcgccatgcctgtctacaaaaaagctgagcacgtcacggaggtggtgaagcggtgccccaaccatgagctgagccgtgaattcaacgagggacagattgcccctcctagtcatttgattcgagtagaggggaacagccatgcccagtatgtagaagatcccatcacaggaagacagagtgtgctggtaccttatgagccaccccaggttggcactgaattcacgacagtcttgtacaatttcatgtgtaacagcagttgtgttggagggatgaaccgccgtccaattttaatcattgttactctggaaaccagagatgggcaagtcctgggccgacgctgctttgaggcccggatctgtgcttgcccaggaagagacaggaaggcggatgaagatagcatcagaaagcagcaagtttcggacagtacaaagaacggtgatggtacgaagcgcccgtttcgtcagaacacacatggtatccagatgacatccatcaagaaacgaagatccccagatgatgaactgttatacttaccagtgaggggccgtgagacttatgaaatgctgttgaagatcaaagagtccctggaactcatgcagtaccttcctcagcacacaattgaaacgtacaggcaacagcaacagcagcagcaccagcacttacttcagaaacatctcctttcagcctgcttcaggaatgagcttgtggagccccggagagaaactccaaaacaatctgacgtcttctttagacattccaagcccccaaaccgatcagtgtacccatagagccctatctctatattttaagtgtgtgtgttgtatttccatgtgtatatgtgagtgtgtgtgtgtgtatgtgtgtgcgtgtgtatctagccctcataaacaggacttgaagacactttggctcagagacccaactgctcaaaggcacaaagccactagtgagagaatcttttgaagggactcaaacctttacaagaaaggatgttttctgcagattttgtatccttagaccggccattggtgggtgaggaaccactgtgtttgtctgtgagctttctgttgtttcctgggagggaggggtcaggtggggaaaggggcattaagatgtttattggaacccttttctgtcttcttctgttgtttttctaaaattcacagggaagcttttgagcaggtctcaaacttaagatgtctttttaagaaaaggagaaaaaagttgttattgtctgtgcataagtaagttgtaggtgactgagagactcagtcagacccttttaatgctggtcatgtaataatattgcaagtagtaagaaacgaaggtgtcaagtgtactgctgggcagcgaggtgatcattaccaaaagtaatcaactttgtgggtggagagttctttgtgagaacttgcattatttgtgtcctcccctcatgtgtaggtagaacatttcttaatgctgtgtacctgcctctgccactgtatgttggcatctgttatgctaaagtttttcttgtacatgaaaccctggaagacctactacaaaaaaactgttgtttggcccccatagcaggtgaactcattttgtgcttttaatagaaagacaaatccaccccagtaatattgcccttacgtagttgtttaccattattcaaagctcaaaatagaatttgaagccctctcacaaaatctgtgattaatttgcttaattagagcttctatccctcaagcctacctaccataaaaccagccatattactgatactgttcagtgcatttagccaggagacttacgttttgagtaagtgagatccaagcagacgtgttaaaatcagcactcctggactggaaattaaagattgaaagggtagactacttttcttttttttactcaaaagtttagagaatctctgtttctttccattttaaaaacatattttaagataatagcataaagactttaaaaatgttcctcccctccatcttcccacacccagtcaccagcactgtattttctgtcaccaagacaatgatttcttgttattgaggctgttgcttttgtggatgtgtgattttaattttcaataaacttttgcatcttggttta

SEQ ID NO: 43256 - protein, 791 aa, Artificial Sequence
  derived and/or modified sequence
MPLYDNQKARSVMNECERHVIFARTDADAPPPPEDWEEHVNRTGWTMAQNKLFNKILKALQSDRLARLANEGACNEPVLRRVAVDKCARRVRQALASVSWDTKLIQWLHTTLVETLSLPMLAAYLDALQTLKGKIPTLIDRMLVSSNTKTGAAGAEALSLLLKRPWDPAVGVLSHNKPSKLPGSPLILIASSGPSSSVFPTSRRHRFWQSQLSCLGKVIPVATHLLNNGSGVGVLQCLEHMIGAVRSKVLEIHSHFPHKPIILIGWNTGALVACHVSVMEYVTAVVCLGFPLLTVDGPRGDVDDPLLDMKTPVLFVIGQNSLQCHPEAMEDFREKIRAENSLVVVGGADDNLRISKAKKKSEGLTQSMVDRCIQDEIVDFLTGVLTRAEGHMGSEPRDQDAEKKKKPRDVARRDLAFEVPERGSRPASPAAKLPASPSGSEDLSSVSSSPTSSPKTKVTTVTSAQKSSQIGSSQLLKRHVQRTEAVLTHKQAQVPISSEPPEEGEKEDLRVQLKRHHPSSPLPGSKTSKRPKIKVSLISQGDTAGGPCAPSQGSAPEAAGGKPITMTLGQASAGAKELTGLLTTAKSSSSEGGVSASPVPSVVSSSTAPSALHTLQSRLVATSPGSSLPGATSASSLLQGLSFSLQDISSKTSGLPANPSPGPAPQATSVKLPTPMQSLGAITTGTSTIVRTIPVATTLSSLGATPGGKPTAIHQLLTNGGLAKLASSLPGLAQISNQASGLKVPTTITLTLRGQPSRITTLSPMGSGAAPSEESSSQVLPSSSQRLPPAP

SEQ ID NO: 43257 - protein, 878 aa, Artificial Sequence
  derived and/or modified sequence
MAHRGGERDFQTSARRMGTSLLFQLSVHERELDLVFLDHSYAKPWSAHPDASSARPTRMLFVTPRRQHESTIESDVPIDVETVTSTPMPLYDNQKARSVMNECERHVIFARTDADAPPPPEDWEEHVNRTGWTMAQNKLFNKILKALQSDRLARLANEGACNEPVLRRVAVDKCARRVRQALASVSWDTKLIQWLHTTLVETLSLPMLAAYLDALQTLKGKIPTLIDRMLVSSNTKTGAAGAEALSLLLKRPWDPAVGVLSHNKPSKLPGSPLILIASSGPSSSVFPTSRRHRFWQSQLSCLGKVIPVATHLLNNGSGVGVLQCLEHMIGAVRSKVLEIHSHFPHKPIILIGWNTGALVACHVSVMEYVTAVVCLGFPLLTVDGPRGDVDDPLLDMKTPVLFVIGQNSLQCHPEAMEDFREKIRAENSLVVVGGADDNLRISKAKKKSEGLTQSMVDRCIQDEIVDFLTGVLTRAEGHMGSEPRDQDAEKKKKPRDVARRDLAFEVPERGSRPASPAAKLPASPSGSEDLSSVSSSPTSSPKTKVTTVTSAQKSSQIGSSQLLKRHVQRTEAVLTHKQAQVPISSEPPEEGEKEDLRVQLKRHHPSSPLPGSKTSKRPKIKVSLISQGDTAGGPCAPSQGSAPEAAGGKPITMTLGQASAGAKELTGLLTTAKSSSSEGGVSASPVPSVVSSSTAPSALHTLQSRLVATSPGSSLPGATSASSLLQGLSFSLQDISSKTSGLPANPSPGPAPQATSVKLPTPMQSLGAITTGTSTIVRTIPVATTLSSLGATPGGKPTAIHQLLTNGGLAKLASSLPGLAQISNQASGLKVPTTITLTLRGQPSRITTLSPMGSGAAPSEESSSQVLPSSSQRLPPAP

SEQ ID NO: 43258 - protein, 216 aa, Artificial Sequence
  derived and/or modified sequence
MQANGAGGGGGGGGGGGGGGGGGGGQGQTPELACLSAQNGESSPSSSSSAGDLAHANGLLPSAPSAASNNSNSLNVNNGVPGGAAAASSATVAAASATTAASSSLATPELGSSLKKKKRLSQSDEDVIRLIGQHLNGLGLNQTVDLLMQESGCRLEHPSATKFRNHVMEGDWDKAENDLNELKPLVHSPHAIVAQTFSETSINFFPLTAAFCHVRG

SEQ ID NO: 43259 - DNA, 2890 bp, Artificial Sequence
  derived and/or modified sequence
atgcaggccaatggggcaggaggaggaggaggaggtggcggcggcggcggtggaggaggagggggcggcgggggccagggacagaccccggaactcgcctgcttgtcggcccagaacggggagtcgtccccctcgtcgtcgtcgtccgcgggggacctggcccacgccaatgggctcctgccttccgccccctccgccgccagcaacaatagcaacagcctgaatgtcaataacggggttcccggcggggcggccgccgcatcctcagccaccgtcgcagctgcctccgccaccaccgccgcctcctcttccttggccaccccagaactgggcagcagcctcaagaagaagaagcggctctcccagtcagatgaggatgtcattaggctaataggacagcacttgaatggcttagggctcaaccagactgttgatctcctcatgcaagagtcaggatgtcgtttagaacatccttctgctaccaaattccgaaatcatgtcatggaaggagactgggataaggcagaaaatgacctgaatgaactaaagcctttagtgcattctcctcatgctattgtggcacaaacattttctgaaacttccatcaacttttttcccctgactgctgctttctgtcatgtcagaggatgaagtttttgctgctgcagcagaagtacctagaatacctggaggatggcaaggtcctggaggcacttcaagttctacgctgtgaattgacgccgctgaaatacaatacagagcgcattcatgttcttagtgggtatctgatgtgtagccatgcagaagacctacgtgcaaaagcagaatgggaaggcaaagggacagcttcccgatctaaactattggataaacttcagacctatttaccaccatcagtgatgcttcccccacggcgtttacagactctcctgcggcaggcggtggaactacaaagggatcggtgcctatatcacaataccaaacttgataataatctagattctgtgtctctgcttatagaccatgtttgtagtagactggtgaattgacaaaatgtaattctaaattattgattgggaaaagaagcaaggaagaccgtgtttcaagatacacttaaaggaggcagttcccatgttatacgcagcagatacttacggagcattgtaatgaagtgtggttctgtaaattctctaatgatggcactaaactagcaacaggatcaaaagatacaacagttatcatatggcaagttgatccggatacacacctgctaaaactgcttaaaacattagaaggacatgcttatggcgtttcttatattgcatggagtccagatgacaactatcttgttgcttgtggcccagatgactgctctgagctttggctttggaatgtacaagaaaactatccccatgtaccttttattattacaccaagggcagctattatctctcagatcctgtttctaatccatgaacaaaatggaatcaagactagattaaatgacaggagaactaaggacaaaaatgagccagtctcatgaagacagtttgacaagtgtggcttggaatccagatgggaagcgctttgtgactggaggtcagcgtgggcagttctatcagtgtgacttagatggtaatctccttgactcctgggaaggggtaagagtgcaatgcctttggtgcttgagtgatggaaagactgttctggcatcagatacacaccagcgaattcggggctataacttcgaggaccttacagataggaacatagtacaagaagatcatcctattatgtcttttactatttcaaaaaatggccgattagctttgttaaatgtagcaactcagggagttcatttatgggacttgcaagacagagttttagtaagaaagtatcaaggtgttacacaagggttttatacaattcattcatgttttggaggccataatgaagacttcatcgctagtggcagtgaagatcacaaggtttacatctggcacaaacgtagtgaactgccaattgcggagctgacagggcacacacgtacagtaaactgtgtgagctggaacccacagattccatccatgatggccagcgcctcagatgatggcactgttagaatatggggaccagcaccttttatagaccaccagaatattgaagaggaatgcagtagcatggatagttgatggtgaatttggagcagacgacttctgtttaacttaaaattagtcgtattttaatggcttgggatttggtgcaaacaaacatgattgatagctggacagacatgctcgtcatgaaaaaagaaccatttctgaagcccgattggggccaaacatttacaccttgcttcatagtaaccagttgagatgaagcacgtcgttagaacgttgttggacaccatgttgaattattcccccatcggttgtgaagaactgtgctacattcaggcttacccattgaactcagtatatatatttttttccttcctgtcttttgtctggcaggataccattcttgttgctcttctgtgtaatgaagtttaaatgcttgtttggaaaactttatttaacagtttagaaggcttgatagaaagagtgcattagtctgaagagtatacattggataggaaagaatttccttcttttgtttctccaaatctttccgccttatttagcttgagatctttgcagcttggttcatggattctagccttgcccgttgcgcagtatatactgatccagatgataaaccagtgaactatgtcaaaagcactctcaatattacatttgacaaaaagttttgtacttttcacatagcttgttgccccgtaaaagggttaacagcacaattttttaaaaataaattaagaagtatttatagg

SEQ ID NO: 43260 - protein, 400 aa, Artificial Sequence
  derived and/or modified sequence
MNEEYDVIVLGTGLTECILSGIMSVNGKKVLHMDRNPYYGGESASITPLEDLYKRFKIPGSPPESMGRGRDWNVDLIPKFLMANGLMGLFEKRRFRKFLVYVANFDEKDPRTFEGIDPKKTTMRDVYKKFDLGQDVIDFTGHALALYRTDDYLDQPCYETINRIKLYSESLARYGKSPYLYPLYGLGELPQGFARLSAIYGGTYMLNKPIEEIIVQNGKVIGVKSEGEIARCKQLICDPSYVKDRVEKVGQVIRVICILSHPIKNTNDANSCQIIIPQNQVNRKSDIYVCMISFAHNVAAQGKYIAIVSTTVETKEPEKEIRPALELLEPIEQKFVSISDLLVPKDLGTESQIFISRTYDATTHFETTCDDIKNIYKRMTGSEFDFEEMKRKKNDIYGED

SEQ ID NO: 43261 - DNA, 627 bp, Artificial Sequence
  derived and/or modified sequence
atgcgagatgtctacaagaagttcgatctgggccaggacgtgattgactttacaggccacgcgctcgctctgtaccggaccgacgattatctcgaccaaccatgctacgagacaataaatagaatcaaactgtatagcgagagcctcgcccgctatggaaagagtccttatctttaccccctgtacggtttgggggaactgcctcagggatttgcccgacttagcgcaatttatggaggcacttacatgctgaataagccaatcgaagagattattgtccagaacggcaaggtaatcggagttaagtctgagggggagattgccagatgtaagcagctgatctgcgacccctcctatgtgaaggatcgggtggagaaagtgggtcaggtaatccgggtgatttgcatcttgagtcatcctatcaaaaacacaaacgacgctaactcttgtcagatcataataccccagaaccaagtgaaccgcaagtccgacctccttgcaagcgtcacctcctggtaccagaagacctgggagcagaaggccaggagcctgtttcctgcccatatgatgccccctttgatccttaggcaacgtgtgatgactctcaaaacatctatacgggggtag

SEQ ID NO: 43262 - DNA, 1203 bp, Artificial Sequence
  derived and/or modified sequence
atgaacgaggaatatgacgttatagtgcttgggacagggctcaccgagtgtattcttagcgggatcatgagcgtcaacggcaaaaaagtactgcatatggatcgaaacccttactacggcggagaatcagcaagcatcacaccacttgaggatctttacaagcgttttaaaattcctggctctccacccgaatctatggggcgcggaagggattggaacgtcgacctcatccctaaattcttgatggctaatggattgatgggcctcttcgagaaaagaaggttccgcaaatttctggtgtatgtcgccaatttcgatgaaaaagacccacgtaccttcgagggcattgacccaaagaagaccactatgcgcgacgtctacaagaagttcgacctggggcaggacgtaattgatttcacaggccacgcattggctctgtatcgcaccgacgactacctcgaccaaccctgttatgagactattaaccgaattaagctgtacagtgagtccctggcaagatacggtaaatcgccctacctgtatccactgtatggactcggtgaactaccacaagggttcgccaggctgtcagctatatacggcgggacatatatgttaaacaagccaatagaggaaataatagtgcaaaatgggaaggttataggggtgaaatccgagggcgagattgcccggtgtaaacagctcatctgtgatccctcttacgtgaaagatcgagtcgagaaagtgggacaggttatcagagtgatctgcatcttgtcacaccctatcaaaaacaccaacgatgctaattcctgtcagatcatcattcctcagaaccaagtgaatcgcaaatccgacatctacgtatgtatgataagcttcgcccataacgtcgccgcacagggaaaatacatcgctatcgtgtccactaccgttgagacgaaggagccagaaaaagagatccggccagcgctggagctgctcgaacccatcgaacagaaattcgttagcatctcggatctcctagtgccaaaagacctgggcacagagtcacagatatttatctcaagaacctacgatgcaaccacccattttgagacaacatgcgatgacattaagaacatatacaagcggatgactggttcagagtttgacttcgaggaaatgaagagaaaaaagaacgatatctatggggaagactag

SEQ ID NO: 43263 - DNA, 612 bp, Artificial Sequence
  derived and/or modified sequence
aaaaaattcgatctgggccaggacgtcatagatttcacaggacacgctctggccctgtacaggacagacgattacttggatcagccttgctatgagactatcaatagaattaaactgtattccgaaagcctcgcacggtacgggaagtctccttacctgtacccattgtacgggctgggcgagctaccccaggggtttgcccggctgtcagcgatctacggaggcacttacatgttaaataagcccattgaggagatcattgtgcagaatggtaaagtgatcggcgtcaagtctgagggcgagatcgcacggtgtaagcaactgatctgtgatccaagttacgtgaaggatcgagtggaaaaagttggccaggtgatccgggtgatatgtatcttgtcacacccgatcaagaatactaatgatgccaattcttgtcagatcattataccgcagaaccaggtcaatcgtaaaagcgatctgctggcgtccgttaccagctggtaccagaagacctgggagcagaaagccaggagcctctttcccgcacatatgatgccccccctgattctgcgccagagagtcatgacgctgaaaacttccattcgaggctag

SEQ ID NO: 43264 - DNA, 1408 bp, Artificial Sequence
  derived and/or modified sequence
tggcggtcggtctcgccttgtcgccagctccattttcctctctttctcttcccctttccttcgcgcccaagagcgcctcccagcctcgtagggtggtcacggagcccctgcgccttttccttgctcgggtcctgcgtccgcgcctgccccgccatgaatgaggagtacgacgtgatcgtgctgggcaccggcctgacggaatgtatcctgtcaggtataatgtcagtgaatggcaagaaagttcttcatatggatcgaaacccttactacggaggagagagtgcatctataacaccattggaagatttatacaaaagatttaaaataccaggatcaccacccgagtcaatggggagaggaagagactggaatgttgacttgattcccaagttccttatggctaatggcctaatgggattgtttgaaaaacgtcgcttcaggaaattcctagtgtatgttgccaacttcgatgaaaaagatccaagaacttttgaaggcattgatcctaagaagaccacaatgcgagatgtgtataagaaatttgatttgggtcaagacgttatagattttactggtcatgctcttgcactttacagaactgatgattacttagatcaaccgtgttatgaaaccattaatagaattaaactttacagtgaatctttggcaagatatggcaaaagcccatacctttatccactctatggccttggagaactgccccaaggatttgcaaggctaagtgctatttatggaggtacctatatgctgaataaacccattgaagaaatcattgtacagaatggaaaagtaattggtgtaaaatctgaaggagaaattgctcgctgtaagcagctcatctgtgaccccagctacgtaaaagatcgggtagaaaaagtgggccaggtgatcagagttatttgcatcctcagccaccccatcaagaacaccaatgatgccaactcctgccagatcattattccacagaaccaagtcaatcgaaagtcagatatctacgtctgcatgatctcctttgcgcacaatgtagcagcacaagggaagtacattgctatagttagtacaactgtggaaaccaaggagcctgagaaggaaatcagaccagctttggagctcttggaaccaattgaacagaaatttgttagcatcagtgacctcctggtaccaaaagacttgggaacagaaagccagatctttatttcccgcacatatgatgccaccactcattttgagacaacgtgtgatgacattaaaaacatctataagaggatgacaggatcagagtttgactttgaggaaatgaagcgcaagaagaatgacatctatggggaagactaacagcagtacatgttattatgtaattaggacacatttaaaatttggcaaataa

SEQ ID NO: 43265 - DNA, 834 bp, Artificial Sequence
  derived and/or modified sequence
aagaaatttgatttgggtcaagacgttatagattttactggtcatgctcttgcactttacagaactgatgattacttagatcaaccgtgttatgaaaccattaatagaattaaactttacagtgaatctttggcaagatatggcaaaagcccatacctttatccactctatggccttggagaactgccccaaggatttgcaaggctaagtgctatttatggaggtacctatatgctgaataaacccattgaagaaatcattgtacagaatggaaaagtaattggtgtaaaatctgaaggagaaattgctcgctgtaagcagctcatctgtgaccccagctacgtaaaagatcgggtagaaaaagtgggccaggtgatcagagttatttgcatcctcagccaccccatcaagaacaccaatgatgccaactcctgccagatcattattccacagaaccaagtcaatcgaaagtcagatttgttagcatcagtgacctcctggtaccaaaagacttgggaacagaaagccagatctttatttcccgcacatatgatgccaccactcattttgagacaacgtgtgatgacattaaaaacatctataagaggatgacaggatcagagtttgactttgaggaaatgaagcgcaagaagaatgacatctatggggaagactaacagcagtacatgttattatgtaattaggacacatttaaaatttggcaaataatgcatataatgaaatcaatattgtaaggcctgcttttgtaatgaaaatggagagaatgaagagcgctgtgccagtaaatactccccttcacctttctaattatta

SEQ ID NO: 43266 - DNA, 627 bp, Artificial Sequence
  derived and/or modified sequence
atgagagatgtgtacaagaagtttgacctgggccaggatgtgattgacttcaccggccacgccctggccctgtacagaacagatgactacctggaccagccctgctatgagaccatcaaccgcatcaagctgtacagcgagagcctggcccgctatggcaagagcccctacctgtaccccctgtatggcctgggggagctgccccagggctttgcccggctgagcgccatctacggcggcacctacatgctgaacaagcccatcgaggagatcatcgtgcagaatggcaaggtgattggagtgaagtctgagggggagatcgcccgctgcaagcagctgatctgtgaccccagctatgtgaaggacagagtggagaaggtgggccaggtgatccgggtcatctgcatcctgagccaccccatcaagaacaccaatgatgccaacagctgccagatcatcatcccccagaaccaggtgaacaggaagagtgacctgctggcctctgtgacctcctggtaccagaagacctgggagcagaaggcccggagcctcttccctgcccacatgatgcctcctctcatcctgcggcagagggtgatgaccctgaagaccagcatccggggctag

SEQ ID NO: 43267 - DNA, 1203 bp, Artificial Sequence
  derived and/or modified sequence
atgaatgaggagtatgatgtgattgtgctgggcaccggcctgacagagtgcatcctgagcggcatcatgtctgtgaatggcaagaaggtgctgcacatggacaggaacccctactatggaggagagagcgccagcatcacccccctggaggacctgtacaagcgcttcaagatccctggcagccccccagagagcatgggccggggccgggactggaatgtggacctgatccccaagttcctgatggccaacggcctgatgggcctgtttgagaagaggcgcttcaggaagttcctggtgtatgtggccaactttgatgagaaggaccccaggacctttgagggcatcgaccccaagaagaccaccatgagagatgtgtacaagaagtttgacctgggccaggatgtgattgacttcaccggccacgccctggccctgtacagaacagatgactacctggaccagccctgctatgagaccatcaaccgcatcaagctgtacagcgagagcctggcccgctatggcaagagcccctacctgtaccccctgtatggcctgggggagctgccccagggctttgcccggctgagcgccatctacggcggcacctacatgctgaacaagcccatcgaggagatcatcgtgcagaatggcaaggtgattggagtgaagtctgagggggagatcgcccgctgcaagcagctgatctgtgaccccagctatgtgaaggacagagtggagaaggtgggccaggtgatccgggtcatctgcatcctgagccaccccatcaagaacaccaatgatgccaacagctgccagatcatcatcccccagaaccaggtgaacaggaagagtgacatctacgtgtgcatgatcagctttgcccacaacgtggccgcccagggcaagtacatcgccatcgtgtccaccaccgtggagaccaaggagcctgagaaggagatccggcctgccctggagctgctggagcccatcgagcagaagtttgtgtccatcagtgacctgctggtgcccaaggacctgggcacagagagccagatcttcatcagcaggacctatgatgccaccacccactttgagaccacctgtgatgacatcaagaacatctacaagaggatgacaggcagcgagtttgattttgaggagatgaagaggaagaagaatgacatctatggagaagattag

SEQ ID NO: 43268 - DNA, 612 bp, Artificial Sequence
  derived and/or modified sequence
aagaagtttgacctgggccaggacgtcatcgacttcaccggccacgccctggccctgtacagaacagatgactacctggaccagccctgctatgagaccatcaaccgcatcaagctgtacagcgagagcctggcccgctatggcaagagcccctacctgtaccccctgtatggcctgggggagctgccccagggctttgcccggctgagcgccatctatggaggcacctacatgctgaacaagcccatcgaggagatcatcgtgcagaatggcaaggtgattggagtgaagtctgagggggagatcgcccgctgcaagcagctgatctgtgaccccagctatgtgaaggacagagtggagaaggtgggccaggtgatccgggtcatctgcatcctgagccaccccatcaagaacaccaatgatgccaacagctgccagatcatcatcccccagaaccaggtgaacaggaagagtgacctgctggcctctgtgacctcctggtaccagaagacctgggagcagaaggcccggagcctcttccctgcccacatgatgccacccctcatcctgcggcagagggtgatgaccctgaagaccagcatccggggctag

SEQ ID NO: 43269 - DNA, 627 bp, Artificial Sequence
  derived and/or modified sequence
atgcgggacgtgtacaagaagttcgacctgggccaggacgtgatcgactttactgggcatgccttggcactgtaccgcacagatgattatttagaccagccatgctatgagactattaaccgtattaaattatattccgagagcttggctaggtatgggaagagcccgtacttgtacccactgtatggcttgggggaactgccccagggtttcgctcggctttccgccatctatgggggaacctatatgctgaacaaaccaatcgaggagataatagtgcagaacgggaaggtgatcggagtcaaaagcgaaggagaaattgccaggtgcaagcagttgatatgcgatcccagttatgtcaaggatagagtggagaaggtgggccaggttattcgggtgatctgcattttatcccaccctatcaaaaatacaaacgatgcgaacagctgccagatcataattccacaaaaccaggtaaatcggaagtctgatctgttagcatccgtcactagttggtaccagaaaacatgggaacagaaggccagatctttgtttcccgcgcacatgatgccaccactgatcctccgccagcgtgtgatgactctgaagacctctatcagggggtag

SEQ ID NO: 43270 - DNA, 1203 bp, Artificial Sequence
  derived and/or modified sequence
atgaacgaggagtacgacgtgatcgtgctgggcaccggcctgaccgagtgtattctgagcgggataatgtcagtaaacggaaaaaaagttctacatatggaccgcaacccttactatggcggcgagagtgcctctatcaccccactggaagacctgtacaaacgcttcaagatcccgggatcccctccagaatccatgggccgggggagggattggaacgtcgatctgattcctaagtttctgatggcaaacggcctgatgggactgtttgagaaaagacgctttcgcaaatttcttgtgtacgtagcgaactttgatgaaaaggacccaaggacttttgagggcattgatcctaaaaaaacaacaatgagggatgtctacaagaagttcgatttgggtcaggatgtgatagacttcacagggcacgccctggccttatataggactgatgattatctggatcagccatgctacgaaaccatcaacaggattaagctttattccgagtcactcgcccgctatggcaaaagcccctacctgtatccactgtacggtctcggggagcttcctcagggcttcgcccgactctccgcgatctacggaggtacctacatgctgaacaagcctatcgaagagattatcgtccagaatggcaaggtaatcggggtgaaatccgagggcgaaattgccagatgcaaacagcttatatgtgatccaagttacgttaaagaccgcgtggaaaaagtcggacaggtaatcagggtaatctgtatcctgagtcatcctattaaaaataccaatgacgcgaattcatgccaaatcataatcccccagaatcaggtgaatagaaagtctgatatctacgtgtgtatgatctcctttgcacacaacgtggctgcccaaggtaaatacatcgcaatcgtctcaaccactgtagagaccaaagagccggagaaggaaattcggccagcgctggaactcttggagcccatcgagcaaaaattcgtatccatatcagatctgctggtgcctaaggatcttggcacagaaagtcagatctttattagtaggacctatgatgctaccacccacttcgaaaccacctgcgacgatataaagaacatctacaagcggatgacggggtccgagttcgatttcgaggagatgaaacgaaagaagaatgatatttacggcgaagattag

SEQ ID NO: 43271 - DNA, 612 bp, Artificial Sequence
  derived and/or modified sequence
aagaagttcgacctgggccaggacgtgatcgacttcaccggccacgccctcgcattgtatcggacagatgactatcttgaccagccctgctacgagacgattaaccgcattaagctctattccgagtctctggcacgctacggcaaatccccgtacctctacccactttatggactgggagagttaccgcagggatttgcccgactaagtgccatctatggcggcacgtacatgttgaataagcctattgaagagatcatagtccagaatggaaaggtgataggcgttaaatctgagggagagattgctcgttgcaaacagcttatctgtgatccttcgtacgtcaaagacagggtagagaaggtgggacaagtaatcagggtgatctgtatcctgtcccatcctatcaagaacacaaacgatgcgaattcatgtcagatcatcatacctcaaaaccaggtgaacagaaagagcgacctgctggcttcagtgacttcctggtatcagaagacttgggagcagaaggcaaggagcctcttcccagctcacatgatgccaccgctgattctgcgccagcgggtcatgactttgaagacttccattcgaggttag

SEQ ID NO: 43272 - DNA, 627 bp, Artificial Sequence
  derived and/or modified sequence
atgcgtgatgtctacaaaaaatttgacttgggacaagatgtgatagactttaccggacatgcattggcgctgtaccggactgatgattacctcgaccagccatgttacgagacaatcaaccggattaagctttacagcgagagtttggcacggtacggaaagagtccctacctgtaccccctatacgggctgggagagctgccacagggattcgcaagactgtctgccatatacggcggaacatatatgctcaataagccaatcgaagagatcatcgtacagaacggcaaagtcatcggagtcaaatcagaaggggagatcgcacgctgcaagcagctgatctgcgatccatcatatgtgaaggaccgtgtagagaaggtcggccaggttatacgggttatttgtatcctgtcacaccccatcaagaatacaaacgatgcaaattcctgtcaaataatcatccctcagaatcaagtgaaccgcaagagcgatctgctggcttcagtgacgtcctggtatcagaaaacttgggaacagaaggcccgatccctgtttcctgctcatatgatgccaccgcttattctgaggcagcgcgtgatgacgctcaaaacttctatccgtggctag

SEQ ID NO: 43273 - DNA, 1203 bp, Artificial Sequence
  derived and/or modified sequence
atgaacgaggaatatgacgttatcgttctgggcactggcctgacggagtgtatattgtccggaattatgtcagtcaatggcaagaaagtgttgcacatggacagaaacccgtactatggtggggaatctgcctctatcactccactggaggatctctacaagaggttcaagattcccggatctcccccagagtctatgggacggggtcgggactggaatgtcgacctgatccctaaatttctgatggctaacggattgatgggcctattcgagaagcggagattcagaaagtttctcgtgtatgtcgccaattttgacgagaaagaccccaggacctttgaaggaattgatccgaagaaaaccacaatgcgggacgtctataagaaattcgaccttggacaggatgtgatcgactttacgggacacgctctcgccctttaccggactgacgattacctcgatcaaccctgctacgaaaccatcaacaggatcaagctctatagtgagagcttggctagatatggaaagagcccgtacctgtaccccctgtatggcctcggggagctcccccaggggttcgcccgactatctgctatctacggcggaacgtatatgctgaataagccgatagaagaaatcattgtgcagaatggcaaagtgatcggagtgaaaagcgaaggtgagattgctcggtgtaaacagctcatatgcgacccgtcctatgtcaaggaccgggttgaaaaagtgggccaggtaatccgcgtgatttgcatccttagtcacccaattaagaataccaacgacgccaacagctgtcagataattatcccgcagaatcaggtcaaccgaaagtccgacatttatgtgtgcatgatttccttcgcgcataatgttgccgctcagggcaagtatatcgccatcgtttccactacggtagagactaaagagccagaaaaagaaattaggccagcgttagaactgctcgaaccgatcgaacagaagtttgtctccattagcgatctgctggtgcccaaggacctcgggacagagtcgcagattttcatctcacgcacatacgatgccaccacgcatttcgagaccacctgcgatgacatcaaaaacatctacaagagaatgaccggctccgagtttgacttcgaggagatgaagaggaaaaagaacgatatctacggcgaagattag

SEQ ID NO: 43274 - DNA, 612 bp, Artificial Sequence
  derived and/or modified sequence
aagaaattcgatctgggccaggacgtcattgatttcaccgggcacgccctggcgctataccgcaccgatgattatctggatcagccctgctatgagaccattaatcggattaagctctactctgagagcctggccaggtatgggaagagcccttatctctaccctctttacggccttggtgagcttcctcagggtttcgccagactgtcagctatctatggcggaacctacatgcttaacaagcctattgaagagattattgtgcaaaacggaaaggtaatcggagttaaatccgagggggagattgctcgttgcaagcagctgatctgtgatcccagctacgtgaaggatcgggtggagaaagttggccaggtgatcagagtcatctgcatactgtctcacccaatcaaaaatacaaacgatgccaatagttgccagataataattcctcagaatcaggttaatcgcaagtccgatctcttggcatcagtgacctcttggtaccagaaaacatgggagcagaaagctaggtctctgtttcccgcacacatgatgcctccgctgattctgcgccagagagttatgacactcaaaacatccatccgaggttag

SEQ ID NO: 43275 - DNA, 627 bp, Artificial Sequence
  derived and/or modified sequence
atgagagacgtgtacaagaagttcgacctgggccaggacgtgatcgacttcaccggccacgccctggccctgtacagaaccgacgactacctggaccagccctgctacgagaccatcaacagaatcaagctgtacagcgagagcctggccagatacggcaagagcccctacctgtaccccctgtacggcctgggcgagctgccccagggcttcgccagactgagcgccatctacggcggcacctacatgctgaacaagcccatcgaggagatcatcgtgcagaacggcaaggtgatcggcgtgaagagcgagggcgagatcgccagatgcaagcagctgatctgcgaccccagctacgtgaaggacagagtggagaaggtgggccaggtgatcagagtgatctgcatcctgagccaccccatcaagaacaccaacgacgccaacagctgccagatcatcatcccccagaaccaggtgaacagaaagagcgacctgctggccagcgtgaccagctggtaccagaagacctgggagcagaaggccagaagcctgttccccgcccacatgatgccccccctgatcctgagacagagagtgatgaccctgaagaccagcatcagaggctag

SEQ ID NO: 43276 - DNA, 1203 bp, Artificial Sequence
  derived and/or modified sequence
atgaacgaggagtacgacgtgatcgtgctgggcaccggcctgaccgagtgcatcctgagcggcatcatgagcgtgaacggcaagaaggtgctgcacatggacagaaacccctactacggcggcgagagcgccagcatcacccccctggaggacctgtacaagagattcaagatccccggcagcccccccgagagcatgggcagaggcagagactggaacgtggacctgatccccaagttcctgatggccaacggcctgatgggcctgttcgagaagagaagattcagaaagttcctggtgtacgtggccaacttcgacgagaaggaccccagaaccttcgagggcatcgaccccaagaagaccaccatgagagacgtgtacaagaagttcgacctgggccaggacgtgatcgacttcaccggccacgccctggccctgtacagaaccgacgactacctggaccagccctgctacgagaccatcaacagaatcaagctgtacagcgagagcctggccagatacggcaagagcccctacctgtaccccctgtacggcctgggcgagctgccccagggcttcgccagactgagcgccatctacggcggcacctacatgctgaacaagcccatcgaggagatcatcgtgcagaacggcaaggtgatcggcgtgaagagcgagggcgagatcgccagatgcaagcagctgatctgcgaccccagctacgtgaaggacagagtggagaaggtgggccaggtgatcagagtgatctgcatcctgagccaccccatcaagaacaccaacgacgccaacagctgccagatcatcatcccccagaaccaggtgaacagaaagagcgacatctacgtgtgcatgatcagcttcgcccacaacgtggccgcccagggcaagtacatcgccatcgtgagcaccaccgtggagaccaaggagcccgagaaggagatcagacccgccctggagctgctggagcccatcgagcagaagttcgtgagcatcagcgacctgctggtgcccaaggacctgggcaccgagagccagatcttcatcagcagaacctacgacgccaccacccacttcgagaccacctgcgacgacatcaagaacatctacaagagaatgaccggcagcgagttcgacttcgaggagatgaagagaaagaagaacgacatctacggcgaggactag

SEQ ID NO: 43277 - DNA, 612 bp, Artificial Sequence
  derived and/or modified sequence
aagaagttcgacctgggccaggacgtgatcgacttcaccggccacgccctggccctgtacagaaccgacgactacctggaccagccctgctacgagaccatcaacagaatcaagctgtacagcgagagcctggccagatacggcaagagcccctacctgtaccccctgtacggcctgggcgagctgccccagggcttcgccagactgagcgccatctacggcggcacctacatgctgaacaagcccatcgaggagatcatcgtgcagaacggcaaggtgatcggcgtgaagagcgagggcgagatcgccagatgcaagcagctgatctgcgaccccagctacgtgaaggacagagtggagaaggtgggccaggtgatcagagtgatctgcatcctgagccaccccatcaagaacaccaacgacgccaacagctgccagatcatcatcccccagaaccaggtgaacagaaagagcgacctgctggccagcgtgaccagctggtaccagaagacctgggagcagaaggccagaagcctgttccccgcccacatgatgccccccctgatcctgagacagagagtgatgaccctgaagaccagcatcagaggctag

SEQ ID NO: 43278 - protein, 468 aa, Artificial Sequence
  derived and/or modified sequence
MAGVVHVSLAALLLLPMAPAMHSDCIFKKEQAMCLEKIQRANELMGFNDSSPGCPGMWDNITCWKPAHVGEMVLVSCPELFRIFNPDQVWETETIGESDFGDSNSLDLSDMGVVSRNCTEDGWSEPFPHYFDACGFDEYESETGDQDYYYLSVKALYTVGYSTSLVTLTTAMVILCRFRKLHCTRNFIHMNLFVSFMLRAISVFIKDWILYAEQDSNHCFISTVECKAVMVFFHYCVVSNYFWLFIEGLYLFTLLVETFFPERRYFYWYTIIGWGTPTVCVTVWATLRLYFDDTGCWDMNDSTALWWVIKGPVVGSIMVNFVLFIGIIVILVQKLQSPDMGGNESSIYLRLARSTLLLIPLFGIHYTVFAFSPENVSKRERLVFELGLGSFQGFVVAVLYCFLNGEVQAEIKRKWRSWKVNRYFAVDFKHRHPSLASSGVNGGTQLSILSKSSSQIRMSGLPADNLAT

SEQ ID NO: 43279 - protein, 74 aa, Artificial Sequence
  derived and/or modified sequence
MAGVVHVSLAALLLLPMAPAMHSDCIFKKEQAMCLEKIQRANELMGFNDSSPGCPGMWDNITCWKPAHVGEMVL

SEQ ID NO: 43280 - DNA, 1407 bp, Artificial Sequence
  derived and/or modified sequence
atggcaggggtagtgcacgtgtctctagctgctctgcttctcctgccgatggctccagccatgcacagcgattgtatctttaaaaaggaacaggcgatgtgcctggaaaagatccagcgtgcgaatgagctgatgggcttcaatgactcaagtccaggttgccccgggatgtgggacaatatcacctgctggaagcccgctcacgtcggtgagatggtgctcgtgagctgtccggagctatttcgaatttttaaccccgatcaggtgtgggagactgagacgatcggggagtctgacttcggcgacagcaatagtctagatttgagtgacatgggcgtggtctcacgcaactgcacggaggatggttggagcgaaccttttcctcattattttgatgcatgtggcttcgatgagtacgaatctgaaaccggggaccaagattactactatctcagtgtcaaggctctctatacagtagggtacagtacatccctcgttacattgactaccgcaatggtgattctttgcagatttcggaagctccactgcacccggaactttattcacatgaatttgtttgtatcttttatgctgcgtgctatcagtgttttcatcaaggactggatcctctatgcggaacaagacagcaatcactgtttcatatcaaccgttgagtgcaaggctgttatggtcttctttcattactgtgtggtgtctaattacttttggctcttcatcgaaggcttgtatctgttcacattgttagtggagacattttttccggagcgaaggtatttttattggtatactatcattggatgggggacaccaacagtttgcgtgactgtctgggcaactctgcgactgtacttcgatgatactggatgttgggacatgaacgactctactgccctttggtgggtgattaaaggacctgttgtcgggtccatcatggtgaacttcgtcctcttcattgggataattgtaatattggtgcaaaaactgcagagtccagatatgggtggaaatgagagctcaatttatctgagacttgcaagaagtacattgctattaattcctctgttcggaatccattataccgtgtttgctttctcaccagagaacgtgtcaaaaagggaacgactggtttttgagctcggcctcggctcattccaggggttcgtagtcgcagtgctgtactgtttcctcaatggtgaggttcaagcggaaatcaaacggaaatggcggtcatggaaggttaatcgatattttgctgttgattttaaacacagacacccatccctcgctagcagcggtgtgaacgggggaacgcaacttagcatacttagcaagtcaagctcccagatccggatgtccggtcttcctgcggataacctggccacatag

SEQ ID NO: 43281 - DNA, 6487 bp, Artificial Sequence
  derived and/or modified sequence
gcgagcgtggtccccgcgtgcgcacacgcacacgccgccgcgcagggacacacggaccccggccgccagccggccacacaggcgcggagacccggctcggcgcgcgctcctcggcgcacacgctccccatccccgcgccgcgcgggccgcggacttgcaggctgcgcgtcctttgcggagtctgccccggccccacggacaggccccgcagtgagcagcccagagacacattggggctgacctgccgctgctgtcagtgggaggccagtggtgctggccaagaagtgtcatggctggtgtcgtgcacgtttccctggctgctctcctcctgctgcctatggcccctgccatgcattctgactgcatcttcaagaaggagcaagccatgtgcctggagaagatccagagggccaatgagctgatgggcttcaatgattcctctccaggctgtcctgggatgtgggacaacatcacgtgttggaagcccgcccatgtgggtgagatggtcctggtcagctgccctgagctcttccgaatcttcaacccagaccaagtctgggagaccgaaaccattggagagtctgattttggtgacagtaactccttagatctctcagacatgggagtggtgagccggaactgcacggaggatggctggtcggaacccttccctcattactttgatgcctgtgggtttgatgaatatgaatctgagactggggaccaggattattactacctgtcagtgaaggccctctacacggttggctacagcacatccctcgtcaccctcaccactgccatggtcatcctttgtcgcttccggaagctgcactgcacacgcaacttcatccacatgaacctgtttgtgtcgttcatgctgagggcgatctccgtcttcatcaaagactggattctgtatgcggagcaggacagcaaccactgcttcatctccactgtggaatgtaaggccgtcatggttttcttccactactgtgttgtgtccaactacttctggctgttcatcgagggcctgtacctcttcactctgctggtggagaccttcttccctgaaaggagatacttctactggtacaccatcattggctgggggaccccaactgtgtgtgtgacagtgtgggctacgctgagactctactttgatgacacaggctgctgggatatgaatgacagcacagctctgtggtgggtgatcaaaggccctgtggttggctctatcatggttaactttgtgctttttattggcattatcgtcatccttgtgcagaaacttcagtctccagacatgggaggcaatgagtccagcatctacttgcgactggcccggtccaccctgctgctcatcccactattcggaatccactacacagtatttgccttctccccagagaatgtcagcaaaagggaaagactcgtgtttgagctggggctgggctccttccagggctttgtggtggctgttctctactgttttctgaatggtgaggtacaagcggagatcaagcgaaaatggcgaagctggaaggtgaaccgttacttcgctgtggacttcaagcaccgacacccgtctctggccagcagtggggtgaatgggggcacccagctctccatcctgagcaagagcagctcccaaatccgcatgtctggcctccctgctgacaatctggccacctgagccatgctcccctcctcctcctctcctccatccacaggctgggaccgcaggcaggtgccagcccacgcatgtttgcgcctcttccctccccttgggcaggccctgggctggaagcttggctcctgaggggggagaaggaggcagggcacagactggaattgtcccctccttgttttggtactggtcccacccactgtggtcccctgggccctgaccccagacatgtaaatactcctcaaatttggaaaagttgtcccatcccttccccctttgccccagtgtccctgctcacttccagtcaggtctcagctccaccccactgtttcttggtcagcctcagtgatggcctgaccccagctgtgaggccttgtgagctaaggctgaagagaccttgcctgtgggagctggggtggtacctgccccaacagccccccatcatctgattttgggtgtgacccctcgagtgtgcatgccaccctggggctcttctcagtcctgggcccaagtccctgaagcctagcagagggccagctcgggtggccagaacaccccttggtgcaggcctcctggcactcgcctggcatcttggtgtccgggtgctcagctcctgggtcccagggcagtgggacagctcccaggctcttctcatcagagacttcagtttgggtggggagtctgcaggtcagggaaggttctggtgcttttcgtttgatccaaaaggagctgagagccagaaatgtggctgtgattgcgaaagagacggagtttgggagacccatggaagaaaaccttcgccatctccattgttttacccccagctcaagatggacagggttcttctggtcatctcccttccacctcttccaccctcatggatgccttccagaagctgtctccaaccatgcacaccacagagagcccttaagccctcccctccccatttcccctaagtcaaagccatgactaggatgtaccagccacctgcctctgatgtcggcgaatcctgaagcacctgcacccgaatctggggcccagggctgcccgacccccactcccatggatgatgaggagccccagacaccagctcctctggcctggactcaactattgaaatctctctgagacctctgcaaagatgtcccttttatgcccttgaccttgactcaccatgggctgctggggtgtcgggagaagccacacccaacatgcccattagcagaggctgctgctgatgtggcagctgctccctaccacccgccctggctccccagctgcaggttgcacaccctcagcctgagaatgtaaaatagggcagtgcccagctggggaggtagaggaaagtgctagagtacatggtccgtgtgtggcctagctcattccatgtcagcatttggtgttactcctgtccaaattctgtttgcagacttgtttcatgatgatgctctggaatgcttggggactttgggtggaggaggatgttacttcattttataaagaggaaggggcctgggagacttgggaaaatgtttctggagaggctttcagagtggctggaaaaggctcttgttgctgtaatttagagaggagctctgtgtccttggccagtcaagtaagttcctggatctttggcaaagccagaggaagaaaggagctacctgccctttcctgggcatgcttggtgactcagattgatcttggagtgtgcagtggcccttctaccctgcacctgacctcatgatcccctccacctgcactggtgtgcattactgaagcaagggtcctgtggacatcttgcattttgggcactgctagggggtctgggctgcttggaaggagccatggcctagggttcagggaactagactctatcccagttgggttcagactgctgtgactgtggacacgatgctccttgttctgggctccagttttcccatttgtgagatgaggcaacttccaatgcttctctaggccctgcacgtaagtgatttttccagttcaaagtcaagacaggtaaaagggcattcatcattgtgcctcatatcaggttttgatgaatatatgtgtgtgtgtgtgtgtgtgtgtgtgtgtgtgtgtagagggatggacaggatgctgtttattttccctttcttggaaatggaccttctgtcccttccatttggacaccacagtggaagctggtggcctggaaggaaggattaggtcatggacatttgaacaggtgccttgggcatgatgtatagatgcagtcatatataccttgctggggtggggtgccacctccagtggccagctccagatccaaggagcagccccctggggatggaccccattcattcatcatgactcccaacagttttcattgtggaagaagaaactttggcattatagagacatcatcacaaaacagtaaaaacaaaatcaaccctgaaccccatgcactgtgctgcttcctgagcctggccctgcatcctcatagaggtgccgggttcctattggttagttggttgtttttccgtctgagtgaatttttgccagtcttgtgagcagatgtacctgatgtattctcaatgttccaagaggttctggccttcagggtcacaggcagtagggggacagcataaggtctatgtaaaacccttccctctctgaccctctgttttcaaatctgtaaaatgggcaataagactagatgatttgtatatagcccaatgcatctctggaactctgtctaaacaccagccatctacttggaatgggccccaggactgtggtatttgcctgggccaggaaaggataagaaatcctgtcatgtgaagacagcttgagaggcttgagaaaagtggggctggggagaagcaggcttgtcagactccacccctgttgatgatcattcctgggaaggggtttctcgttctatgcaatcctaaaggacgaaactcacccatgggaggccgaattctccttgggatgaagaaatttctctttccctgtcatgagtgtccagccagggagcagggaggcagtgtcagggagggactctcatcctggaggaaatgggattccaagtcaaggatgctgaggctgtcagggagccagagaggggggtccaagtgcgggatgtgggtggctctgtggttcagtggctctgtggtagttcctagcactgcagacttcatgactccccacttaagtccaagtcacattgtctatcccagtgtgtagctctgtcaccctgcttgacacatccagtggcctacagcgactcttctctaaccccaccccctccaagctgggttctttgtggaagaaggacagggagctagagccaagccctaggcttgagagacacctgcatctataatccccgccaaggatgcccactcacctctctcatctgatcctcactctttgtggaagggaaagctcaaagggactctctctctctctctctttttttttttttttgagtagtacccttgccctcttcatggccacttcaaagtgaagccagcaaagtgataatactttatcatttagtattatcataaagtattaatactttgtcataaagtcctccttgagcccagggaccatggaagtcagctagaagagccctgagcaaggagcaaggacttgggcttctccacgctttgctcctggcttgtttgaccttgactcattccccatatgtctttgaggaggctcacaaaatactaaagctgggaggaaacttggagatctataggtcaaacctccccattgggctgatgagaaaatacacgcaggcctagcatggtgcctgccaccatggtgggatccagtatgttttataaatctgaatgagtaaatggctcaccaatttatgcatagccctgcacatgagcagaatgtgacactcaaagcatccatgcagtacgcatgtaaccttgcacaggagtggggctctggtgaccgaaggttgtccaggactcttgcaggagaagcaatggagtcagtgtggtgtggggagacctactttttaacctgggcttagccacctgctctgtgatccagggcttaccttctttgggcctcggcctcctaatctgggtaatggggaggacttcattggcattgttagtcccacaggccaaggataaggttgaaatgagacggcttgtgtgtgaaaagattttggaaattacacagatgtgggcttgttattgggatgaagactgctggaagggactccttgctgtttatctactgctttgagccctcctaagttaacctgtgcctcatttgtaaaaccaccagcatcaggagtaagggggaggccagagggctcagatggacacagaattctagctttacctgcatccgctgattcagttttctgttgggatcagagtgaggatacttccatatgggtgatagcagccatgcccctgggagtcaacttcaaggatctgggacattttggtgtgcccattccttcttttcctgaactcacagtcttggggtgtttctgcacttggctatgtgtgtcttgtctgatgtctgtcttctgtagctttgcctctatcagggctggagtggtgcagcccctggcatctcagacatggttcctgcctcacttgtgggagctggaccagcctgggtttcatctcccacagtaaagctaagtaagccccacagaccttactgctactgctgctgccattaatgctgtgctcactatcttgtccaggattttaaggatgtcagactgctgtagatgactcaataaatgttttgccatttttc

SEQ ID NO: 43282 - DNA, 1407 bp, Artificial Sequence
  derived and/or modified sequence
atggccggcgtggtgcacgtgtccctggccgccctgctgctgctgcccatggccccagccatgcacagcgactgcatcttcaagaaggagcaggccatgtgcctggagaagatccagagggccaatgagctgatgggcttcaatgacagcagccctggctgccccggcatgtgggacaacatcacctgctggaagccagcccacgtgggggagatggtgctggtgtcctgcccagagctgttccgcatcttcaacccagaccaggtgtgggagacagagaccatcggggagagtgactttggagacagcaacagcctggacctgagtgacatgggcgtggtgtccaggaactgcacagaagatggctggagcgagcccttcccccactactttgatgcctgtggctttgatgaatatgaaagtgaaacaggagaccaggactactactacctgtctgtgaaggccctgtacacagtgggctacagcaccagcctggtgaccctgaccacagccatggtgatcctgtgccgcttcaggaagctgcactgcaccaggaacttcatccacatgaacctgtttgtgtccttcatgctgcgggccatcagcgtcttcatcaaggactggatcctgtatgcagagcaggacagcaaccactgcttcatcagcacagtggagtgcaaggctgtgatggtgttcttccactactgtgtggtgagcaactacttctggctgttcatcgagggcctgtacctgttcaccctgctggtggagaccttcttccctgagcggcgctacttctactggtacaccatcatcggctggggcacccccaccgtgtgtgtgacagtgtgggccaccctgcggctgtactttgatgacaccggctgctgggacatgaatgacagcacagccctgtggtgggtgatcaagggccctgtggtgggcagcatcatggtgaactttgtgctcttcatcggcatcatcgtcatcctggtgcagaagctgcagagcccagacatgggcggcaatgaaagcagcatctacctgcggctggcccggagcaccctgctgctgatccccctgtttggcatccactacacagtgtttgccttctccccagaaaatgtgtccaagcgggagcggctggtgtttgagctgggcctgggcagcttccagggctttgtggtggccgtgctgtactgcttcctgaatggagaggtgcaggccgagatcaagaggaagtggaggtcctggaaggtgaaccgctactttgctgtggacttcaagcaccgccaccccagcctggccagcagcggcgtgaatggaggcacccagctgagcatcctgagcaagagcagcagccagatccgcatgagcggcctgcctgctgacaacctggccacctag

SEQ ID NO: 43283 - DNA, 1407 bp, Artificial Sequence
  derived and/or modified sequence
atggccggcgtggtgcacgtgagcctggccgccctgctgctgctgcccatggccccagccatgcattctgattgtattttcaaaaaagagcaggccatgtgtctggaaaaaattcagcgggcgaacgagctcatgggattcaacgattcttcgccggggtgtcccggaatgtgggacaacataacctgttggaagcccgcccacgtcggcgaaatggtgctcgtaagctgtcccgaattgttccggatctttaaccctgaccaggtatgggaaaccgagacaatcggcgagtccgacttcggcgactctaacagcctggatctgtcagacatgggtgttgtcagtaggaactgtacagaagatggctggagcgagccatttccccactacttcgacgcctgtggcttcgatgaatacgaatccgagacaggagatcaggattactactacctgtcggttaaggccctttacacggtgggatatagtactagcctggtcaccttgacaactgccatggtaatcctctgtaggttccggaagctacattgcactaggaatttcattcatatgaacctgttcgtctcctttatgcttcgagcaatttcagtctttatcaaagattggatattatatgcagagcaggatagcaaccattgcttcatcagcactgtggagtgcaaagccgttatggtctttttccactattgcgtagtgtctaactatttttggcttttcatcgaggggctgtaccttttcacattgttggttgagactttttttcctgaaaggagatatttttactggtacaccattattggttggggaactccgaccgtatgcgtgactgtgtgggccacgttacgcctgtatttcgatgacaccgggtgctgggacatgaacgatagcaccgccctgtggtgggtcataaagggcccagtggttggttctattatggttaactttgtgctttttatcgggatcatcgtgattttagtacagaagctccaatcacccgacatgggcggcaatgagtcttccatctatctgcgcctagcccgttccactttattgctgatccccctgttcggaatacattatacagtcttcgcattttctccagaaaacgtttctaagcgagagaggcttgtctttgagctggggcttgggtccttccagggattcgtagttgcggtcctttactgttttctgaacggtgaggtacaggcggagatcaagaggaaatggcggtcctggaaagtgaacagatactttgcggtggactttaaacatcggcatccttcacttgccagttcgggggttaatggtgggacacagctgagcattctgagcaagtccagctctcagatcagaatgagcggcctgcccgcggataatctggccacttag

SEQ ID NO: 43284 - DNA, 1407 bp, Artificial Sequence
  derived and/or modified sequence
atggccggagtggttcacgtttcccttgctgctctgctcctgctccccatggcccctgcaatgcatagcgactgtatctttaaaaaggagcaggctatgtgcttggagaagatccagcgagcaaatgagctgatgggctttaacgacagctcacctggctgcccaggcatgtgggacaatattacatgttggaagccagctcacgtcggcgagatggtcctggtgtcatgccctgagttgtttcgcatctttaaccctgaccaggtttgggaaacagagaccattggggaaagtgacttcggcgactctaacagcctggacctgagtgatatgggtgtcgtttcgcgtaactgtacagaggacgggtggagtgaaccttttccccattacttcgatgcctgcggatttgacgagtatgaaagcgaaacgggagatcaggattactactatctgagtgttaaagccctgtacacagtggggtactccacctctctggtaacgctgactaccgccatggtgatcctctgtaggtttcggaagcttcattgcactcgcaattttatccacatgaacttgttcgtatctttcatgctcagagccatttctgtgtttataaaagactggattttgtatgctgaacaggactcaaaccattgttttatcagtacagtggaatgcaaggctgtgatggtcttctttcattattgtgtggtcagcaattatttttggctcttcatcgaaggcctgtacctgttcaccctcctcgtggagacgttttttcccgagcgtagatatttctactggtatacaatcattggatggggaaccccaacagtgtgcgtgacagtgtgggctaccctcaggctctactttgacgacactggatgttgggacatgaacgattccactgctctctggtgggttataaaagggcctgtggtgggatctatcatggtaaacttcgtgctgtttatcgggattatagttatcctcgtgcagaagctacagtcacccgacatgggcggaaacgagtcttcaatttacctccgcttagccagatctaccctgcttctgatccccctgtttggcattcactacacggtgttcgccttcagccccgagaatgtgtctaaaagggagcgactggtgtttgaactgggactcggctctttccagggattcgtggtggctgtcctatattgctttcttaacggcgaggtgcaagcagagatcaagcgcaagtggaggagctggaaagtgaataggtacttcgctgttgattttaagcacaggcatccatctttggcctcatcaggggtgaacggtggaacccagctgagcattctgtcgaaatcctctagtcagattagaatgtcgggcctcccagctgacaacctggccacatag

SEQ ID NO: 43285 - DNA, 1407 bp, Artificial Sequence
  derived and/or modified sequence
atggccggcgtggtgcacgtgagcctggccgccctgctgctgctgcccatggcccccgccatgcacagcgactgcatcttcaagaaggagcaggccatgtgcctggagaagatccagagagccaacgagctgatgggcttcaacgacagcagccccggctgccccggcatgtgggacaacatcacctgctggaagcccgcccacgtgggcgagatggtgctggtgagctgccccgagctgttcagaatcttcaaccccgaccaggtgtgggagaccgagaccatcggcgagagcgacttcggcgacagcaacagcctggacctgagcgacatgggcgtggtgagcagaaactgcaccgaggacggctggagcgagcccttcccccactacttcgacgcctgcggcttcgacgagtacgagagcgagaccggcgaccaggactactactacctgagcgtgaaggccctgtacaccgtgggctacagcaccagcctggtgaccctgaccaccgccatggtgatcctgtgcagattcagaaagctgcactgcaccagaaacttcatccacatgaacctgttcgtgagcttcatgctgagagccatcagcgtgttcatcaaggactggatcctgtacgccgagcaggacagcaaccactgcttcatcagcaccgtggagtgcaaggccgtgatggtgttcttccactactgcgtggtgagcaactacttctggctgttcatcgagggcctgtacctgttcaccctgctggtggagaccttcttccccgagagaagatacttctactggtacaccatcatcggctggggcacccccaccgtgtgcgtgaccgtgtgggccaccctgagactgtacttcgacgacaccggctgctgggacatgaacgacagcaccgccctgtggtgggtgatcaagggccccgtggtgggcagcatcatggtgaacttcgtgctgttcatcggcatcatcgtgatcctggtgcagaagctgcagagccccgacatgggcggcaacgagagcagcatctacctgagactggccagaagcaccctgctgctgatccccctgttcggcatccactacaccgtgttcgccttcagccccgagaacgtgagcaagagagagagactggtgttcgagctgggcctgggcagcttccagggcttcgtggtggccgtgctgtactgcttcctgaacggcgaggtgcaggccgagatcaagagaaagtggagaagctggaaggtgaacagatacttcgccgtggacttcaagcacagacaccccagcctggccagcagcggcgtgaacggcggcacccagctgagcatcctgagcaagagcagcagccagatcagaatgagcggcctgcccgccgacaacctggccacctag

SEQ ID NO: 43286 - protein, 737 aa, Artificial Sequence
  derived and/or modified sequence
MNGDSRAAVVTSPPPTTAPHKERYFDRVDENNPEYLRERNMAPDLRQDFNMMEQKKRVSMILQSPAFCEELESMIQEQFKKGKNPTGLLALQQIADFMTTNVPNVYPAAPQGGMAALNMSLGMVTPVNDLRGSDSIAYDKGEKLLRCKLAAFYRLADLFGWSQLIYNHITTRVNSEQEHFLIVPFGLLYSEVTASSLVKINLQGDIVDRGSTNLGVNQAGFTLHSAIYAARPDVKCVVHIHTPAGAAVSAMKCGLLPISPEALSLGEVAYHDYHGILVDEEEKVLIQKNLGPKSKVLILRNHGLVSVGESVEEAFYYIHNLVVACEIQVRTLASAGGPDNLVLLNPEKYKAKSRSPGSPVGEGTGSPPKWQIGEQEFEALMRMLDNLGYRTGYPYRYPALREKSKKYSDVEVPASVTGYSFASDGDSGTCSPLRHSFQKQQREKTRWLNSGRGDEASEEGQNGSSPKSKTKWTKEDGHRTSTSAVPNLFVPLNTNPKEVQEMRNKIREQNLQDIKTAGPQSQVLCGVVMDRSLVQGELVTASKAIIEKEYQPHVIVSTTGPNPFTTLTDRELEEYRREVERKQKGSEENLDEAREQKEKSPPDQPAVPHPPPSTPIKLEEDLVPEPTTGDDSDAATFKPTLPDLSPDEPSEALGFPMLEKEEEAHRPPSPTEAPTEASPEPAPDPAPVAEEAAPSAVEEGAAADPGSDGSPGKSPSKKKKKFRTPSFLKKSKKKSDS

SEQ ID NO: 43287 - DNA, 2214 bp, Artificial Sequence
  derived and/or modified sequence
atgaacggggacagtagagccgccgtggtcacatcaccaccacctactacggccccccataaagaaagatacttcgacagagtggatgaaaataatcctgaatatttgcgtgagagaaacatggcacctgacctgcggcaggacttcaacatgatggaacaaaagaagagagtttcgatgatcctgcagagcccagcattttgcgaagaactggaatccatgatccaggaacaattcaaaaagggtaaaaatcctactggtctcctagccctgcagcagattgccgactttatgacgactaatgtgcccaacgtataccccgccgcaccccaaggtggaatggccgctctgaacatgtcgctgggaatggtgacccctgtcaatgaccttagagggtcagattctatcgcttacgataagggggaaaagctgctcagatgcaagctcgcagctttctataggctcgccgatcttttcggctggagccagctaatttataaccacatcacaaccagagtgaacagtgagcaggagcatttcctcattgtgcccttcggcctgttgtattcagaggttaccgcttccagcttggtgaagattaacctgcaaggcgacatcgtggaccgcggcagcacaaatctgggagtaaaccaggccggcttcacactccattcagcgatatatgcagcccgccctgatgtgaagtgcgtggtgcacattcacactcccgcaggtgcagcagtgtctgctatgaagtgcggcctccttcccattagccccgaagccctcagtctgggagaagtcgcgtaccacgattatcatggcatcttggttgacgaagaggagaaagtgctgattcaaaaaaatcttggcccgaagtccaaagtgctgatcctaagaaatcacggactggtgtcggttggcgagagtgttgaggaagccttctactacatacacaatttggtggtggcatgcgagattcaggtgagaactctggcgtcggctggagggcccgataatctggttctgctgaaccccgaaaagtataaagcaaaatccagatctccgggctcacctgtcggagaggggactggcagccctccaaagtggcagataggcgagcaggaattcgaggcgttgatgcgcatgctggacaacctgggatatcgcacagggtatccatataggtatcccgcgcttcgggagaagagtaagaagtactcggacgtggaggtacccgcgagcgttacgggctacagctttgcaagtgacggagattccgggacatgcagcccactccgccactcatttcagaaacagcaaagggaaaagaccagatggttgaactcaggaagaggagatgaagccagcgaggaaggtcagaacgggtctagccctaaaagtaagactaagtggacaaaggaggatggccataggacatctacatccgccgtccctaatctgttcgttccactgaacacgaatcccaaggaggtgcaagaaatgagaaacaagattagggagcaaaatctgcaagatatcaaaaccgcggggcctcaatcccaggtgctgtgtggagttgtgatggatcgatcactagtacagggcgaactcgttaccgcctctaaagcgattatcgaaaaggagtatcagcctcacgtgatcgtatccacaacaggacctaatccttttacaactcttaccgacagggaactggaggaatatagacgcgaggtcgaacggaagcagaagggcagtgaggagaacctcgatgaggcccgggagcagaaagaaaaatcaccgcccgatcaacccgccgttccccatcccccgcccagtaccccgattaagcttgaggaagatctcgttcccgaacctactaccggcgacgacagcgacgcggccacgtttaaacccacacttccagatctctctccagacgagccaagcgaagctttgggcttcccaatgctcgagaaagaggaggaagctcatcggcccccgtctcccaccgaagctcccaccgaagcctctcccgagccagccccagacccagctcctgtggccgaagaagcggcaccatctgctgtggaggaaggggcagcagcagatcctggctctgacggctctccaggtaagtctcctagcaagaagaagaaaaagtttcggacacctagcttccttaaaaagagcaagaagaagtccgattcctag

SEQ ID NO: 43288 - DNA, 2214 bp, Artificial Sequence
  derived and/or modified sequence
atgaacggcgattcaagagccgcagtcgtgacttcccccccacctactacggcaccccacaaggagaggtactttgatcgagtggacgaaaataatcccgaatatcttagggagcgcaacatggctcctgacctccgccaagatttcaacatgatggaacagaagaagcgcgtgagcatgatcctccagtcacccgcattctgtgaagagttggaatcaatgatccaggaacagttcaaaaaaggaaaaaaccccacagggctgctggccctgcaacagatcgctgacttcatgacgactaatgtgccaaacgtctaccccgctgccccacaagggggtatggctgctttaaatatgagtctcgggatggtgacaccggtgaacgacttaagggggtccgactccatagcttacgacaaaggcgagaagttgctgaggtgtaaactggctgccttctataggctggccgacctctttggctggtctcagttgatttacaaccacatcactactcgggtcaattccgaacaggagcatttcttgatcgttcctttcggtcttctgtacagcgaagtgaccgctagctctctggttaaaatcaacttacaaggcgatatagtcgatcgtggttcgaccaaccttggagttaatcaagccggcttcaccctgcattccgccatttacgcagctagacctgatgtgaaatgtgtggttcatattcacactccagcaggcgcagcagtgtctgctatgaaatgtggactgcttcctatatcacctgaagcactgtctctgggggaggtggcctatcacgattatcacggtattcttgtcgacgaggaagaaaaagttctcatccagaaaaaccttggcccaaagtctaaggtgctgatcctgcggaatcacgggctcgtgtccgtcggagagtcagtcgaagaggctttttactacattcacaatctggtggtggcttgtgaaatccaggtgagaaccctcgctagcgctggcgggccagataatctggtgttgttgaacccagaaaagtacaaagcgaagagccgctcacccgggagtcccgtcggcgagggaacgggctctcctccaaagtggcagatcggggagcaggagtttgaggctctgatgaggatgctcgacaatctgggctaccgcaccggatacccatatcggtatcctgcgcttagggagaaatctaagaagtattctgatgtggaggtgcccgcttccgtgacaggatacagttttgccagcgacggcgactctggaacctgcagtcctttgcgacacagctttcaaaaacaacagagagagaaaacaaggtggttaaattccggtcgaggagatgaagccagcgaggagggacaaaacgggtcttcccccaagagcaaaacaaagtggactaaagaggatggacacaggacatccacctccgcagttccaaatctgtttgtacctttgaacaccaaccctaaggaggttcaggagatgagaaacaaaattcgcgaacagaatctgcaagacatcaaaaccgcagggccacagagtcaggttctctgcggcgtggtgatggataggtcccttgtccagggcgaattggttaccgccagtaaggcgatcattgagaaagagtatcagccacatgtgatcgtctctacaaccggccccaatcccttcacaacgcttacggacagagaactcgaagagtacaggcgcgaagtagaacgcaaacaaaagggtagcgaagagaacctggacgaagctagagaacagaaggagaagtctcccccagaccaacctgctgtgccacatccaccgccctcaacccccatcaaactggaggaggaccttgtgcctgagcccactaccggtgacgacagcgatgctgccacctttaagcccacacttcctgacctatcacctgacgaaccaagtgaagccttaggctttcctatgttggagaaggaggaagaagcacaccggccgccctcacccacggaagcccccacggaagcctcccccgagccagcaccagatcccgcaccggtggcagaagaggctgccccctctgccgtggaagagggagctgccgccgacccaggcagcgatggaagccccgggaaatcaccttcaaagaaaaagaaaaagtttagaaccccctcatttctgaaaaaatccaagaagaaaagtgactcttag

SEQ ID NO: 43289 - DNA, 3787 bp, Artificial Sequence
  derived and/or modified sequence
gaacctagaaagattgtacaatgaatggtgattctcgtgctgcggtggtgacctcaccacccccgaccacagcccctcacaaggagaggtacttcgaccgagtagatgagaacaacccagagtacttgagggagaggaacatggcaccagaccttcgccaggacttcaacatgatggagcaaaagaagagggtgtccatgattctgcaaagccctgctttctgtgaagaattggaatcaatgatacaggagcaatttaagaaggggaagaaccccacaggcctattggcattacagcagattgcagattttatgaccacgaatgtaccaaatgtctacccagcagctccgcaaggagggatggctgccttaaacatgagtcttggtatggtgactcctgtgaacgatcttagaggatctgattctattgcgtatgacaaaggagagaagttattacggtgtaaattggcagcgttttatagactagcagatctctttgggtggtctcagcttatctacaatcatatcacaaccagagtgaactccgagcaggaacacttcctcattgtcccttttgggcttctttacagtgaagtgactgcatccagtttggttaagatcaatctacaaggagatatagtagatcgtggaagcactaatctgggagtgaatcaggccggcttcaccttacactctgcaatttatgctgcacgcccggacgtgaagtgcgtcgtgcacattcacaccccagcaggggctgcggtctctgcaatgaaatgtggcctcttgccaatctccccggaggcgctttcccttggagaagtggcttatcatgactaccatggcattctggttgatgaagaggaaaaagttttgattcagaaaaatctggggcctaaaagcaaggttcttattctccggaaccatgggctcgtgtcagttggagagagcgttgaggaggccttctattacatccataaccttgtggttgcctgtgagatccaggttcgaactctggccagtgcaggaggaccagacaacttagtcctgctgaatcctgagaagtacaaagccaagtcccgttccccagggtctccggtaggggaaggcactggatcgcctcccaagtggcagattggtgagcaggaatttgaagccctcatgcggatgctcgataatctgggctacagaactggctacccttatcgataccctgctctgagagagaagtctaaaaaatacagcgatgtggaggttcctgctagtgtcacaggttactcctttgctagtgacggtgattcgggcacttgctccccactcagacacagttttcagaagcagcagcgggagaagacaagatggctgaactctggccggggcgacgaagcttccgaggaagggcagaatggaagcagtcccaagtcgaagactaagtggactaaagaggatggacatagaacttccacctctgctgtccctaacctgtttgttccattgaacactaacccaaaagaggtccaggagatgaggaacaagatccgagagcagaatttacaggacattaagacggctggccctcagtcccaggttttgtgtggtgtagtgatggacaggagcctcgtccagggagagctggtgacggcctccaaggccatcattgaaaaggagtaccagccccacgtcattgtgagcaccacgggccccaaccccttcaccacactcacagaccgtgagctggaggagtaccgcagggaggtggagaggaagcagaagggctctgaagagaatctggacgaggctagagaacagaaagaaaagagtcctccagaccagcctgcggtcccccacccgcctcccagcactcccatcaagctggaggaagaccttgtgccggagccgactactggagatgacagtgatgctgccacctttaagccaactctccccgatctgtcccctgatgaaccttcagaagcactcggcttcccaatgttagagaaggaggaggaagcccatagacccccaagccccactgaggcccctactgaggccagccccgagccagccccagacccagccccggtggctgaagaggctgccccctcagctgtcgaggagggggccgccgcggaccctggcagcgatgggtctccaggcaagtccccgtccaaaaagaagaagaagttccgtaccccgtcctttctgaagaagagcaagaagaagagtgactcctgaaagccctgcgctaacactgtcctgtccggagcgaccctggctctgccagcgtccccggccacgtctgtgctctgtccttgtgtaatggaatgcaaaaaagccaagccctccgcctagaggtcccctcacgtgaccagccccgtgtagccccgggctgacccagtgtgtgctcagcagccccaccccaccctgccccttgtcctctcagagcctcagcttctgggggagacatgctctccccacaggggggaggcactaagtcatggtcctggctggaaggtactgaaggcttctgcagctttggctgcacgtcaccctcctgagcctcacctttcctgccgtccctcctgttgtgaaatcaccacattctgtctctgcttggcttcccctccaccctaaagtctcaggtgacggactcagactcctggcttcatgtggcattctctctgctcagtgatctcacttaaatctatatacaaagccttggtcccgtgaaaacactcgtgtgcccaccagcggccttgaagaggcaggtctgggccagatgctgggcaggaaaccccagcggcagatgggcctgtgtgcacccaacgtgatgctatgcatgtctgaccgacgatccctcgaccagaatcagattcaggagctcagtttctttttcacttgggtctctggattcctgtcatagggaaggtatatcaggaggggaagaggcctttctagaattttctttgagcaggtttacaatttagcttacatttttcgactgtgaacgtgaataggctgctttttgctttcttctttccagaccccacagtagagcacttttcacttatttgggggaggcttcaggggactgttctcaccttaactcagccagaaagatgccctagttgtgatcaaaggtaactcgaggtggagggtagccctggggcccctcgacatcaccgtcattgatggagcctgaaccgtgtgctcctcggcagatgctgttgttgttacttccctccaagaggctggaaaagggctcagagctgctgagcaggaaccggagggtgacccatttcaggaggtgccggtaccagcctgactaggtacaggcaagcttgtgtgggcccaacaggcccttggtagagctggtgccagatgtgggctcagatcctgggcatgatgggccgagccacctcggatcccactgattggccagccgagcgagaaccaggctgctgcatggcactgaccgccgcttccagcttcctctgagccgcagggcctgctacgcgggcaagcgtgctgcctctcttctgtgtcgttttgttgccaaggcagaatgaaaagtccttaaccgtggactcttcctttatcccctcctttaccccacatatgcaatgacttttaattttcacttttgtagtttaatcctttgtattacaacatgaaatatagttgcatatatggacaccgacttgggaggacaggtcctgaatgtcctttctccagtgtaacatgttttactcacaaataaaattctttcagcaagttccttgtctaaa

SEQ ID NO: 43290 - DNA, 3939 bp, Artificial Sequence
  derived and/or modified sequence
gcacccaggtcgggcggtgggggcgagcggaggggctgaggggcggagaggcctggcgggccgctgctgcgggccaggggacgggggcggagccggagccggagccgacgggcggtggccgcactgggaccccggaatcccgcgcgctgcccacgattcgcttctgaggaacctagaaagattgtacaatgaatggtgattctcgtgctgcggtggtgacctcaccacccccgaccacagcccctcacaaggagaggtacttcgaccgagtagatgagaacaacccagagtacttgagggagaggaacatggcaccagaccttcgccaggacttcaacatgatggagcaaaagaagagggtgtccatgattctgcaaagccctgctttctgtgaagaattggaatcaatgatacaggagcaatttaagaaggggaagaaccccacaggcctattggcattacagcagattgcagattttatgaccacgaatgtaccaaatgtctacccagcagctccgcaaggagggatggctgccttaaacatgagtcttggtatggtgactcctgtgaacgatcttagaggatctgattctattgcgtatgacaaaggagagaagttattacggtgtaaattggcagcgttttatagactagcagatctctttgggtggtctcagcttatctacaatcatatcacaaccagagtgaactccgagcaggaacacttcctcattgtcccttttgggcttctttacagtgaagtgactgcatccagtttggttaagatcaatctacaaggagatatagtagatcgtggaagcactaatctgggagtgaatcaggccggcttcaccttacactctgcaatttatgctgcacgcccggacgtgaagtgcgtcgtgcacattcacaccccagcaggggctgcggtctctgcaatgaaatgtggcctcttgccaatctccccggaggcgctttcccttggagaagtggcttatcatgactaccatggcattctggttgatgaagaggaaaaagttttgattcagaaaaatctggggcctaaaagcaaggttcttattctccggaaccatgggctcgtgtcagttggagagagcgttgaggaggccttctattacatccataaccttgtggttgcctgtgagatccaggttcgaactctggccagtgcaggaggaccagacaacttagtcctgctgaatcctgagaagtacaaagccaagtcccgttccccagggtctccggtaggggaaggcactggatcgcctcccaagtggcagattggtgagcaggaatttgaagccctcatgcggatgctcgataatctgggctacagaactggctacccttatcgataccctgctctgagagagaagtctaaaaaatacagcgatgtggaggttcctgctagtgtcacaggttactcctttgctagtgacggtgattcgggcacttgctccccactcagacacagttttcagaagcagcagcgggagaagacaagatggctgaactctggccggggcgacgaagcttccgaggaagggcagaatggaagcagtcccaagtcgaagactaagtggactaaagaggatggacatagaacttccacctctgctgtccctaacctgtttgttccattgaacactaacccaaaagaggtccaggagatgaggaacaagatccgagagcagaatttacaggacattaagacggctggccctcagtcccaggttttgtgtggtgtagtgatggacaggagcctcgtccagggagagctggtgacggcctccaaggccatcattgaaaaggagtaccagccccacgtcattgtgagcaccacgggccccaaccccttcaccacactcacagaccgtgagctggaggagtaccgcagggaggtggagaggaagcagaagggctctgaagagaatctggacgaggctagagaacagaaagaaaagagtcctccagaccagcctgcggtcccccacccgcctcccagcactcccatcaagctggaggaagaccttgtgccggagccgactactggagatgacagtgatgctgccacctttaagccaactctccccgatctgtcccctgatgaaccttcagaagcactcggcttcccaatgttagagaaggaggaggaagcccatagacccccaagccccactgaggcccctactgaggccagccccgagccagccccagacccagccccggtggctgaagaggctgccccctcagctgtcgaggagggggccgccgcggaccctggcagcgatgggtctccaggcaagtccccgtccaaaaagaagaagaagttccgtaccccgtcctttctgaagaagagcaagaagaagagtgactcctgaaagccctgcgctaacactgtcctgtccggagcgaccctggctctgccagcgtccccggccacgtctgtgctctgtccttgtgtaatggaatgcaaaaaagccaagccctccgcctagaggtcccctcacgtgaccagccccgtgtagccccgggctgacccagtgtgtgctcagcagccccaccccaccctgccccttgtcctctcagagcctcagcttctgggggagacatgctctccccacaggggggaggcactaagtcatggtcctggctggaaggtactgaaggcttctgcagctttggctgcacgtcaccctcctgagcctcacctttcctgccgtccctcctgttgtgaaatcaccacattctgtctctgcttggcttcccctccaccctaaagtctcaggtgacggactcagactcctggcttcatgtggcattctctctgctcagtgatctcacttaaatctatatacaaagccttggtcccgtgaaaacactcgtgtgcccaccagcggccttgaagaggcaggtctgggccagatgctgggcaggaaaccccagcggcagatgggcctgtgtgcacccaacgtgatgctatgcatgtctgaccgacgatccctcgaccagaatcagattcaggagctcagtttctttttcacttgggtctctggattcctgtcatagggaaggtatatcaggaggggaagaggcctttctagaattttctttgagcaggtttacaatttagcttacatttttcgactgtgaacgtgaataggctgctttttgctttcttctttccagaccccacagtagagcacttttcacttatttgggggaggcttcaggggactgttctcaccttaactcagccagaaagatgccctagttgtgatcaaaggtaactcgaggtggagggtagccctggggcccctcgacatcaccgtcattgatggagcctgaaccgtgtgctcctcggcagatgctgttgttgttacttccctccaagaggctggaaaagggctcagagctgctgagcaggaaccggagggtgacccatttcaggaggtgccggtaccagcctgactaggtacaggcaagcttgtgtgggcccaacaggcccttggtagagctggtgccagatgtgggctcagatcctgggcatgatgggccgagccacctcggatcccactgattggccagccgagcgagaaccaggctgctgcatggcactgaccgccgcttccagcttcctctgagccgcagggcctgctacgcgggcaagcgtgctgcctctcttctgtgtcgttttgttgccaaggcagaatgaaaagtccttaaccgtggactcttcctttatcccctcctttaccccacatatgcaatgacttttaattttcacttttgtagtttaatcctttgtattacaacatgaaatatagttgcatatatggacaccgacttgggaggacaggtcctgaatgtcctttctccagtgtaacatgttttactcacaaataaaattctttcagc

SEQ ID NO: 43291 - DNA, 2214 bp, Artificial Sequence
  derived and/or modified sequence
atgaatggagacagcagagctgctgtggtgaccagccccccacccaccacagccccccacaaggagcgctactttgacagagtggatgagaacaaccctgagtacctgcgggagaggaacatggccccagacctgcggcaggacttcaacatgatggagcagaagaagagggtgtccatgatcctgcagagccctgccttctgtgaggagctggagagcatgatccaggagcagttcaagaagggcaagaaccccaccggcctgctggccctgcagcagattgctgacttcatgaccaccaacgtgcccaacgtgtacccagctgccccccagggcggcatggccgccctgaacatgagcctgggcatggtgacccctgtgaatgacctgcggggcagtgacagcatcgcctatgacaagggggagaagctgctgcgctgcaagctggccgccttctaccgcctggccgacctgtttggctggagccagctgatctacaaccacatcaccaccagggtgaacagcgagcaggagcacttcctgattgtgcccttcggcctgctgtacagcgaggtgacagccagcagcctggtgaagatcaacctgcagggcgacatcgtggaccggggcagcaccaacctgggcgtgaaccaggccggcttcaccctgcacagcgccatctatgctgcccggccagatgtgaagtgtgtggtgcacatccacaccccagctggagctgctgtgtctgccatgaagtgtggcctgctgcccatcagccctgaggccctgagcctgggggaggtggcctaccatgactaccacggcatcctggtggatgaggaggagaaggtgctgatccagaagaacctgggccccaagagcaaggtgctgatcctgaggaaccacggcctggtgtctgtgggggagagcgtggaggaggccttctactacatccacaacctggtggtggcctgtgagatccaggtgaggaccctggccagcgctgggggccctgacaacctggtgctgctgaaccctgagaagtacaaggccaagagccgcagccctggcagccctgtgggggagggcaccggcagcccccccaagtggcagatcggggagcaggagtttgaggccctgatgaggatgctggacaacctgggctacagaacaggctacccctaccgctacccagccctgcgggagaagagcaagaagtacagtgatgtggaggtgcctgcctctgtgacaggctacagctttgccagtgatggagacagcggcacctgcagccccctgcggcacagcttccagaagcagcagcgggagaagacccgctggctgaacagcggcagaggagatgaggccagcgaggagggccagaatggcagcagccccaagagcaagaccaagtggaccaaggaggatggccacaggaccagcaccagcgctgtgcccaacctgtttgtgcccctgaacaccaaccccaaggaggtgcaggagatgaggaacaagatccgggagcagaacctgcaggacatcaagacagctggcccccagagccaggtgctgtgtggggtggtgatggacaggagcctggtgcagggcgagctggtgacagccagcaaggccatcatcgagaaggagtaccagccccacgtgattgtgtccaccaccggccccaaccccttcaccaccctgacagaccgggagctggaggagtaccgccgggaggtggagaggaagcagaagggcagcgaggagaacctggatgaggcccgggagcagaaggagaagagccccccagaccagcctgctgtgccccaccccccacccagcacccccatcaagctggaggaggacctggtgcctgagcccaccactggagatgacagtgatgctgccaccttcaagcccaccctgcctgacctgagcccagatgagcccagcgaggccctgggcttccccatgctggagaaggaggaggaggcccacaggcctcccagccccacagaggcccccacagaggccagccctgagcccgccccagaccctgcccctgtggccgaggaggccgcccccagcgctgtggaggagggcgctgctgctgaccccggcagtgatggcagccctgggaagagccccagcaagaagaagaagaagttccgcacccccagcttcctgaagaagagcaagaagaagagtgacagctag

SEQ ID NO: 43292 - DNA, 2214 bp, Artificial Sequence
  derived and/or modified sequence
atgaacggcgacagccgggccgccgtggtgaccagccccccccccactaccgctccgcataaggaacgctatttcgatcgggtggatgaaaacaatccagagtacttgagagagcggaacatggctccagacctgcgccaggatttcaatatgatggagcagaaaaagagggtgagcatgatactccagtcccccgccttctgtgaggagttagagagtatgatccaagagcagttcaaaaaggggaagaatcctaccggcctgctggcactgcagcagatcgccgattttatgactactaacgttcccaacgtctatccagctgcaccgcagggaggcatggctgccctgaacatgtcgttgggcatggtcacacctgtgaatgacctgaggggatcagattccattgcctatgacaaaggggagaagctactgcgctgcaaattagctgctttttaccggctcgccgacctgtttggttggtctcaactgatctacaaccatatcaccacccgggtgaacagcgagcaggagcacttcctaatcgtgccgtttggcctactctatagtgaggtgaccgcttcaagcctggtcaagattaacctgcagggcgacatcgtggaccgcggcagcacaaatttgggtgtgaatcaggcagggttcaccttgcactctgcaatttacgctgctaggcctgatgtgaagtgtgtcgtccatatacatacgcctgccggcgctgctgtgagcgcgatgaaatgcggactgctccctatcagtccagaggcgctgtccctgggagaagtagcctaccacgattatcatggcattttagtagacgaggaggaaaaagtgctgattcagaaaaaccttgggccaaaatccaaggtgctgatcctgcggaatcacggcttggtgtcagttggcgaaagtgtggaggaagcattctactacatccacaatctggtagtagcctgtgagatacaggtgcgaaccctggcctcggcggggggccctgataacctcgtgctgctgaaccccgaaaaatacaaagcaaaatcccgctctccgggatctcctgtgggcgagggcacaggaagtcctcctaagtggcagattggagaacaagagttcgaggcactcatgcggatgctggacaatctgggttaccggactggttacccgtatcgttaccctgccctacgcgaaaagagcaaaaaatattcagacgtggaggttcctgcatctgtgacgggatattccttcgcctccgatggcgactccgggacctgctcccctctccgtcacagtttccagaaacaacagcgagagaagactaggtggctaaactcagggagaggggatgaggcctctgaggagggacagaacggaagtagccccaaatccaaaaccaaatggacgaaggaggacggccaccgcacaagcacttccgccgtgcctaatctgttcgtgccacttaatactaatccgaaggaagtacaggaaatgcggaataagattcgcgagcagaatctgcaggatatcaagaccgccggtccgcagagtcaggtgttatgtggggtggtgatggatcgttcccttgtgcagggcgaacttgtaaccgctagcaaagctattattgagaaggaataccaaccacacgtcatagtttcaactaccggccccaaccccttcactactctgacagatcgggaattggaagagtataggagagaagtggagcggaagcaaaaggggagcgaggaaaacctggatgaagcacgcgagcagaaagaaaaatcccctcccgaccagcccgcagtaccccaccccccaccctcaacgcctatcaagctcgaagaggatttggtccctgaacctaccacgggagatgacagcgatgcagccacgttcaagcctaccctgcccgacttaagtcccgacgagccatccgaagcgctgggatttcctatgcttgagaaggaggaggaggctcacagacctcctagcccaacagaggcaccaactgaagcctcccccgagcccgccccagatcctgctccagtggctgaggaagccgccccctctgcagttgaggagggggctgccgcagaccctggatcagatgggagccccggaaagtctccatcaaagaaaaagaaaaaattcagaaccccctcttttctgaagaagagcaaaaaaaaatcagattcctag

SEQ ID NO: 43293 - DNA, 2214 bp, Artificial Sequence
  derived and/or modified sequence
atgaacggcgacagccgggccgccgtggtgaccagccccccccccactactgctccccataaggagcgctactttgaccgagtggatgagaacaaccctgaatatctgcgcgaacgcaatatggccccagatctaaggcaggattttaatatgatggagcaaaagaagcgggtgagcatgatcctgcagagtcccgcattctgcgaagagttggagtcgatgattcaggaacagttcaaaaagggcaagaaccctaccggtttgctggcactccagcaaatcgccgattttatgacaacgaatgtgcctaacgtctatccggccgcgccacaggggggtatggctgctcttaacatgtccctggggatggttaccccggtcaatgatctccgtggatccgactctatagcctacgacaagggagagaaactattacgctgcaagctagccgccttttaccggcttgccgacttgttcgggtggagtcagctgatttacaaccacattaccacccgagtcaacagtgagcaggaacactttttgatcgtccctttcggcctcctgtactctgaggttacggcaagctccctggtgaagatcaacctgcaaggagatatagtggaccgaggcagcacgaatctaggtgtgaaccaagcagggttcacgctccactctgccatctatgctgcaaggccggatgtgaaatgtgtggtgcacatccatactcctgcaggggccgctgtgtctgctatgaagtgcggtctgctgcctatctcccctgaagcgctgtctctgggggaagtcgcctaccatgattaccacggcatcctggtagatgaggaggagaaagtcctcattcagaaaaatctgggccctaagtccaaggtcctgattctcaggaaccatggccttgtatccgtgggggaatctgtggaagaggctttttactacattcacaacctggtcgtcgcctgcgaaatccaggtcaggaccctcgcttccgcaggcggtccagataatttggtcctgctgaatcctgagaagtataaggctaaaagcaggagcccaggcagcccagtcggcgaaggtactggctctcccccgaaatggcagatcggagaacaggagttcgaagccctgatgagaatgttagataacttgggctaccgtactggatacccttaccgttatcccgccctgcgtgaaaaaagtaagaagtattctgatgtggaggttcctgcttctgttaccggttactcttttgcttcggatggggactcgggtacttgctctccgctccggcactccttccagaagcagcagagagaaaagaccaggtggctgaactccggtagaggggatgaggcctctgaggagggacagaatggaagctcacctaagagcaaaacaaagtggacgaaggaagacgggcaccgcacttccacaagcgcagtgccaaatttgttcgtccctctcaacacaaatcccaaagaggtgcaggagatgagaaacaagattagggagcagaacctgcaggacattaaaacagcaggcccccaatcccaggtgctgtgtggggtcgtgatggatcgtagcctcgttcagggcgaactggtgacagcctctaaagccattatcgaaaaggagtaccagcctcacgtgattgtcagcacaaccggccctaatcccttcaccacgctgacagatagggaactggaagagtacagacgggaagtggagagaaaacagaagggttccgaagaaaatctggacgaagcacgagaacagaaggagaaaagccctcccgatcaacctgccgtgccccacccccccccctctactcctatcaagctagaggaggacctggtccccgagccgacaacaggggacgatagcgatgccgccacctttaagcctactcttcccgaccttagtccagacgagccatccgaagccttgggtttcccgatgttggaaaaggaggaggaggcccatcgcccccctagtcccactgaagctcctaccgaagcctcccccgagccagcaccagatccagcacctgtggcggaggaggccgcccccagcgcagtcgaagagggcgccgcagccgatcctgggtcagacgggtctccagggaaaagcccatcaaagaaaaagaagaagttcaggacacctagtttcctgaaaaaatcaaaaaaaaaatcagactcttag

SEQ ID NO: 43294 - DNA, 2214 bp, Artificial Sequence
  derived and/or modified sequence
atgaatggggactctagggctgccgttgtcacgagccccccacccaccacagccccacataaagagagatacttcgaccgggtcgacgaaaacaatcctgagtaccttcgggagagaaatatggccccagacttgaggcaggactttaatatgatggaacagaaaaaaagggtgagcatgatattacagagccctgcgttctgcgaagagctcgagtcaatgatccaggagcaattcaagaagggcaagaaccccaccggtttgctggctctgcagcagattgcagacttcatgactacaaatgttcccaatgtttaccctgccgctcctcagggcggtatggccgcacttaatatgtcattgggaatggtgactccagtcaacgaccttagggggtcagacagcatcgcctatgataaaggagagaagctgctgcgctgcaagctggcagccttctaccgccttgccgatctgttcgggtggtctcagctgatctacaaccatatcacaacgcgggtgaacagtgagcaggagcacttcctgattgttcctttcggactgctgtatagcgaggtgacagccagtagcctcgtcaagatcaacctacagggtgatattgtggaccgcggatccaccaacctgggagtgaaccaggcaggattcacgttgcactctgccatctatgctgcgagaccagatgtaaagtgtgttgttcatatccacacacctgccggagctgccgtgagcgccatgaagtgcggtttgctcccgatttcacctgaagccctgtctctgggagaggtggcgtaccacgattatcacggcatcttagttgatgaagaagagaaggtcctgatccagaaaaatctgggtccgaagtccaaggtgctcattctacggaatcatggcctcgtcagtgtgggcgagtccgtggaggaagccttttattacatacataacctggtggtggcatgcgagattcaggtgcggacgctggcttccgccggtggaccagacaacctggttctccttaaccctgagaaatacaaggccaaaagccgttccccaggctcccccgtcggagaaggaacaggcagcccgcctaagtggcaaatcggagagcaggaatttgaagctctcatgcgtatgctggataatctgggttacagaactggctatccgtaccgatatccagctctgagggaaaagtccaagaaatatagcgatgtcgaggtgcctgcttccgtaaccggatatagcttcgcgagcgatggggatagcggcacttgcagcccactcaggcattctttccaaaaacagcagcgcgaaaagacacggtggctaaactcaggtcgcggagacgaggcgtccgaggaaggccagaatgggtccagccccaagtccaagacaaagtggacaaaggaggatggacaccgcacaagcacatccgccgtccccaacctcttcgtcccactgaataccaacccgaaagaggtgcaggaaatgaggaataaaattcgggaacaaaacctccaagacattaagactgcgggaccccaaagccaggtgctttgtggagtggttatggaccgttccctggtgcagggtgaactggtaaccgctagcaaggcgattatcgaaaaggagtatcaaccacacgtgattgttagcacgacaggaccaaatccttttacgaccctgaccgacagggagctggaggaataccgtcgcgaggtggagcggaagcagaaaggctccgaagaaaatttagatgaggccagagagcagaaggaaaaatccccccctgaccagcctgccgtaccccacccaccgccaagcacccccatcaagctcgaagaggacctcgttccggagcccacaacaggcgatgactccgacgccgctacctttaaaccaaccttgcctgatttgagtccagatgaaccaagtgaagctttagggtttcctatgctggagaaggaagaagaggcgcaccgtcccccatctcccactgaagctcccactgaggctagcccagagcccgcaccagacccagcaccggtcgctgaagaggcggctcccagcgccgtggaggagggcgcagccgctgacccaggcagcgacgggtcccctggaaaaagcccgagtaaaaaaaagaaaaaatttaggaccccttcattcctgaaaaagagcaagaagaagtcagactcgtag

SEQ ID NO: 43295 - DNA, 2214 bp, Artificial Sequence
  derived and/or modified sequence
atgaacggggattctcgcgcagccgtggtcacttcccccccaccaaccacggcccctcacaaggagaggtacttcgacagggtagacgaaaataatccagagtacttacgggagcggaatatggcccctgaccttcgacaagactttaacatgatggaacagaagaagcgcgtgagcatgatcctccaatcacctgcgttctgtgaagagctggaatccatgattcaggagcagttcaagaaaggaaaaaacccgacaggtctgctagcccttcagcagattgcagacttcatgactacgaacgtacccaatgtctatccggctgcgccacaaggcggaatggccgcactcaacatgtctctgggaatggttacacccgtgaacgaccttcgcggttccgatagcatagcctatgacaaaggcgaaaagctgctgagatgcaagctggcagctttttacagactcgctgatctcttcgggtggagccagctgatatataaccacatcaccacccgggtgaatagcgaacaggagcactttctgatcgtgcctttcggcttactgtacagcgaggtgaccgcatcctctctggtgaagatcaatctgcaaggagacattgttgacagagggtctaccaacctcggcgtgaaccaggctggattcactttacattcagccatatacgccgctagacctgacgtcaaatgcgtcgtccatatccacacaccagcaggagcggcagtatctgccatgaagtgtggattactgcctatctccccagaggctctcagccttggagaagttgcttatcacgactatcacggcatcctggtcgatgaggaggaaaaagtgctcatccagaagaacttagggccaaaatctaaagtcttgattctcaggaaccatggactggtatcggtgggcgaatctgtcgaagaggcattctattacattcacaacttggttgtggcctgcgagattcaggtcagaacactcgcctctgccggaggaccggacaacctggtactgctgaatcccgagaagtataaagctaagagcaggtcaccgggaagcccggtgggcgagggaactgggtcccccccaaagtggcaaattggcgagcaggaatttgaagccctgatgcggatgctggacaaccttggataccggaccgggtacccataccgttacccggctttaagagaaaaatccaagaagtattcagatgttgaggtacctgcctccgtgaccggctattcgttcgccagcgatggcgacagtggaacctgctctcccctgagacactcctttcagaagcagcaaagagaaaaaactagatggctcaatagcggcaggggggacgaggccagtgaagaaggacagaatggttcaagtcccaaatctaaaaccaagtggaccaaagaagacgggcacagaactagtacctccgctgtacccaatctctttgtacccctgaacacaaatccgaaagaggttcaagagatgagaaacaagatccgcgagcagaatttgcaggacattaaaaccgcgggacctcagagccaagtgctgtgtggcgttgtcatggaccggtctctcgtccaaggtgagctggtgaccgcttccaaggcaataatcgagaaagaataccaaccacatgtcattgtctccaccacaggtccaaatccttttacaacactaactgaccgagagctggaggaatatcgccgagaggtggagaggaaacagaagggctcagaagaaaacctcgacgaggctagagagcaaaaggagaagtctcccccagaccagccagccgtcccgcacccccctccttcgactcccataaaactggaggaagatcttgtgccagagccaactaccggcgacgacagcgacgccgctacctttaaaccaacactgcctgatctttcccctgacgagccctcggaagcgttgggatttccgatgctcgaaaaagaggaagaggcccacaggcctcccagcccaacagaagctcccacagaagcctcgcctgaaccagccccagatcctgcacccgttgcagaagaggcagcaccttctgccgtggaggagggagccgcagccgaccctggaagcgatgggtcacccggaaaatcaccttcaaagaaaaagaagaagtttagaactccatctttcctgaagaaatcaaagaaaaagagtgactcatag

SEQ ID NO: 43296 - DNA, 2214 bp, Artificial Sequence
  derived and/or modified sequence
atgaacggcgacagcagagccgccgtggtgaccagccccccccccaccaccgccccccacaaggagagatacttcgacagagtggacgagaacaaccccgagtacctgagagagagaaacatggcccccgacctgagacaggacttcaacatgatggagcagaagaagagagtgagcatgatcctgcagagccccgccttctgcgaggagctggagagcatgatccaggagcagttcaagaagggcaagaaccccaccggcctgctggccctgcagcagatcgccgacttcatgaccaccaacgtgcccaacgtgtaccccgccgccccccagggcggcatggccgccctgaacatgagcctgggcatggtgacccccgtgaacgacctgagaggcagcgacagcatcgcctacgacaagggcgagaagctgctgagatgcaagctggccgccttctacagactggccgacctgttcggctggagccagctgatctacaaccacatcaccaccagagtgaacagcgagcaggagcacttcctgatcgtgcccttcggcctgctgtacagcgaggtgaccgccagcagcctggtgaagatcaacctgcagggcgacatcgtggacagaggcagcaccaacctgggcgtgaaccaggccggcttcaccctgcacagcgccatctacgccgccagacccgacgtgaagtgcgtggtgcacatccacacccccgccggcgccgccgtgagcgccatgaagtgcggcctgctgcccatcagccccgaggccctgagcctgggcgaggtggcctaccacgactaccacggcatcctggtggacgaggaggagaaggtgctgatccagaagaacctgggccccaagagcaaggtgctgatcctgagaaaccacggcctggtgagcgtgggcgagagcgtggaggaggccttctactacatccacaacctggtggtggcctgcgagatccaggtgagaaccctggccagcgccggcggccccgacaacctggtgctgctgaaccccgagaagtacaaggccaagagcagaagccccggcagccccgtgggcgagggcaccggcagcccccccaagtggcagatcggcgagcaggagttcgaggccctgatgagaatgctggacaacctgggctacagaaccggctacccctacagataccccgccctgagagagaagagcaagaagtacagcgacgtggaggtgcccgccagcgtgaccggctacagcttcgccagcgacggcgacagcggcacctgcagccccctgagacacagcttccagaagcagcagagagagaagaccagatggctgaacagcggcagaggcgacgaggccagcgaggagggccagaacggcagcagccccaagagcaagaccaagtggaccaaggaggacggccacagaaccagcaccagcgccgtgcccaacctgttcgtgcccctgaacaccaaccccaaggaggtgcaggagatgagaaacaagatcagagagcagaacctgcaggacatcaagaccgccggcccccagagccaggtgctgtgcggcgtggtgatggacagaagcctggtgcagggcgagctggtgaccgccagcaaggccatcatcgagaaggagtaccagccccacgtgatcgtgagcaccaccggccccaaccccttcaccaccctgaccgacagagagctggaggagtacagaagagaggtggagagaaagcagaagggcagcgaggagaacctggacgaggccagagagcagaaggagaagagcccccccgaccagcccgccgtgccccaccccccccccagcacccccatcaagctggaggaggacctggtgcccgagcccaccaccggcgacgacagcgacgccgccaccttcaagcccaccctgcccgacctgagccccgacgagcccagcgaggccctgggcttccccatgctggagaaggaggaggaggcccacagaccccccagccccaccgaggcccccaccgaggccagccccgagcccgcccccgaccccgcccccgtggccgaggaggccgcccccagcgccgtggaggagggcgccgccgccgaccccggcagcgacggcagccccggcaagagccccagcaagaagaagaagaagttcagaacccccagcttcctgaagaagagcaagaagaagagcgacagctag

SEQ ID NO: 43297 - protein, 452 aa, Artificial Sequence [sequence omitted]

SEQ ID NO: 43298 - protein, 363 aa, Artificial Sequence
  derived and/or modified sequence
MDYRVNIFLRQQWNDSRLAYSEYPDDSLDLDPSMLDSIWKPDLFFANEKGANFHDVTTDNKLLRISKNGKVLYSIRLTLTLSCPMDLKNFPMDVQTCTMQLESFGYTMNDLIFEWLSDGPVQVAEGLTLPQFILKEEKELGYCTKHYNTGKFTCIEVKFHLERQMGYYLIQMYIPSLLIVILSWVSFWINMDAAPARVALGITTVLTMTTQSSGSRASLPKVSYVKAIDIWMAVCLLFVFAALLEYAAVNFVSRQHKEFLRLRRRQKRQNKEEDVTRESRFNFSGYGMGHCLQVKDGTAVKATPANPLPQPPKDGDAIKKKFVDRAKRIDTISRAAFPLAFLIFNIFYWITYKIIRHEDVHKK

SEQ ID NO: 43299 - DNA, 1359 bp, Artificial Sequence
  derived and/or modified sequence
atgaacagacagctggtgaacatcctgaccgccctgttcgccttcttcctggagaccaaccacttcagaaccgccttctgcaaggaccacgacagcagaagcggcaagcagcccagccagaccctgagccccagcgacttcctggacaagctgatgggcagaaccagcggctacgacgccagaatcagacccaacttcaagggcccccccgtgaacgtgacctgcaacatcttcatcaacagcttcggcagcgtgaccgagaccaccatggactacagagtgaacatcttcctgagacagcagtggaacgacagcagactggcctacagcgagtaccccgacgacagcctggacctggaccccagcatgctggacagcatctggaagcccgacctgttcttcgccaacgagaagggcgccaacttccacgacgtgaccaccgacaacaagctgctgagaatcagcaagaacggcaaggtgctgtacagcatcagactgaccctgaccctgagctgccccatggacctgaagaacttccccatggacgtgcagacctgcaccatgcagctggagagcttcggctacaccatgaacgacctgatcttcgagtggctgagcgacggccccgtgcaggtggccgagggcctgaccctgccccagttcatcctgaaggaggagaaggagctgggctactgcaccaagcactacaacaccggcaagttcacctgcatcgaggtgaagttccacctggagagacagatgggctactacctgatccagatgtacatccccagcctgctgatcgtgatcctgagctgggtgagcttctggatcaacatggacgccgcccccgccagagtggccctgggcatcaccaccgtgctgaccatgaccacccagagcagcggcagcagagccagcctgcccaaggtgagctacgtgaaggccatcgacatctggatggccgtgtgcctgctgttcgtgttcgccgccctgctggagtacgccgccgtgaacttcgtgagcagacagcacaaggagttcctgagactgagaagaagacagaagagacagaacaaggaggaggacgtgaccagagagagcagattcaacttcagcggctacggcatgggccactgcctgcaggtgaaggacggcaccgccgtgaaggccacccccgccaaccccctgccccagccccccaaggacggcgacgccatcaagaagaagttcgtggacagagccaagagaatcgacaccatcagcagagccgccttccccctggccttcctgatcttcaacatcttctactggatcacctacaagatcatcagacacgaggacgtgcacaagaagtag

SEQ ID NO: 43300 - DNA, 3216 bp, Artificial Sequence
  derived and/or modified sequence
acgtctccgtctcattctatagccctcattccagcacaggatctcagcaatttttccctcttccccccacccactccagcgcgcagagtcctttcttctctctcatttacaacttctttttaaaagaaaacattttctagaaaaagggctttgctaaacagaaaagatataaaacaaaagccacagctatctagcatggcattgtcaccaactccctttgcatggtgatgcgattaaggtagcagcatttttattattcaggaaaagcagctgggggattcatcagttctgaggctttgtctttctgggttaactgatggtcccaagcctcggtttgacctgaccatgatgcccaggactggcactttttcttttttctcagcaaactgtacaaaaccaaatctctttttgattttcaaggaaactaggttcctgccaaattttgaatctggacaataaacagacactttgtcctagcatctttctggaatcatttcgggatattttccacaagcaacacagaaacaggaatgaaccggcagctagtgaacattttgacagccttgtttgcatttttcttagagacaaaccacttcaggacggctttctgcaaagaccatgactccaggtctggaaaacaaccttcacagaccctatctccttcagatttcttggacaagttaatgggaaggacatcaggatatgatgcaagaatcaggccaaattttaaaggtcctccagtaaacgttacttgcaatatttttatcaacagttttggatcagtcacagaaacgaccatggactaccgagtgaatatttttctgagacaacagtggaatgattcacggctggcgtacagtgagtacccagatgactccctggacttggacccatccatgctagactccatttggaaaccagatttgttctttgccaatgagaagggtgccaacttccacgatgtcaccactgacaacaaattgctacggatttcgaaaaatggcaaagtgctctacagtatcagactcaccttgaccttatcctgtcccatggacttgaagaactttccgatggatgtccagacctgtacaatgcagctggagagttttgggtacacgatgaatgacctgatatttgagtggttaagtgatggtccagtgcaagttgctgaaggattgaccctgccccagtttattttgaaagaagagaaggaacttggctactgtacaaagcactacaacactggaaagtttacctgcattgaggtcaagtttcatctggaacgccaaatgggatattatttgatccagatgtacatcccaagcctgcttatagtaattttgtcctgggtttccttttggataaatatggatgcagcccctgccagggtcgcactgggcatcaccacagtcttaacgatgaccacccagagttcaggctccagggcatctctgccaaaggtctcctatgtaaaagcgattgacatctggatggcggtgtgccttctgtttgtgtttgctgccttactggaatacgcagcggtgaacttcgtctccaggcaacacaaggagttcctgcgcctccgaagaagacagaagaggcagaataaggaagaagacgttactcgtgaaagtcgttttaattttagcggttatgggatgggtcactgcctccaagtgaaagatggaacagctgtcaaggccacacctgccaacccactcccacaaccgccaaaagatggagatgctatcaagaagaagtttgtggaccgggcaaaaaggattgacacgatatctcgagctgccttcccattggccttcctcattttcaacatcttttactggatcacatacaagatcattcggcatgaagatgtccacaagaaatagatgtgccctacagaccctgggaccttcttgcctcagtgttgtgcttgtaaatacacagtgaaattgtctttatatcactttgacagaggagaagattgagggaggggggagggagggtcatgggggtgggtttcctggcacctacatgaaaaaaaagacaagttatatgggtgatgaagaaaactgcacaaaattaaggggttgcagaatcacgggagcataataattcccttccataatctttagcattgttctttcagtcagacatgatatgcgcaacattcagacatgatatgcgcatcattcagacatgatatgcggggtcaagttcttaagggctgtttgccttttggtccttttggtttggtttggctttgactaattctggtactgaaaagttagctatacacacacacacacacacacacacacacacacacacacacacacacacacacacacacaaacttcaaaaatgcttaaccatctgaccatagtgactagcctatagtgagtcgaggaccaaactttttcaggaaaatgctgcctcgtttttaaaacaagcctcctaagctatgttctttacaatgtctgtaattagtgtttcacttgagaaagccttttgtgggtcgtaaattatttctacttatccagtaaataacaatgacaaaataaacaccaatgacagaaaaatttctactttactgtccatataggtgtgcattttaatatttttctttccaagataaaattttgaaacttaaattgtgtattgtgtaattaatttgatagtgtaccctcttaataaatgcccactttattttatatccaagttagtgcattatatatatatttttgctttggctatatttacacgtgactttaatcgcccaactgtgactagtcattgcagctactcagctacagtatttatggagatggtgtgtcctgaacagtgtagctcaggtcagcttgaactttccatttctgctctcattgtaggtgtaactactagtcctaatgtcaactgacccatgatttctactgtcagtcaatataagtgaacattgttttaaatatccttaactaacttaaagaattttaaaattgtactgtgattttcataacccgttgcctttttggtaccagagctacgtggtttgaattctggctacatgttttaagtaagaaaaaaaaagacgtatttttgcttactcagataaaagacaacctgtaaaaatataataattaaattttacatgtgctgtacaaggggttattttaaaaagcatttgttcaatttcaataaagctaagtgtgccgcaaa

SEQ ID NO: 43301 - DNA, 1359 bp, Artificial Sequence
  derived and/or modified sequence
atgaacagacagctggtgaacattctgaccgctttgtttgctttcttcctcgaaactaatcattttcgtaccgcgttttgtaaagatcatgatagcagatcgggcaaacagcccagccagaccctgagcccatccgactttttagacaaactgatgggaaggaccagtggttacgacgccaggatacgtccaaatttcaaaggcccgccagtgaatgtgacgtgtaacatattcatcaacagctttgggagtgtaacagaaaccactatggactaccgcgttaatattttcctgcgtcaacagtggaacgatagtcggcttgcctattccgagtacccagacgacagcctggacctggacccgagtatgctcgatagcatctggaagcctgacctgtttttcgcgaacgaaaaaggcgccaattttcacgatgtcactaccgataacaagctactgcgcatctcaaaaaacggtaaggtgttatactccataagactgacccttaccttatcttgcccaatggacctgaagaacttccctatggacgtccagacctgtacgatgcagttggaatccttcggctataccatgaatgacttaatatttgaatggttaagcgatggccctgtccaggtggccgaaggtctgacgctgcctcaatttatcttgaaggaggagaaagagctgggctattgcacaaaacactacaataccggaaagttcacatgtattgaagtcaagtttcacttggagcgccagatgggctactacttaattcagatgtatattccttcgctccttattgttatactgtcctgggtttccttctggataaacatggatgctgctcctgcaagagtggctttgggtataacaacagtgctaaccatgacaacccagtcatcagggtctcgggcgtctttgccaaaagtctcctacgttaaagcaatagacatttggatggcggtatgcctgttatttgtcttcgctgccctcctggaatacgccgctgttaacttcgtttcaagacagcataaagagttccttaggctgagaaggcggcaaaaacgacagaacaaggaagaagatgtcacccgcgagtctagatttaacttctccgggtacggcatgggccactgcttgcaggtgaaggatggtaccgctgtgaaggccaccccagcaaatcccctcccacaaccgcccaaggacggagatgcgatcaaaaagaagttcgttgatagggctaagaggatcgatacgatatctagggctgcgttccctttggctttcttaatctttaatatcttttactggataacctataaaattatccgccacgaagatgtgcacaaaaagtag

SEQ ID NO: 43302 - DNA, 1359 bp, Artificial Sequence
  derived and/or modified sequence
atgaaccggcagctggtgaacatcctgacagccctgtttgccttcttcctggagaccaaccacttcagaacagccttctgcaaggaccatgacagccgcagcggcaagcagcccagccagaccctgagccccagcgacttcctggacaagctgatgggccgcaccagcggctatgatgcccgcatccggcccaacttcaagggcccccctgtgaatgtgacctgcaacatcttcatcaacagctttggatctgtgacagagaccaccatggactacagagtgaacatcttcctgcggcagcagtggaatgacagccggctggcctacagcgagtacccagatgacagcctggacctggaccccagcatgctggacagcatctggaagccagacctcttctttgccaatgagaagggggccaacttccatgatgtgaccacagacaacaagctgctgcgcatcagcaagaatggcaaggtgctgtacagcatccggctgaccctgaccctgagctgccccatggacctgaagaacttccccatggatgtgcagacctgcaccatgcagctggagagctttggctacaccatgaatgacctgatctttgagtggctgagtgatggccctgtgcaggtggccgagggcctgaccctgccccagttcatcctgaaggaggagaaggagctgggctactgcaccaagcactacaacacaggcaagttcacctgcatcgaggtgaagttccacctggagcggcagatgggctactacctgatccagatgtacatccccagcctgctgattgtcatcctgtcctgggtgtccttctggatcaacatggatgctgccccagcccgggtggccctgggcatcaccaccgtgctgaccatgaccacccagagcagcggcagccgggccagcctgcccaaggtgtcctatgtgaaggccatcgacatctggatggctgtgtgcctgctgtttgtgtttgctgccctgctggagtatgctgctgtgaactttgtgtcccggcagcacaaggagttcctgcggctgcggcggcggcagaagaggcagaacaaggaggaggatgtgacccgggagagccgcttcaacttcagcggctacggcatgggccactgcctgcaggtgaaggatggaacagctgtgaaggccaccccagccaaccccctgccccagccccccaaggatggagatgccatcaagaagaagtttgtggaccgggccaagagaattgacaccatcagccgggccgccttccccctggccttcctgatcttcaacatcttctactggatcacctacaagatcatcagacatgaagatgtgcacaagaagtag

SEQ ID NO: 43303 - DNA, 1359 bp, Artificial Sequence
  derived and/or modified sequence
atgaaccggcagctggtgaacatcctgaccgccctgttcgccttcttcctggagacaaaccatttcagaaccgcattctgcaaggaccacgactcaaggagcgggaagcagccctctcagaccctatccccgtcagatttcttagacaagctgatgggtaggacttccgggtacgacgcccggatcaggccaaactttaagggcccacctgttaacgtcacttgcaatattttcattaattcgtttgggagcgttactgagaccaccatggactatcgagtgaatatctttctacgccaacagtggaacgattcccggctggcctattccgaatatcccgacgacagcctggatcttgacccctctatgctcgactctatatggaagcctgacctgttctttgccaatgagaaaggcgcaaactttcacgatgtcacaactgataacaagctattacgcatttcgaaaaatggaaaggtcctatactctatcagactcaccttgacgttaagttgtcctatggatctaaagaatttccctatggatgtacagacatgcacaatgcagctggagagttttggttatactatgaacgacttgatatttgagtggctgtccgacggccctgtccaggtcgcggagggattgacacttcctcagtttatcttgaaggaggagaaagagctcggctattgtaccaagcattataacaccggaaaatttacttgcatagaggtgaagttccatctggaacgtcagatggggtactaccttattcaaatgtacattccctcccttcttatcgtgattctgagctgggtgtccttctggattaacatggatgccgcaccagctcgtgtggctctgggaattacaacagtactgacaatgactacccagagcagcgggtccagagcctcgttgcccaaggtatcttacgtgaaggcgatcgatatctggatggctgtgtgtctcctttttgttttcgctgctctgttagagtatgccgccgtgaacttcgtgtctagacaacacaaagaattcctgaggcttaggaggcgtcaaaagcggcagaataaagaagaagatgtgacccgggagtcgagattcaatttttccggttacggtatgggccactgtctccaggtgaaagatggcaccgccgtcaaggccacccccgcgaatcccctgcctcagcctccgaaggatggggatgctattaagaagaagtttgtggatagagccaagagaatcgacacaataagtagagccgcctttcctctggcgtttttgatctttaacattttttactggatcacttataaaataattaggcacgaggacgtccataaaaaatag

SEQ ID NO: 43304 - DNA, 1359 bp, Artificial Sequence
  derived and/or modified sequence
atgaatcggcagctagttaacatccttacagcgctgttcgctttctttcttgaaaccaatcactttagaactgctttctgtaaggatcacgactcccggagtgggaagcagcctagtcagacccttagcccctctgattttctcgacaaactaatggggagaacctcgggctatgatgccaggatcagaccaaacttcaagggaccacccgttaacgttacatgcaatatcttcatcaacagcttcgggtcagttaccgaaacaacaatggattacagagtgaatatttttctccgacagcagtggaacgactcacgcctggcgtatagcgagtaccctgatgactccctcgacttggacccgagtatgctggacagtatttggaaacccgacctcttcttcgcaaatgagaagggggctaattttcacgacgtcacaacagataacaagctcctgcggatcagtaaaaacggtaaggtgctgtactccatccggttgacgctgaccctctcatgtcccatggatctcaaaaattttcccatggacgtccagacatgtactatgcagctcgaaagctttggatatacaatgaacgacctcatcttcgaatggttgagcgatggccctgtgcaggtggcagaaggactcacactcccccagttcatcctgaaagaggaaaaagagcttggctattgcactaagcattacaacaccggaaaattcacgtgcattgaagtgaagttccatctagaacgccagatggggtactatctgatccagatgtacattccctccctgctcatagtgattctgagctgggtgagtttctggatcaacatggatgcagcaccagcaagagtggcactgggcataacgacagtgctgactatgaccacccaaagctctggaagcagagccagtcttccaaaagtgtcctacgttaaggctatcgatatctggatggcagtgtgcctgctttttgtgtttgctgccctcctcgagtacgcagcagtgaattttgtctcgaggcagcataaggagtttctgcgactgcggagacgtcagaagcgacagaataaggaggaagacgtgaccagagagtccaggtttaacttttccggatacgggatgggtcattgcctccaagtgaaagacgggactgccgtaaaggctacccctgctaatccattgccacagcctcccaaggatggtgacgctataaaaaagaaattcgtagatagggcgaagagaatagacaccatttcgcgggcagcatttcccttagctttcctcatcttcaatatcttctattggattacatacaagatcatcagacatgaggatgtgcataagaaatag

SEQ ID NO: 43305 - protein, 452 aa, Artificial Sequence
  derived and/or modified sequence
MNRQLVNILTALFAFFLETNHFRTAFCKDHDSRSGKQPSQTLSPSDFLDKLMGRTSGYDARIRPNFKGPPVNVTCNIFINSFGSIAETTMDYRVNIFLRQQWNDSRLAYSEYPDDSLDLDPSMLDSIWKPDLFFANEKGANFHDVTTDNKLLRISKNGKVLYSIRLTLTLSCPMDLKNFPMDVQTCTMQLESFGYTMNDLIFEWLSDGPVQVAEGLTLPQFILKEEKELGYCTKHYNTGKFTCIEVKFHLERQMGYYLIQMYIPSLLIVILSWVSFWINMDAAPARVALGITTVLTMTTQSSGSRASLPKVSYVKAIDIWMAVCLLFVFAALLEYAAVNFVSRQHKEFLRLRRRQKRQNKEEDVTRESRFNFSGYGMGHCLQVKDGTAVKATPANPLPQPPKDGDAIKKKFVDRAKRIDTISRAAFPLAFLIFNIFYWITYKIIRHEDVHKK

SEQ ID NO: 43306 - DNA, 1359 bp, Artificial Sequence
  derived and/or modified sequence
atgaatcgacagctggttaatattctgacagctctatttgcttttttcttagagacaaatcacttcagaactgcgttctgcaaagaccacgactcgcggtccggaaaacagccttcacagactctctcgccctctgattttctcgataagcttatgggacgtacgtccgggtatgatgcccgcataaggcctaactttaaggggcccccagtgaacgtgacatgcaacatctttatcaacagctttgggagcattgcggagacaacaatggattatagagtgaacatctttctgcggcagcagtggaatgattctaggcttgcatactctgagtaccccgacgacagtttagacctggatcccagcatgctcgatagtatttggaaacccgacctattcttcgccaacgaaaagggcgctaatttccacgatgtaacaacggataataagttgctaagaatttctaagaacggtaaagtgctgtactctattagattaactctaacccttagttgcccgatggacctcaaaaatttccctatggatgtccaaacttgcactatgcaacttgagagcttcggatacacgatgaatgaccttattttcgaatggctgtccgacgggcccgtacaggtggctgagggactaacccttccccaattcatcttgaaagaagaaaaggagctgggctactgtacaaaacattacaacaccggcaaattcacttgtatcgaagtgaagtttcacctggagcggcagatgggttattatctcatccagatgtatatcccatcgttacttattgtcatcctgagctgggttagtttttggatcaacatggacgctgcacctgctcgggtagcattggggatcacgaccgtccttactatgaccacacagagtagcggtagccgggccagcctccctaaagtttcttacgtcaaagccattgatatatggatggccgtttgcctcctgttcgtcttcgcagcgttactggaatatgctgcggtgaatttcgtctctaggcagcataaagaatttttacgcctgcgacggcggcagaaacgacagaataaagaggaagatgtaacgagagagtccaggttcaatttcagcggatatggcatgggtcattgtctgcaggtgaaggatggcactgctgttaaagccacaccagcaaaccctctgccgcagcccccaaaggatggggatgcaatcaaaaagaaatttgtggatagggcaaagagaatcgacaccatttcccgggcagcattcccacttgccttcctcatatttaacatcttttattggatcacgtataagatcattagacacgaggacgtgcacaaaaagtag

SEQ ID NO: 43307 - DNA, 1730 bp, Artificial Sequence
  derived and/or modified sequence
gcatttttattattcaggaaaagcagctgggggattcatcagttctgaggctttgtctttctgggttaactgatggtcccaagcctcggtttgacctgaccatgatgcccaggactggcactttttcttttttctcagcaaactgtacaaaaccaaatctctttttgattttcaaggaaactaggttcctgccaaattttgaatctggacaataaacagacactttgtcctagcatctttctggaatcatttcgggatattttccacaagcaacacagaaacaggaatgaaccggcagctagtgaacattttgacagccttgtttgcatttttcttagagacaaaccacttcaggacggctttctgcaaagaccatgactccaggtctggaaaacaaccttcacagaccctatctccttcagatttcttggacaagttaatgggaaggacatcaggatatgatgcaagaatcaggccaaattttaaagggcctcctgtaaatgttacctgcaacatatttatcaacagctttgggtcaatagcagaaactacaatggactaccgagtgaatatttttctgagacaacagtggaatgattcacggctggcgtacagtgagtacccagatgactccctggacttggacccatccatgctagactccatttggaaaccagatttgttctttgccaatgagaagggtgccaacttccacgatgtcaccactgacaacaaattgctacggatttcgaaaaatggcaaagtgctctacagtatcagactcaccttgaccttatcctgtcccatggacttgaagaactttccgatggatgtccagacctgtacaatgcagctggagagttttgggtacacgatgaatgacctgatatttgagtggttaagtgatggtccagtgcaagttgctgaaggattgaccctgccccagtttattttgaaagaagagaaggaacttggctactgtacaaagcactacaacactggaaagtttacctgcattgaggtcaagtttcatctggaacgccaaatgggatattatttgatccagatgtacatcccaagcctgcttatagtaattttgtcctgggtttccttttggataaatatggatgcagcccctgccagggtcgcactgggcatcaccacagtcttaacgatgaccacccagagttcaggctccagggcatctctgccaaaggtctcctatgtaaaagcgattgacatctggatggcggtgtgccttctgtttgtgtttgctgccttactggaatacgcagcggtgaacttcgtctccaggcaacacaaggagttcctgcgcctccgaagaagacagaagaggcagaataaggaagaagacgttactcgtgaaagtcgttttaattttagcggttatgggatgggtcactgcctccaagtgaaagatggaacagctgtcaaggccacacctgccaacccactcccacaaccgccaaaagatggagatgctatcaagaagaagtttgtggaccgggcaaaaaggattgacacgatatctcgagctgccttcccattggccttcctcattttcaacatcttttactggatcacatacaagatcattcggcatgaagatgtccacaagaaatagatgtgccctacagaccctgggaccttcttgcctcagtgttgtgcttgtaaatacacagtgaaattgtctttatatcactttgaca

SEQ ID NO: 43308 - DNA, 1359 bp, Artificial Sequence
  derived and/or modified sequence
atgaaccggcagctggtgaacatcctgacagccctgtttgccttcttcctggagaccaaccacttcagaacagccttctgcaaggaccatgacagccgcagcggcaagcagcccagccagaccctgagccccagcgacttcctggacaagctgatgggccgcaccagcggctatgatgcccgcatccggcccaacttcaagggcccccctgtgaatgtgacctgcaacatcttcatcaacagctttggcagcattgctgagaccaccatggactacagagtgaacatcttcctgcggcagcagtggaatgacagccggctggcctacagcgagtacccagatgacagcctggacctggaccccagcatgctggacagcatctggaagccagacctcttctttgccaatgagaagggggccaacttccatgatgtgaccacagacaacaagctgctgcgcatcagcaagaatggcaaggtgctgtacagcatccggctgaccctgaccctgagctgccccatggacctgaagaacttccccatggatgtgcagacctgcaccatgcagctggagagctttggctacaccatgaatgacctgatctttgagtggctgagtgatggccctgtgcaggtggccgagggcctgaccctgccccagttcatcctgaaggaggagaaggagctgggctactgcaccaagcactacaacacaggcaagttcacctgcatcgaggtgaagttccacctggagcggcagatgggctactacctgatccagatgtacatccccagcctgctgattgtcatcctgtcctgggtgtccttctggatcaacatggatgctgccccagcccgggtggccctgggcatcaccaccgtgctgaccatgaccacccagagcagcggcagccgggccagcctgcccaaggtgtcctatgtgaaggccatcgacatctggatggctgtgtgcctgctgtttgtgtttgctgccctgctggagtatgctgctgtgaactttgtgtcccggcagcacaaggagttcctgcggctgcggcggcggcagaagaggcagaacaaggaggaggatgtgacccgggagagccgcttcaacttcagcggctacggcatgggccactgcctgcaggtgaaggatggaacagctgtgaaggccaccccagccaaccccctgccccagccccccaaggatggagatgccatcaagaagaagtttgtggaccgggccaagagaattgacaccatcagccgggccgccttccccctggccttcctgatcttcaacatcttctactggatcacctacaagatcatcagacatgaagatgtgcacaagaagtag

SEQ ID NO: 43309 - DNA, 1359 bp, Artificial Sequence
  derived and/or modified sequence
atgaaccggcagctggtgaacatcctgaccgccctgttcgccttctttttggaaacaaatcactttagaaccgctttttgtaaggaccacgatagccgcagcggaaagcaacccagccaaacgttatcgccaagcgactttctcgacaaactgatggggcgcacctccggatacgatgcccggatcaggccaaatttcaagggcccccctgtgaatgtgacttgtaatatcttcatcaacagcttcgggtccatagctgagacaacgatggattacagggtgaacatttttcttaggcagcagtggaacgacagtaggctagcctattccgagtaccccgacgacagcctcgatctggatccgtctatgttggatagcatttggaaacccgacttattcttcgccaatgagaagggcgccaatttccatgatgtgaccacggacaacaagcttcttcgcatttccaagaatggcaaggtcctgtacagtattcgtttgaccctgacactgtcctgccccatggatctaaagaactttcctatggatgtccagacttgtacaatgcagctggagtcttttgggtatactatgaacgatttgatctttgaatggctgtctgatggcccagttcaggtggccgagggactgacactgccccagttcatcttaaaggaagagaaagaattaggctattgcactaaacactacaatacgggtaagtttacatgcattgaggttaagtttcatttagagagacagatgggatattacctgatacagatgtatattccaagcttactgatcgttattctcagttgggtctctttttggataaacatggacgctgcccctgcacgagtggcactgggcatcacgactgttcttaccatgaccacgcagagttcaggctcacgcgcttcgttgcccaaggtctcatacgtgaaagctattgacatctggatggcagtgtgcctgctgtttgtgtttgcagccctattagaatatgccgccgtcaatttcgtgtctaggcagcacaaagagtttttgagattgcggcgaaggcagaagcgccagaacaaagaggaggatgtcacccgcgagtctcgattcaatttctccggatacggaatggggcactgcctgcaggtgaaggatggcacggcagtgaaagccactccggccaaccctctgccccagcccccgaaagatggcgacgctatcaagaaaaagttcgtggacagagcaaagaggatcgacacaatctcccgagcagcttttcccttggctttcctcatctttaacatcttttattggataacatacaagataattcggcacgaagacgtccataagaaatag

SEQ ID NO: 43310 - DNA, 1359 bp, Artificial Sequence
  derived and/or modified sequence
atgaaccgtcaactcgttaacatactgacagccctcttcgcgttcttcctagagaccaaccactttagaacagccttctgtaaagaccatgactcaaggagcgggaagcagcctagtcagactttgagcccctctgactttctcgacaaactcatgggccgtacatccgggtacgatgcacgaatcaggccaaatttcaagggaccacccgtgaacgtgacatgcaatattttcatcaattcttttggaagtattgcagaaactaccatggattatcgtgtgaacatctttctccgtcaacagtggaatgattctcgactggcatactctgaatatcccgatgactccttggacttggatccgtcaatgctagacagcatttggaagcccgatctgtttttcgccaacgagaagggagctaacttccacgatgtgacgactgataataaactgctgcggatttcaaaaaacggaaaggttttgtatagcattaggttgactctcaccttgagctgcccaatggacctgaagaattttcccatggatgtgcagacttgtaccatgcaactcgaatcttttggatatacaatgaacgacctgatctttgagtggctctccgacggacccgtacaggtggccgagggcctgacgttgcctcaattcattcttaaagaggaaaaagagctcggctactgcacaaagcactacaacaccggaaagtttacttgtattgaagtgaaattccacctcgaaaggcagatggggtactatctgatccagatgtatatcccttctctccttatcgttatcctctcctgggtctcgttttggattaatatggacgccgctccagccagagtggcgttagggatcacaactgtcctcaccatgacgacacagagctcgggcagcagagcaagcttaccaaaagtatcctacgtcaaagccattgatatctggatggccgtttgtttactcttcgtctttgctgccctgctggaatatgccgctgtcaattttgtgtccagacaacataaagagtttctgcgactgcgacgacgccagaagcggcagaacaaagaagaggatgtgacaagagaatctaggttcaatttctcagggtatgggatgggccactgtctccaggttaaggatgggacagctgtgaaggccactccagcaaacccgttgcctcagccacccaaagacggcgacgcgatcaagaaaaagtttgtggatcgggcaaagaggatcgataccatctctagagccgctttccccctggccttcctgatctttaatatcttttattggataacatacaaaatcatacgccatgaagacgtccataagaaatag

SEQ ID NO: 43311 - DNA, 1359 bp, Artificial Sequence
  derived and/or modified sequence
atgaacagacagctggtgaacatcctgaccgccctgttcgccttcttcctggagaccaaccacttcagaaccgccttctgcaaggaccacgacagcagaagcggcaagcagcccagccagaccctgagccccagcgacttcctggacaagctgatgggcagaaccagcggctacgacgccagaatcagacccaacttcaagggcccccccgtgaacgtgacctgcaacatcttcatcaacagcttcggcagcatcgccgagaccaccatggactacagagtgaacatcttcctgagacagcagtggaacgacagcagactggcctacagcgagtaccccgacgacagcctggacctggaccccagcatgctggacagcatctggaagcccgacctgttcttcgccaacgagaagggcgccaacttccacgacgtgaccaccgacaacaagctgctgagaatcagcaagaacggcaaggtgctgtacagcatcagactgaccctgaccctgagctgccccatggacctgaagaacttccccatggacgtgcagacctgcaccatgcagctggagagcttcggctacaccatgaacgacctgatcttcgagtggctgagcgacggccccgtgcaggtggccgagggcctgaccctgccccagttcatcctgaaggaggagaaggagctgggctactgcaccaagcactacaacaccggcaagttcacctgcatcgaggtgaagttccacctggagagacagatgggctactacctgatccagatgtacatccccagcctgctgatcgtgatcctgagctgggtgagcttctggatcaacatggacgccgcccccgccagagtggccctgggcatcaccaccgtgctgaccatgaccacccagagcagcggcagcagagccagcctgcccaaggtgagctacgtgaaggccatcgacatctggatggccgtgtgcctgctgttcgtgttcgccgccctgctggagtacgccgccgtgaacttcgtgagcagacagcacaaggagttcctgagactgagaagaagacagaagagacagaacaaggaggaggacgtgaccagagagagcagattcaacttcagcggctacggcatgggccactgcctgcaggtgaaggacggcaccgccgtgaaggccacccccgccaaccccctgccccagccccccaaggacggcgacgccatcaagaagaagttcgtggacagagccaagagaatcgacaccatcagcagagccgccttccccctggccttcctgatcttcaacatcttctactggatcacctacaagatcatcagacacgaggacgtgcacaagaagtag

SEQ ID NO: 43312 - protein, 495 aa, Artificial Sequence
  derived and/or modified sequence
MWQIVFFTLSCDLVLAAAYNNFRKSMDSIGKKQYQVQHGSCSYTFLLPEMDNCRSSSSPYVSNAVQRDAPLEYDDSVQRLQVLENIMENNTQWLMKLENYIQDNMKKEMVEIQQNAVQNQTAVMIEIGTNLLNQTAEQTRKLTDVEAQVLNQTTRLELQLLEHSLSTNKLEKQILDQTSEINKLQDKNSFLEKKVLAMEDKHIIQLQSIKEEKDQLQVLVSKQNSIIEELEKKIVTATVNNSVLQKQQHDLMETVNNLLTMMSTSNSKDPTVAKEEQISFRDCAEVFKSGHTTNGIYTLTFPNSTEEIKAYCDMEAGGGGWTIIQRREDGSVDFQRTWKEYKVGFGNPSGEYWLGNEFVSQLTNQQRYVLKIHLKDWEGNEAYSLYEHFYLSSEELNYRIHLKGLTGTAGKISSISQPGNDFSTKDGDNDKCICKCSQMLTGGWWFDACGPSNLNGMYYPQRQNTNKFNGIKWYYWKGSGYSLKATTMMIRPADF

SEQ ID NO: 43313 - DNA, 1488 bp, Artificial Sequence
  derived and/or modified sequence
atgtggcagattgtgttctttacactgagttgcgacctcgtgcttgccgccgcctataacaattttagaaagagcatggactccatcggcaagaaacaatatcaggtacaacacgggtcctgttcctacacctttctgctccccgaaatggataactgtcgtagctcttcctctccatatgtaagcaatgcagtacaaagagatgcccccctggaatacgatgatagcgttcagcggttacaagtccttgaaaacataatggaaaataacacgcaatggctcatgaagctcgaaaactacatccaggacaatatgaaaaaggaaatggtagagatacagcaaaacgccgtgcaaaaccagacagcggtcatgattgagatcggcaccaacctgcttaatcagactgctgagcagacacggaaacttactgatgtagaagcacaagttttaaaccaaaccaccagattagagcttcagctcctggaacattcactaagcacaaataagctggagaaacagatcctggaccaaacttctgaaattaataaactccaagacaaaaactcatttcttgagaagaaggtgttggctatggaggataagcacatcatccagctgcagtcaattaaggaggaaaaagaccagctgcaggtcctggtgagcaaacagaattccatcatagaggaactggaaaaaaaaattgtgaccgcaactgttaataattccgtgcttcaaaaacagcagcacgacctcatggaaactgtcaacaacctgctgaccatgatgagtacatctaacagcaaggatcccaccgtagccaaagaagagcagattagctttagagactgtgctgaagtcttcaaatctgggcacacaaccaacggcatctacactcttacgttccctaattcaactgaggagattaaggcgtactgcgacatggaggcaggtggtggcgggtggaccattattcaacgacgcgaggacggtagcgtcgatttccagagaacctggaaagaatacaaagtgggcttcggaaacccgtccggcgaatactggctcggtaatgaatttgtgtctcagctcaccaatcagcagcggtatgtgctcaagattcatctgaaggattgggaggggaacgaggcatactccctttacgagcatttttacttatcatctgaggaactgaactatcgcatacacttgaagggactgactggcacagcgggaaagatttcctcaatcagccagcccggaaatgacttctcaactaaggatggcgataacgacaagtgtatctgtaagtgttctcagatgctgacaggcggttggtggtttgacgcttgcggccctagcaatctcaacggcatgtactacccccaaaggcaaaacacgaacaagttcaatggtattaaatggtattattggaaaggaagtggttacagcctaaaagctaccactatgatgatcagaccggctgatttctag

SEQ ID NO: 43314 - DNA, 1488 bp, Artificial Sequence
  derived and/or modified sequence
atgtggcagatcgtgttcttcaccctgagctgtgacctggtgctggccgccgcctacaacaacttcaggaagtccatggacagcatcggcaagaagcagtaccaggtgcagcacggcagctgcagctacaccttcctgctgcctgagatggacaactgccgcagcagcagcagcccctacgtgtccaatgctgtgcagagagatgcccccctggagtatgatgacagcgtgcagaggctgcaggtgctggagaacatcatggagaacaacacccagtggctgatgaagctggagaactacatccaggacaacatgaagaaggagatggtggagatccagcagaatgctgtgcagaaccagacagctgtgatgattgaaattggcaccaacctgctgaaccagacagctgagcagaccaggaagctgacagatgtggaggcccaggtgctgaaccagaccacccggctggagctgcagctgctggagcacagcctgagcaccaacaagctggagaagcagatcctggaccagaccagcgagatcaacaagctgcaggacaagaacagcttcctggagaagaaggtgctggccatggaggacaagcacatcatccagctgcagagcatcaaggaggagaaggaccagctgcaggtgctggtgtccaagcagaacagcatcatcgaggagctggagaagaagatcgtgacagccaccgtgaacaacagcgtgctgcagaagcagcagcacgacctgatggagaccgtgaacaacctgctgaccatgatgagcaccagcaacagcaaggaccccaccgtggccaaggaggagcagatctccttccgggactgtgccgaggtgttcaagagcggccacaccaccaacggcatctacaccctgaccttccccaacagcacagaggagatcaaggcctactgtgacatggaggccggcggcggcggctggaccatcatccagaggcgggaggatggctctgtggacttccagaggacctggaaggagtacaaggtgggctttggaaaccccagcggggagtactggctgggcaatgaatttgtgtcccagctgaccaaccagcagcgctacgtgctgaagatccacctgaaggactgggagggcaatgaggcctacagcctgtatgagcacttctacctgagcagcgaggagctgaactaccgcatccacctgaagggcctgaccggcacagctgggaagatcagcagcatcagccagcctggaaatgacttcagcaccaaggatggagacaatgacaagtgcatctgcaagtgcagccagatgctgactggaggctggtggtttgatgcctgtggccccagcaacctgaatggcatgtactacccccagaggcagaacaccaacaagttcaacggcatcaagtggtactactggaagggcagcggctacagcctgaaggccaccaccatgatgatccggcctgctgacttctag

SEQ ID NO: 43315 - DNA, 1488 bp, Artificial Sequence
  derived and/or modified sequence
atgtggcagatcgtgttcttcaccctgagctgcgacctggtgctggctgccgcttacaacaacttccgaaaaagcatggattccatcggcaaaaagcagtatcaggtgcagcacggatcttgctcatataccttcctattgccggagatggataattgccggtcttcctcttcaccatacgtctctaatgctgtgcaacgagacgcacccttagaatatgatgacagcgtacagaggctgcaggtgctggagaatataatggagaacaacacccagtggctgatgaaactggagaattacatccaggacaatatgaagaaggaaatggtggaaatacaacagaacgccgttcagaaccagactgcagttatgattgaaatcggcacgaatttgctgaatcagaccgctgaacagacccgtaaactgactgatgttgaagcacaggtcctgaatcagacaacgcggctggaattgcagttgctggagcattctctctctactaataagctcgagaaacagattttggaccaaacaagcgagatcaacaagttgcaagacaagaattcttttctggaaaaaaaagtgcttgcaatggaagataagcatatcatccagctgcaatcaatcaaagaggagaaagatcagctgcaggtgttggtgagcaaacagaactccattatcgaggaacttgaaaagaaaatagttactgccacggtcaataattcagtgttgcagaaacagcagcacgacctgatggagaccgttaataacctcctgacaatgatgtctaccagtaacagtaaagaccctactgtggcaaaggaggagcagatatcgttcagagactgcgctgaagtgttcaaaagcggccacaccacgaacgggatatacacgctcacgtttcccaattccactgaagagatcaaagcctactgtgatatggaagctggtggcggggggtggactatcatccagaggagggaggatgggtctgttgacttccagagaacctggaaagagtacaaggttggattcggtaatccctcaggagaatattggctggggaacgagtttgtgagccagctaaccaatcaacagcgctacgtcctgaagatacacctcaaagactgggagggaaatgaggcctattctctctacgagcatttttacctgtcatccgaggaactaaactaccgtatacatcttaagggactcacaggcactgccggcaagatctctagcatctcgcagcccggcaatgatttctccacaaaggacggggataatgacaaatgtatctgcaagtgtagccagatgctcacaggaggttggtggttcgacgcatgcggaccatcaaatctgaacggaatgtattaccctcagcgccagaacacaaacaaattcaacgggatcaaatggtactattggaaggggtccggctatagcctgaaggcaacgacgatgatgatacgccctgccgacttctag

SEQ ID NO: 43316 - DNA, 1488 bp, Artificial Sequence
  derived and/or modified sequence
atgtggcagattgtgttttttacccttagctgcgatctggtcctggcagcagcttataacaattttcgcaagtcaatggatagcatcggcaaaaagcagtaccaggttcagcatggttcatgctcgtatacgttccttttaccggagatggacaattgtcggtcaagcagttccccttacgtttccaacgctgttcagagagacgcgccactcgagtatgacgattctgtgcagcgcttgcaagtcctggaaaatatcatggagaacaatactcagtggcttatgaaactggaaaattatatacaggacaacatgaagaaagagatggtcgaaatccaacagaacgccgttcagaatcagaccgcggtgatgatcgagatcggcaccaatttgctcaatcagaccgctgagcaaactagaaagctcaccgacgtggaagcccaagtgctgaaccagaccacacgtctggagctgcagcttctggaacacagcttgagtacgaacaaacttgaaaagcagattctcgaccagaccagcgaaataaataaactgcaggacaagaattcattcctggaaaaaaaggtgctcgccatggaagataagcatatcatccaattgcagagcatcaaggaagagaaggaccagctccaagtactcgtgtcaaaacagaatagtatcattgaagagcttgagaagaagattgtgactgcaacagtcaacaacagcgtcctccagaaacagcagcatgacctaatggaaacagtgaataacctcctgactatgatgtctaccagcaattccaaggacccgacagtggccaaagaggagcagatttcttttagggattgcgcagaagtgtttaaatcgggccatacaaccaacggcatttatactctgacattcccaaattcgacggaggaaattaaggcttattgcgatatggaagcgggtggaggcggatggacgatcattcaaagacgggaagatggatcagtggacttccagagaacctggaaagagtacaaagttggtttcgggaatccgagcggcgagtattggctgggaaacgagttcgtttcccagttgaccaatcaacaacgatacgttttgaaaattcacctcaaagactgggagggaaacgaagcttactctctctacgagcacttttatctctcttccgaagaattaaactacagaatccacttaaagggtctgaccgggaccgcagggaaaatcagcagcatcagccaacccggtaatgacttctctaccaaagatggcgataatgataagtgcatctgcaagtgttcccagatgctaactggaggatggtggtttgatgcttgcgggcctagtaacctcaacggaatgtactacccacagagacaaaacaccaataaattcaatggcattaagtggtactactggaaggggagcggttacagccttaaagctacgaccatgatgatacgacccgctgacttctag

SEQ ID NO: 43317 - DNA, 5244 bp, Artificial Sequence
  derived and/or modified sequence
aaagtgattgattcggatactgacactgtaggatctggggagagaggaacaaaggaccgtgaaagctgctctgtaaaagctgacacagccctcccaagtgagcaggactgttcttcccactgcaatctgacagtttactgcatgcctggagagaacacagcagtaaaaaccaggtttgctactggaaaaagaggaaagagaagactttcattgacggacccagccatggcagcgtagcagccctgcgttttagacggcagcagctcgggactctggacgtgtgtttgccctcaagtttgctaagctgctggtttattactgaagaaagaatgtggcagattgttttctttactctgagctgtgatcttgtcttggccgcagcctataacaactttcggaagagcatggacagcataggaaagaagcaatatcaggtccagcatgggtcctgcagctacactttcctcctgccagagatggacaactgccgctcttcctccagcccctacgtgtccaatgctgtgcagagggacgcgccgctcgaatacgatgactcggtgcagaggctgcaagtgctggagaacatcatggaaaacaacactcagtggctaatgaagcttgagaattatatccaggacaacatgaagaaagaaatggtagagatacagcagaatgcagtacagaaccagacggctgtgatgatagaaatagggacaaacctgttgaaccaaacagcggagcaaacgcggaagttaactgatgtggaagcccaagtattaaatcagaccacgagacttgaacttcagctcttggaacactccctctcgacaaacaaattggaaaaacagattttggaccagaccagtgaaataaacaaattgcaagataagaacagtttcctagaaaagaaggtgctagctatggaagacaagcacatcatccaactacagtcaataaaagaagagaaagatcagctacaggtgttagtatccaagcaaaattccatcattgaagaactagaaaaaaaaatagtgactgccacggtgaataattcagttcttcagaagcagcaacatgatctcatggagacagttaataacttactgactatgatgtccacatcaaactctaaggaccccactgttgctaaagaagaacaaatcagcttcagagactgtgctgaagtattcaaatcaggacacaccacgaatggcatctacacgttaacattccctaattctacagaagagatcaaggcctactgtgacatggaagctggaggaggcgggtggacaattattcagcgacgtgaggatggcagcgttgattttcagaggacttggaaagaatataaagtgggatttggtaacccttcaggagaatattggctgggaaatgagtttgtttcgcaactgactaatcagcaacgctatgtgcttaaaatacaccttaaagactgggaagggaatgaggcttactcattgtatgaacatttctatctctcaagtgaagaactcaattataggattcaccttaaaggacttacagggacagccggcaaaataagcagcatcagccaaccaggaaatgattttagcacaaaggatggagacaacgacaaatgtatttgcaaatgttcacaaatgctaacaggaggctggtggtttgatgcatgtggtccttccaacttgaacggaatgtactatccacagaggcagaacacaaataagttcaacggcattaaatggtactactggaaaggctcaggctattcgctcaaggccacaaccatgatgatccgaccagcagatttctaaacatcccagtccacctgaggaactgtctcgaactattttcaaagacttaagcccagtgcactgaaagtcacggctgcgcactgtgtcctcttccaccacagagggcgtgtgctcggtgctgacgggacccacatgctccagattagagcctgtaaactttatcacttaaacttgcatcacttaacggaccaaagcaagaccctaaacatccataattgtgattagacagaacacctatgcaaagatgaacccgaggctgagaatcagactgacagtttacagacgctgctgtcacaaccaagaatgttatgtgcaagtttatcagtaaataactggaaaacagaacacttatgttatacaatacagatcatcttggaactgcattcttctgagcactgtttatacactgtgtaaatacccatatgtcctgaattcaccatcactatcacaattaaaaggaagaaaaaaactctctaagccataaaaagacatattcagggatattctgagaaggggttactagaagtttaatatttggaaaaacagttagtgcatttttactccatctcttaggtgctttaaatttttatttcaaaaacagcgtatttacatttatgttgacagcttagttataagttaatgctcaaatacgtatttcaaatttatatggtagaaacttccagaatctctgaaattatcaacagaaacgtgccattttagtttatatgcagaccgtactatttttttctgcctgattgttaaatatgaaggtatttttagtaattaaatataacttattaggggatatgcctatgtttaacttttatgataatatttacaattttataatttgtttccaaaagacctaattgtgccttgtgataaggaaacttcttacttttaatgatgaggaaaattatacatttcattctatgacaaagaaactttactatcttctcactattctaaaacagaggtctgttttctttcctagtaagatatatttttatagaactagactacaatttaatttctggttgagaaaagccttctatttaagaaatttacaaagctatatgtctcaagattcacccttaaatttacttaaggaaaaaaataattgacactagtaagtttttttatgtcaatcagcaaactgaaaaaaaaaaaagggtttcaaagtgcaaaaacaaaatctgatgttcataatatatttaaatatttaccaaaaatttgagaacacagggctgggcgcagtggctcacacctataatcccagtacattggtaggcaaggtgggcagatcacctgaggtcaggagttcaagaccagcctggacaacatggtgaaaccctgtctctactaaataatacaaaaattagccaggcgtgctggcgggcacctgtaatcccagctactcgggaggctgaggcagggagaattgcttgcaccagggaggtagaggttgcagtgagccaagatcgcaccactgcactccagccggggcaacagagcaagactccatctcaaaaaaaaaaaaaaaaaaagaaagaaaagaaaatttgagaacacagctttatactcgggactacaaaaccataaactcctggagttttaactccttttgaaattttcatagtacaattaatactaatgaacatttgtgtaaagctttataatttaaaggcaatttctcatatattcttttctgaatcatttgcaaggaagttcagagtccagtctgtaactagcatctactatatgtctgtcttcaccttacagtgttctaccattattttttctttattccatttcaaaatctaatttattttaccccaacttctccccaccacttgacgtagttttagaacacacaggtgttgctacatatttggagtcaatgatggactctggcaaagtcaaggctctgttttatttccaccaaggtgcacttttccaacaactatttaactagttaagaacctccctatcttagaactgtatctactttatatttaagaaggttttatgaattcaacaacggtatcatggccttgtatcaagttgaaaaacaactgaaaataagaaaatttcacagcctcgaaagacaacaacaagtttctaggatatctcaatgacaagagtgatggatacttaggtagggaaacgctaatgcaggaaaaactggcaacaacacaatttatatcaattctctttgtaggcaggtgataaaaaattcaaggacaaatctcattatgtcattgtgcatcatatataatctcttatgagcgagaatggggggaatttgtgtttttactttacacttcaattccttacacggtatttcaaacaaacagttttgctgagaggagcttttgtctctccttaagaaaatgtttataaagctgaaaggaaatcaaacagtaatcttaaaaatgaaaacaaaacaacccaacaacctagataactacagtgatcagggagcacagttcaactccttgttatgttttagtcatatggcctactcaaacagctaaataacaacaccagtggcagataaaaatcaccatttatctttcagctattaatcttttgaatgaataaactgtgacaaacaaattaacatttttgaacatgaaaggcaacttctgcacaatcctgtatccaagcaaactttaaattatccacttaattattacttaatcttaaaaaaaattagaacccagaacttttcaatgaagcatttgaaagttgaagtggaatttaggaaagccataaaaatataaatactgttatcacagcaccagcaagccataatctttatacctatcagttctatttctattaacagtaaaaacattaagcaagatataagactacctgcccaagaattcagtcttttttcatttttgtttttctcagttctgaggatgttaatcgtcaaattttctttggactgcattcctcactactttttgcacaatggtctcacgttctcacatttgttctcgcgaataaattgataaaaggtgttaagttctgtgaatgtctttttaattatgggcataattgtgcttgactggataaaaacttaagtccacccttatgtttataataatttcttgagaacagcaaactgcatttaccatcgtaaaacaacatctgacttacgggagctgcagggaagtggtgagacagttcgaacggctcctcagaaatccagtgacccaattctaaagaccatagcacctgcaagtgacacaacaagcagatttattatacatttattagccttagcaggcaataaaccaagaatcactttgaagacacagcaaaaagtgatacactccgcagatctgaaatagatgtgttctcagacaacaaagtcccttcagaatcttcatgttgcataaatgttatgaatatt

SEQ ID NO: 43318 - DNA, 1488 bp, Artificial Sequence
  derived and/or modified sequence
atgtggcagatcgtgttcttcaccctgagctgcgacctggtgctggccgccgcctacaacaacttcagaaagagcatggacagcatcggcaagaagcagtaccaggtgcagcacggcagctgcagctacaccttcctgctgcccgagatggacaactgcagaagcagcagcagcccctacgtgagcaacgccgtgcagagagacgcccccctggagtacgacgacagcgtgcagagactgcaggtgctggagaacatcatggagaacaacacccagtggctgatgaagctggagaactacatccaggacaacatgaagaaggagatggtggagatccagcagaacgccgtgcagaaccagaccgccgtgatgatcgagatcggcaccaacctgctgaaccagaccgccgagcagaccagaaagctgaccgacgtggaggcccaggtgctgaaccagaccaccagactggagctgcagctgctggagcacagcctgagcaccaacaagctggagaagcagatcctggaccagaccagcgagatcaacaagctgcaggacaagaacagcttcctggagaagaaggtgctggccatggaggacaagcacatcatccagctgcagagcatcaaggaggagaaggaccagctgcaggtgctggtgagcaagcagaacagcatcatcgaggagctggagaagaagatcgtgaccgccaccgtgaacaacagcgtgctgcagaagcagcagcacgacctgatggagaccgtgaacaacctgctgaccatgatgagcaccagcaacagcaaggaccccaccgtggccaaggaggagcagatcagcttcagagactgcgccgaggtgttcaagagcggccacaccaccaacggcatctacaccctgaccttccccaacagcaccgaggagatcaaggcctactgcgacatggaggccggcggcggcggctggaccatcatccagagaagagaggacggcagcgtggacttccagagaacctggaaggagtacaaggtgggcttcggcaaccccagcggcgagtactggctgggcaacgagttcgtgagccagctgaccaaccagcagagatacgtgctgaagatccacctgaaggactgggagggcaacgaggcctacagcctgtacgagcacttctacctgagcagcgaggagctgaactacagaatccacctgaagggcctgaccggcaccgccggcaagatcagcagcatcagccagcccggcaacgacttcagcaccaaggacggcgacaacgacaagtgcatctgcaagtgcagccagatgctgaccggcggctggtggttcgacgcctgcggccccagcaacctgaacggcatgtactacccccagagacagaacaccaacaagttcaacggcatcaagtggtactactggaagggcagcggctacagcctgaaggccaccaccatgatgatcagacccgccgacttctag

SEQ ID NO: 43319 - protein, 444 aa, Artificial Sequence
  derived and/or modified sequence
MWQIVFFTLSCDLVLAAAYNNFRKSMDSIGKKQYQVQHGSCSYTFLLPEMDNCRSSSSPYVSNAVQRDAPLEYDDSVQRLQVLENIMENNTQWLMKVLNQTTRLELQLLEHSLSTNKLEKQILDQTSEINKLQDKNSFLEKKVLAMEDKHIIQLQSIKEEKDQLQVLVSKQNSIIEELEKKIVTATVNNSVLQKQQHDLMETVNNLLTMMSTSNSAKDPTVAKEEQISFRDCAEVFKSGHTTNGIYTLTFPNSTEEIKAYCDMEAGGGGWTIIQRREDGSVDFQRTWKEYKVGFGNPSGEYWLGNEFVSQLTNQQRYVLKIHLKDWEGNEAYSLYEHFYLSSEELNYRIHLKGLTGTAGKISSISQPGNDFSTKDGDNDKCICKCSQMLTGGWWFDACGPSNLNGMYYPQRQNTNKFNGIKWYYWKGSGYSLKATTMMIRPADF

SEQ ID NO: 43320 - DNA, 1335 bp, Artificial Sequence
  derived and/or modified sequence
atgtggcagattgtgtttttcactttaagttgcgatctggtcctggccgccgcctacaataactttcgcaagtcaatggacagtattggcaagaaacagtatcaggttcagcatggaagttgctcatacaccttcttgctccccgaaatggacaattgtcggagctcatctagtccttacgtgtccaacgcagttcaaagagacgccccactagaatacgacgattcagttcagagactccaagtgctggagaatatcatggaaaacaacacgcagtggctgatgaaagtcttaaatcagaccacacgactggaactgcagttactggagcatagtctcagtacgaacaaattggaaaaacagatcctcgatcagaccagcgagattaataagcttcaggacaaaaattcgttcctggagaagaaggtgctcgccatggaggataagcatatcatacagctgcaaagcataaaggaggagaaagaccaattgcaggtactggtgagtaagcagaactccatcattgaggagctagaaaaaaaaatcgttaccgccaccgttaataatagcgtcctgcagaaacagcagcatgatctaatggagacagtgaacaacctgctaaccatgatgagtaccagcaactcggcaaaagaccctacagtggccaaggaggagcagattagcttccgagactgcgctgaggtcttcaaaagcggacatactacaaatggcatatatactctgacgttccctaactccacggaagaaatcaaagcctactgcgatatggaggctgggggtgggggctggaccattatccaacgcagagaagacgggtccgtggattttcagaggacatggaaggagtacaaggtggggtttggaaacccctccggcgaatactggctagggaatgagttcgtatcacagctgactaaccaacaacgttacgttctgaaaattcatctcaaggactgggagggcaatgaggcgtattcactgtacgagcatttctatctatcctcagaagagctgaattacagaatccacctgaagggcttaacaggtacagcgggtaagatttctagcatctctcagccagggaatgacttcagcacaaaagatggggacaatgataagtgcatttgtaagtgttctcagatgcttactggcggttggtggtttgatgcgtgtggcccgagcaatctgaatggaatgtactacccacagcgtcagaataccaacaagtttaacggcatcaagtggtactactggaaaggctctggctactccctcaaagcgactactatgatgatccggcccgcagacttctag

SEQ ID NO: 43321 - DNA, 1335 bp, Artificial Sequence
  derived and/or modified sequence
atgtggcagatcgtgttcttcaccctgagctgtgacctggtgctggccgccgcctacaacaacttcaggaagtccatggacagcatcggcaagaagcagtaccaggtgcagcacggcagctgcagctacaccttcctgctgcctgagatggacaactgccgcagcagcagcagcccctacgtgtccaatgctgtgcagagagatgcccccctggagtatgatgacagcgtgcagaggctgcaggtgctggagaacatcatggagaacaacacccagtggctgatgaaggtgctgaaccagaccacccggctggagctgcagctgctggagcacagcctgagcaccaacaagctggagaagcagatcctggaccagaccagcgagatcaacaagctgcaggacaagaacagcttcctggagaagaaggtgctggccatggaggacaagcacatcatccagctgcagagcatcaaggaggagaaggaccagctgcaggtgctggtgtccaagcagaacagcatcatcgaggagctggagaagaagatcgtgacagccaccgtgaacaacagcgtgctgcagaagcagcagcacgacctgatggagaccgtgaacaacctgctgaccatgatgagcaccagcaacagcgccaaggaccccaccgtggccaaggaggagcagatctccttccgggactgtgccgaggtgttcaagagcggccacaccaccaacggcatctacaccctgaccttccccaacagcacagaggagatcaaggcctactgtgacatggaggccggcggcggcggctggaccatcatccagaggagagaagatggctctgtggacttccagaggacctggaaggagtacaaggtgggcttcggcaaccccagcggggagtactggctgggcaatgaatttgtgtcccagctgaccaaccagcagagatatgtgctgaagatccacctgaaggactgggagggcaatgaggcctacagcctgtatgagcacttctacctgagcagcgaggagctgaactaccgcatccacctgaagggcctgactggaacagctgggaagatcagcagcatcagccagcctggaaatgacttcagcaccaaggatggagacaatgacaagtgcatctgcaagtgcagccagatgctgaccggcggctggtggtttgatgcctgtggccccagcaacctgaatggcatgtactacccccagaggcagaacaccaacaagttcaacggcatcaagtggtactactggaagggcagcggctacagcctgaaggccaccaccatgatgatccggcctgctgacttctag

SEQ ID NO: 43322 - DNA, 1335 bp, Artificial Sequence
  derived and/or modified sequence
atgtggcagatcgtgttcttcaccctgagctgcgacctggtgctggcagctgcctacaacaacttccgcaagtctatggattccatcgggaagaagcagtaccaggttcagcacgggagttgcagctacacatttttgctcccggagatggataattgccgctccagcagttccccctacgtgtctaatgcagtacaaagggacgcgccccttgagtacgacgacagcgtccagaggttgcaggtgctggagaacatcatggaaaacaacactcaatggctgatgaaggtgcttaaccagactactcgactggaattacagctgctggaacacagcctgagtaccaacaaacttgagaaacaaatcctggatcagacgtcagaaattaacaaactacaagacaagaacagtttcctggagaagaaggtcttggccatggaggataagcacattatacaactccagtccatcaaggaagaaaaagatcagctgcaggtgctggtctcaaagcagaattccatcatcgaggaactggaaaagaagattgtcaccgctaccgtgaataacagcgtgctccaaaagcagcaacatgatttgatggagaccgtcaataatctgctgacgatgatgtctacttctaattctgcaaaggaccctacggtggcaaaggaggagcaaatctccttcagggactgcgcagaggtgtttaaaagtggacacacaacaaatgggatctacaccctgacatttcccaactccacggaggaaattaaagcgtactgtgacatggaggcgggggggggtggatggaccatcatccagaggcgggaagatggtagcgttgattttcaaaggacatggaaggagtataaggtggggttcggcaacccaagcggcgagtactggttggggaatgagttcgtgtctcagctgaccaatcagcagcgatacgtcctgaaaatccatctgaaggattgggagggtaatgaggcctactcactttatgagcacttctacctctcatctgaggaattgaactatcgaattcaccttaaagggctcaccggtactgcgggcaaaatcagcagcatcagtcaacccggcaatgacttctcaacgaaagacggggacaacgacaaatgcatttgcaagtgttcgcaaatgctgaccggaggctggtggttcgatgcatgcgggccttctaatctcaacggcatgtactaccctcagagacagaatactaataaatttaatggaatcaagtggtactattggaaaggatcaggatactccttgaaggctacaactatgatgatccggccggccgacttttag

SEQ ID NO: 43323 - DNA, 1335 bp, Artificial Sequence
  derived and/or modified sequence
atgtggcagatcgtgtttttcacgctgtcttgcgacctggtgctggccgcagcctataataacttccggaagtcaatggatagcattggcaaaaaacaatatcaggttcagcacggaagttgctcctacaccttcttgctcccagaaatggataactgcagaagctctagctctccgtatgtctccaacgccgttcagcgagacgcacccctcgagtatgacgatagcgtccagaggctgcaagtgctggaaaatataatggaaaacaacacacagtggcttatgaaagtgcttaatcaaacgacgcgactcgaattgcagttactggagcatagtctctcgaccaacaaactggagaaacagatccttgatcagacgagcgaaattaataagctccaggacaaaaactctttccttgagaagaaggtgttagctatggaggataagcacatcatccagcttcagagcattaaggaggaaaaggaccagttgcaggtgcttgtgtcaaagcaaaattctatcattgaagaactcgagaagaagattgtgaccgccacagtgaacaactcagtcctgcagaaacagcagcatgacttaatggagactgtgaacaacttactaactatgatgagcacgagcaacagcgctaaggacccgacagtagccaaagaggaacagatctctttcagggactgtgctgaggtcttcaaaagtggccataccaccaacggaatatacacgctgacatttcctaacagcaccgaggagatcaaggcatattgcgacatggaggccggtggcggagggtggacaatcattcagagacgcgaggatggatcagtcgattttcagcggacctggaaggagtacaaagtcgggttcggcaacccgagtggtgagtattggttaggtaacgaattcgtgtcccagctgaccaaccagcagcgttacgttctgaagattcatttaaaagactgggaaggcaacgaggcctattctctttacgaacacttttaccttagcagtgaggagctcaactatcgcattcatctgaagggactaacaggcactgctggtaagattagttccatttcccagcccggtaacgacttttctaccaaagacggcgacaacgataagtgtatttgtaagtgttcccagatgttgacgggcggatggtggttcgacgcttgtggacctagcaatctgaatgggatgtactatcctcaacgccagaataccaacaaatttaacgggattaagtggtactattggaagggatctgggtacagtttgaaagcaaccaccatgatgatacgtccagccgacttctag

SEQ ID NO: 43324 - DNA, 1466 bp, Artificial Sequence
  derived and/or modified sequence
ccagccatggcagcgtagcagccctgcgttttagacggcagcagctcgggactctggacgtgtgtttgccctcaagtttgctaagctgctggtttattactgaagaaagaatgtggcagattgttttctttactctgagctgtgatcttgtcttggccgcagcctataacaactttcggaagagcatggacagcataggaaagaagcaatatcaggtccagcatgggtcctgcagctacactttcctcctgccagagatggacaactgccgctcttcctccagcccctacgtgtccaatgctgtgcagagggacgcgccgctcgaatacgatgactcggtgcagaggctgcaagtgctggagaacatcatggaaaacaacactcagtggctaatgaaggtattaaatcagaccacgagacttgaacttcagctcttggaacactccctctcgacaaacaaattggaaaaacagattttggaccagaccagtgaaataaacaaattgcaagataagaacagtttcctagaaaagaaggtgctagctatggaagacaagcacatcatccaactacagtcaataaaagaagagaaagatcagctacaggtgttagtatccaagcaaaattccatcattgaagaactagaaaaaaaaatagtgactgccacggtgaataattcagttcttcagaagcagcaacatgatctcatggagacagttaataacttactgactatgatgtccacatcaaactcagctaaggaccccactgttgctaaagaagaacaaatcagcttcagagactgtgctgaagtattcaaatcaggacacaccacgaatggcatctacacgttaacattccctaattctacagaagagatcaaggcctactgtgacatggaagctggaggaggcgggtggacaattattcagcgacgtgaggatggcagcgttgattttcagaggacttggaaagaatataaagtgggatttggtaacccttcaggagaatattggctgggaaatgagtttgtttcgcaactgactaatcagcaacgctatgtgcttaaaatacaccttaaagactgggaagggaatgaggcttactcattgtatgaacatttctatctctcaagtgaagaactcaattataggattcaccttaaaggacttacagggacagccggcaaaataagcagcatcagccaaccaggaaatgattttagcacaaaggatggagacaacgacaaatgtatttgcaaatgttcacaaatgctaacaggaggctggtggtttgatgcatgtggtccttccaacttgaacggaatgtactatccacagaggcagaacacaaataagttcaacggcattaaatggtactactggaaaggctcaggctattcgctcaaggccacaaccatgatgatccgaccagcagatttctaaacatcccagtccacctgagga

SEQ ID NO: 43325 - DNA, 1335 bp, Artificial Sequence
  derived and/or modified sequence
atgtggcagatcgtgttcttcaccctgagctgcgacctggtgctggccgccgcctacaacaacttcagaaagagcatggacagcatcggcaagaagcagtaccaggtgcagcacggcagctgcagctacaccttcctgctgcccgagatggacaactgcagaagcagcagcagcccctacgtgagcaacgccgtgcagagagacgcccccctggagtacgacgacagcgtgcagagactgcaggtgctggagaacatcatggagaacaacacccagtggctgatgaaggtgctgaaccagaccaccagactggagctgcagctgctggagcacagcctgagcaccaacaagctggagaagcagatcctggaccagaccagcgagatcaacaagctgcaggacaagaacagcttcctggagaagaaggtgctggccatggaggacaagcacatcatccagctgcagagcatcaaggaggagaaggaccagctgcaggtgctggtgagcaagcagaacagcatcatcgaggagctggagaagaagatcgtgaccgccaccgtgaacaacagcgtgctgcagaagcagcagcacgacctgatggagaccgtgaacaacctgctgaccatgatgagcaccagcaacagcgccaaggaccccaccgtggccaaggaggagcagatcagcttcagagactgcgccgaggtgttcaagagcggccacaccaccaacggcatctacaccctgaccttccccaacagcaccgaggagatcaaggcctactgcgacatggaggccggcggcggcggctggaccatcatccagagaagagaggacggcagcgtggacttccagagaacctggaaggagtacaaggtgggcttcggcaaccccagcggcgagtactggctgggcaacgagttcgtgagccagctgaccaaccagcagagatacgtgctgaagatccacctgaaggactgggagggcaacgaggcctacagcctgtacgagcacttctacctgagcagcgaggagctgaactacagaatccacctgaagggcctgaccggcaccgccggcaagatcagcagcatcagccagcccggcaacgacttcagcaccaaggacggcgacaacgacaagtgcatctgcaagtgcagccagatgctgaccggcggctggtggttcgacgcctgcggccccagcaacctgaacggcatgtactacccccagagacagaacaccaacaagttcaacggcatcaagtggtactactggaagggcagcggctacagcctgaaggccaccaccatgatgatcagacccgccgacttctag

SEQ ID NO: 43326 - protein, 437 aa, Artificial Sequence
  derived and/or modified sequence
MASVAVDPQPSVVTRVVNLPLVSSTYDLMSSAYLSTKDQYPYLKSVCEMAENGVKTITSVAMTSALPIIQKLEPQIAVANTYACKGLDRIEERLPILNQPSTQIVANAKGAVTGAKDAVTTTVTGAKDSVASTITGVMDKTKGAVTGSVEKTKSVVSGSINTVLGSRMMQLVSSGVENALTKSELLVEQYLPLTEEELEKEAKKVEGFDLVQKPSYYVRLGSLSTKLHSRAYQQALSRVKEAKQKSQQTISQLHSTVHLIEFARKNVYSANQKIQDAQDKLYLSWVEWKRSIGYDDTDESHCAEHIESRTLAIARNLTQQLQTTCHTLLSNIQGVPQNIQDQAKHMGVMAGDIYSVFRNAASFKEVSDSLLTSSKGQLQKMKESLDDVMDYLVNNTPLNWLVGPFYPQLTESQNAQDQGAEMDKSSQETQRSEHKTH

SEQ ID NO: 43327 - protein, 110 aa, Artificial Sequence
  derived and/or modified sequence
MASVAVDPQPSVVTRVVNLPLVSSTYDLMSSAYLSTKDQYPYLKSVCEMAENGVKTITSVAMTSALPIIQKLEPQIAVANTYACKGLDRIEERLPILNQPSTQVSLGQKC

SEQ ID NO: 43328 - protein, 126 aa, Artificial Sequence
  derived and/or modified sequence
MASVAVDPQPSVVTRVVNLPLVSSTYDLMSSAYLSTKDQYPYLKSVCEMAENGVKTITSVAMTSALPIIQKLEPQIAVANTYACKGLDRIEERLPILNQPSTQANTCFPNLDLDVCLKNNGHFLTS

SEQ ID NO: 43329 - protein, 356 aa, Artificial Sequence
  derived and/or modified sequence
MASVAVDPQPSVVTRVVNLPLVSSTYDLMSSAYLSTKDQYPYLKSVCEMAENGVKTITSVAMTSALPIIQKLEPQIAVANTYACKGLDRIEERLPILNQPSTQIVANAKGAVTGAKDAVTTTVTGAKDSVASTITGVMDKTKGAVTGSVEKTKSVKKKQKKLKDLIWFRSQLHSTVHLIEFARKNVYSANQKIQDAQDKLYLSWVEWKRSIGYDDTDESHCAEHIESRTLAIARNLTQQLQTTCHTLLSNIQGVPQNIQDQAKHMGVMAGDIYSVFRNAASFKEVSDSLLTSSKGQLQKMKESLDDVMDYLVNNTPLNWLVGPFYPQLTESQNAQDQGAEMDKSSQETQRSEHKTH

SEQ ID NO: 43330 - protein, 125 aa, Artificial Sequence
  derived and/or modified sequence
MASVAVDPQPSVVTRVVNLPLVSSTYDLMSSAYLSTKDQYPYLKSVCEMAENGVKTITSVAMTSALPIIQKLEPQIAVANTYACKGLDRIEERLPILNQPSTQIVANAKGAVTGAKDAVTTTVTG

SEQ ID NO: 43331 - DNA, 1314 bp, Artificial Sequence
  derived and/or modified sequence
atggcgagtgttgctgttgatccccagccatccgtagttactagggtggtcaatttgcctctggtctctagtacatatgacctgatgtcttctgcatacctcagcactaaggaccagtacccttatctcaaatctgtttgcgaaatggcagagaatggtgttaaaactatcacgagcgtagccatgacctccgctttgccaatcatacagaaactcgagccccaaatcgccgttgccaacacttacgcatgtaagggacttgatcgaattgaggaacgcttaccaattctcaatcagccctccacccagatagtggcgaatgccaagggcgcggtgacgggcgcaaaggacgcagtcaccactaccgtcacaggggcgaaagacagcgtggcgtccacaattacgggggtcatggataagactaagggggcagtgaccggcagtgtggaaaagacaaagtccgttgtttctgggtccatcaacactgtgcttggcagtaggatgatgcaactggtgtcctctggtgtggaaaacgcccttacaaagtcagaactgctcgttgagcagtacctgcccctcactgaggaagagctggagaaggaggccaagaaggtcgaggggttcgacctcgtccagaagcccagttactacgtgaggttggggagtctgtcaacaaagcttcacagccgtgcttatcaacaggctctatcccgagtaaaagaggctaagcagaagagccagcagaccatttcccaactgcattccacagtacaccttattgagttcgccaggaagaacgtgtactccgctaatcagaagattcaggatgcccaagacaagctgtacctgagttgggtcgaatggaaacgctccattgggtacgatgataccgacgaatcccactgcgctgagcatatcgaaagcagaacactggctatcgcccgtaatctgacacaacaacttcagacaacctgtcatacgttgctgtccaatatacagggggtcccacaaaatatccaggaccaggcaaaacatatgggggtgatggcgggtgatatttactcggtttttagaaatgcagcgtcatttaaggaagtcagcgatagtctcctgacctcttccaagggccagctccagaagatgaaagaaagcctggacgacgtaatggactacttggtcaataacactccgctgaactggctggtgggaccattttacccacagctgaccgagtctcaaaacgcccaggaccagggcgccgagatggataaatcaagtcaagagactcagcggagcgaacataagactcactag

SEQ ID NO: 43332 - DNA, 333 bp, Artificial Sequence
  derived and/or modified sequence
atggcatcggttgcagtcgacccacagcctagtgtcgttacccgcgtcgtaaacctaccattagtgagcagtacatacgatcttatgtccagcgcctatttgtccactaaggatcagtatccttatctgaagtctgtgtgcgagatggccgagaatggcgtaaaaacaataacatcagttgccatgacatccgccctgcccattatccagaagctggaacctcagattgccgtggcgaatacctacgcatgtaagggcttggaccgtattgaagagaggctgccaatcctgaatcagcccagcacacaggtgtctcttgggcaaaaatgctag

SEQ ID NO: 43333 - DNA, 381 bp, Artificial Sequence
  derived and/or modified sequence
atggccagcgtcgcagtggatccgcagccctcagtggtcacaagggttgtaaatctgcctttggtgagctccacttatgacctgatgtcctctgcctatctgtcaactaaagaccagtacccatacctcaaatccgtctgtgaaatggcagaaaatggtgttaaaactatcacatctgtggccatgacaagtgctctccctataatacaaaaactagaaccacagatcgccgtggcgaatacctatgcctgtaaggggctggatcgaattgaggaacgcctgccgattttaaaccagccgtcaacgcaggcgaatacgtgcttccccaatttggatctggacgtgtgcctgaaaaacaatggccactttctgaccagctag

SEQ ID NO: 43334 - DNA, 1071 bp, Artificial Sequence
  derived and/or modified sequence
atggcaagcgtggccgtggacccccagccctcggttgtgacaagggtagttaatctgccactggtgagttccacctatgacctcatgagctcagcctatctctcgacgaaagatcagtacccctatttgaaatccgtgtgcgagatggcagagaacggagtgaagacaatcacctcagtggctatgaccagcgccttaccaatcatccagaaactcgagccacagatcgcagtcgcaaatacgtacgcatgtaaggggttggatcgaatagaggagaggttgccaatactcaaccaacctagtactcagatcgtggctaacgctaaaggagctgtcaccggagccaaggatgcagtgacaaccacggtgaccggggccaaggactcggtcgctagcacaatcactggggtcatggacaaaaccaagggagccgtgacaggatcagtcgaaaaaacaaaaagtgtgaagaagaaacagaaaaagcttaaggatcttatctggtttcgctcccagcttcactccaccgttcacctaattgaatttgcgcgcaaaaatgtgtattcagccaaccaaaagatccaggacgcccaggataaactctacctgtcttgggtcgagtggaaaagatccattggctacgatgacacggacgaatcccactgtgccgaacatatcgagagtcgtacccttgcgattgcgcggaatcttacgcagcagttgcagacgacatgtcatacacttctgagtaatattcagggtgtgccccagaacatccaggatcaagctaagcatatgggagtaatggccggagacatctattccgtctttagaaacgctgccagtttcaaagaggtctcagattccctgctgacttccagtaaaggccaactgcaaaagatgaaggaaagcctcgacgatgttatggattaccttgttaataatacaccgttgaactggttggtagggccgttttacccacaactgaccgagagccagaacgcacaggaccagggcgccgagatggataaatcttcccaggaaactcaaaggtcggaacacaaaacacattag

SEQ ID NO: 43335 - DNA, 378 bp, Artificial Sequence
  derived and/or modified sequence
atggccagcgtggccgtggaccctcagcccagtgtggtgactcgcgtggttaatctacccctggtcagttcaacctatgacctgatgagcagtgcttaccttagcactaaagaccagtacccttacctgaaatctgtttgtgagatggcagagaatggcgttaagaccatcaccagtgtggctatgacctcagcccttcctatcattcagaaacttgaaccccaaatcgcggtggcaaacacgtacgcctgtaaaggccttgatcggattgaagagcggctaccaatccttaaccaaccatctacgcaaatcgtggctaatgctaagggcgcggtgaccggggcaaaggacgccgtcacaactacagttactggttag

SEQ ID NO: 43336 - DNA, 1314 bp, Artificial Sequence
  derived and/or modified sequence
atggcctctgtggccgtggacccccagcccagcgtggtgaccagggtggtgaacctgcccctggtgagcagcacctatgacctgatgagcagcgcctacctgagcaccaaggaccagtacccctacctgaagtctgtgtgtgagatggctgaaaatggagtgaagaccatcacctctgtggccatgaccagcgccctgcccatcatccagaagctggagccccagattgctgtggccaacacctacgcctgcaagggcctggaccgcatcgaggagcggctgcccatcctgaaccagcccagcacccagatcgtggccaatgccaagggagctgtgactggagccaaggatgctgtgaccaccaccgtgactggagccaaggacagcgtggccagcaccatcactggagtgatggacaagaccaagggagctgtgacaggctctgtggagaagaccaagtctgtggtgtctggcagcatcaacacagtgctgggcagcaggatgatgcagctggtgagcagcggcgtggagaatgccctgaccaagtctgagctgctggtggagcagtacctgcccctgacagaggaggagctggagaaggaggccaagaaggtggagggctttgacctggtgcagaagcccagctactacgtgcggctgggcagcctgagcaccaagctgcacagccgggcctaccagcaggccctgagccgggtgaaggaggccaagcagaagagccagcagaccatcagccagctgcacagcacagtgcacctgattgaatttgccaggaagaatgtgtacagcgccaaccagaagatccaggatgcccaggacaagctgtacctgtcctgggtggagtggaagaggagcatcggctatgatgacacagatgagagccactgtgccgagcacatcgagagcaggaccctggccatcgccaggaacctgacccagcagctgcagaccacctgccacaccctgctgagcaacatccagggcgtgccccagaacatccaggaccaggccaagcacatgggcgtgatggccggggacatctacagcgtcttcagaaatgctgccagcttcaaggaggtgtctgacagcctgctgaccagcagcaagggccagctgcagaagatgaaggagagcctggatgatgtgatggactacctggtgaacaacacccccctgaactggctggtgggccccttctacccccagctgacagagagccagaatgcccaggaccagggcgctgagatggacaagagcagccaggagacccagaggtctgagcacaagacccactag

SEQ ID NO: 43337 - DNA, 333 bp, Artificial Sequence
  derived and/or modified sequence
atggcctctgtggccgtggacccccagcccagcgtggtgaccagggtggtgaacctgcccctggtgagcagcacctatgacctgatgagcagcgcctacctgagcaccaaggaccagtacccctacctgaagtctgtgtgtgagatggctgaaaatggagtgaagaccatcacctctgtggccatgaccagcgccctgcccatcatccagaagctggagccccagattgctgtggccaacacctacgcctgcaagggcctggaccgcatcgaggagcggctgcccatcctgaaccagcccagcacccaggtgtccctgggccagaagtgctag

SEQ ID NO: 43338 - DNA, 381 bp, Artificial Sequence
  derived and/or modified sequence
atggcctctgtggccgtggacccccagcccagcgtggtgaccagggtggtgaacctgcccctggtgagcagcacctatgacctgatgagcagcgcctacctgagcaccaaggaccagtacccctacctgaagtctgtgtgtgagatggctgaaaatggagtgaagaccatcacctctgtggccatgaccagcgccctgcccatcatccagaagctggagccccagattgctgtggccaacacctacgcctgcaagggcctggaccgcatcgaggagcggctgcccatcctgaaccagcccagcacccaggccaacacctgcttccccaacctggacctggatgtgtgcctgaagaacaacggccacttcctgaccagctag

SEQ ID NO: 43339 - DNA, 1071 bp, Artificial Sequence
  derived and/or modified sequence
atggcctctgtggccgtggacccccagcccagcgtggtgaccagggtggtgaacctgcccctggtgagcagcacctatgacctgatgagcagcgcctacctgagcaccaaggaccagtacccctacctgaagtctgtgtgtgagatggctgaaaatggagtgaagaccatcacctctgtggccatgaccagcgccctgcccatcatccagaagctggagccccagattgctgtggccaacacctacgcctgcaagggcctggaccgcatcgaggagcggctgcccatcctgaaccagcccagcacccagatcgtggccaatgccaagggagctgtgactggagccaaggatgctgtgaccaccaccgtgactggagccaaggacagcgtggccagcaccatcactggagtgatggacaagaccaagggagctgtgacaggctctgtggagaagaccaagtctgtgaagaagaagcagaagaagctgaaggacctgatctggttccgcagccagctgcacagcacagtgcacctgattgaatttgccaggaagaatgtgtacagcgccaaccagaagatccaggatgcccaggacaagctgtacctgtcctgggtggagtggaagaggagcatcggctatgatgacacagatgagagccactgtgccgagcacatcgagagcaggaccctggccatcgccaggaacctgacccagcagctgcagaccacctgccacaccctgctgagcaacatccagggcgtgccccagaacatccaggaccaggccaagcacatgggcgtgatggccggggacatctacagcgtcttcagaaatgctgccagcttcaaggaggtgtctgacagcctgctgaccagcagcaagggccagctgcagaagatgaaggagagcctggatgatgtgatggactacctggtgaacaacacccccctgaactggctggtgggccccttctacccccagctgacagagagccagaatgcccaggaccagggcgctgagatggacaagagcagccaggagacccagaggtctgagcacaagacccactag

SEQ ID NO: 43340 - DNA, 378 bp, Artificial Sequence
  derived and/or modified sequence
atggcctctgtggccgtggacccccagcccagcgtggtgaccagggtggtgaacctgcccctggtgagcagcacctatgacctgatgagcagcgcctacctgagcaccaaggaccagtacccctacctgaagtctgtgtgtgagatggctgaaaatggagtgaagaccatcacctctgtggccatgaccagcgccctgcccatcatccagaagctggagccccagattgctgtggccaacacctacgcctgcaagggcctggaccgcatcgaggagcggctgcccatcctgaaccagcccagcacccagatcgtggccaatgccaagggagctgtgactggagccaaggatgctgtgaccaccaccgtgactggatag

SEQ ID NO: 43341 - DNA, 1314 bp, Artificial Sequence
  derived and/or modified sequence
atggccagcgtggccgtggacccccagcccagcgtggtgacccgggtggttaacctccctctggtaagctcaacatacgacctgatgagctcagcctacctgagcaccaaagaccagtatccatatctgaaaagcgtgtgcgaaatggccgagaatggcgtgaaaacaattacatccgtggccatgacatccgcccttcccatcatccagaagctggaaccacagatcgctgtggccaatacttacgcttgtaagggactcgacagaattgaggagagattgcccatcctgaaccagccatccacgcaaatcgttgcaaatgcaaagggtgctgtcaccggagcaaaggacgcagtcacgacgaccgtgacgggcgctaaagattccgtcgcctctacaatcactggagttatggacaagactaagggtgctgtgacagggagcgtggaaaagacaaaaagcgttgtctccggaagcataaatacagtgctcggcagccgaatgatgcaacttgtatctagcggcgtggagaacgcattaactaaatctgaactccttgtggagcagtacctcccattaacagaagaggaactagaaaaggaggccaaaaaggttgagggttttgatctggtgcagaagcctagctactacgtacggttgggaagcctgtccaccaaactacactccagagcttaccaacaggccctgagtcgcgttaaagaagccaagcagaagtctcagcagaccatctcccaattacattccacggtgcaccttattgaatttgccagaaaaaacgtctactccgctaatcagaaaatccaggatgctcaggacaaactttatctttcatgggtggaatggaaaagatctataggctacgatgacaccgatgaaagccattgtgctgagcatatcgagtcaaggaccctggcaattgctcggaaccttactcagcagttacagacaacctgccacaccctcttgagcaacattcagggtgtcccacagaacatccaggaccaggcgaaacacatgggcgtcatggcaggcgatatctactccgtgttcagaaacgcagcttccttcaaagaggtgtctgactcactcttaacatcctctaagggacaactccagaaaatgaaagagtcccttgacgacgtgatggattatttggtgaataacacccccctgaactggctcgtggggccattttatcctcaactcacagagtcgcagaacgctcaggatcagggagccgaaatggataaaagttctcaagagacccagaggtccgaacacaagacccactag

SEQ ID NO: 43342 - DNA, 333 bp, Artificial Sequence
  derived and/or modified sequence
atggccagcgtggccgtggacccccagcccagcgtggtgacccgggtagttaacctgcccctggtctctagcacgtatgacctgatgagctccgcttacctttctaccaaagaccagtatccctatctgaaaagcgtatgtgagatggctgagaacggtgtcaagacaattacttcggtcgccatgaccagtgccttgccaatcatccagaagctcgagcctcaaatcgcggtggccaacacatacgcatgtaaaggccttgaccggatcgaagaaaggcttcctattctaaaccagcccagtactcaggtttcattaggacaaaagtgctag

SEQ ID NO: 43343 - DNA, 381 bp, Artificial Sequence
  derived and/or modified sequence
atggccagcgtggccgtggacccccagcccagcgtggtgacccgggtcgtgaatcttcccttagtatcgtctacatacgatttgatgagttcagcttatctttctactaaggaccagtacccgtacttgaaatccgtgtgcgagatggccgagaacggagtgaagaccatcacttctgtcgcaatgaccagtgcgctgccgataattcagaagcttgagcctcaaatagccgttgcgaatacatacgcttgcaaaggattagacaggatagaagaaagactgcccattctcaaccagccgtcaacccaggctaatacctgctttcctaatctcgatcttgatgtatgtctgaagaataacggacacttcttgactagttag

SEQ ID NO: 43344 - DNA, 1071 bp, Artificial Sequence
  derived and/or modified sequence
atggccagcgtggccgtggacccccagcccagcgtggtgacccgggtcgtgaacttgcccctggtgtctagcacctatgacctaatgtcgtcagcgtacctctccactaaagaccagtacccctatctgaagtcagtctgcgaaatggccgaaaacggcgttaaaactatcactagcgtggctatgacaagcgccctgccgattatccagaaactggagccacaaattgccgttgcaaacacttacgcttgtaagggcctggatcgtattgaggaacgcctcccaatcctcaaccaaccgtccactcagatcgttgccaacgccaagggggccgtcacaggcgcaaaagacgcagtgactacgactgttacaggggccaaggattccgtagcctctaccattacaggcgtgatggataaaacaaagggagctgtgacgggtagtgtcgaaaaaacaaaaagcgtcaagaagaaacagaagaaattgaaggatctaatctggtttcgcagccagcttcactctactgtccacctcattgagttcgctcgcaagaatgtgtacagtgccaaccagaaaatccaggatgcgcaggacaagctgtacctgtcctgggtggagtggaagagaagcatcggttatgatgacactgacgagtcccactgtgccgagcacattgagagtcgcacgttagccatagccaggaatctgacgcagcagctgcagaccacctgtcacaccctgctgtcaaatatacaaggggtaccacagaatattcaggatcaagcaaagcacatgggcgtcatggctggcgacatctattctgtgtttcgcaatgcagcctcctttaaggaagtgtccgacagcttgctcacatcttctaaaggccagttgcaaaaaatgaaggagagcctggacgacgtaatggattacttggtgaacaataccccattaaattggcttgtgggcccgttttaccctcagctaacagaatctcagaatgcacaggaccagggggcagagatggacaagagtagtcaggagactcaacgatccgagcacaaaacccactag

SEQ ID NO: 43345 - DNA, 378 bp, Artificial Sequence
  derived and/or modified sequence
atggccagcgtggccgtggacccccagcccagcgtggtgacccgggttgtcaacctcccattagtctcgtccacatacgacctgatgtcatctgcctacctatccactaaagatcaatacccatacctgaagagtgtgtgtgagatggccgagaacggggttaaaactatcacttctgtggctatgacctccgcgttacctataatccaaaaattagaaccgcagatagccgtggcaaacacttatgcctgtaagggactggacaggattgaggagaggctgccaatcctaaaccaaccgagtacccagatcgttgcaaacgccaagggggccgtgactggagcaaaggacgctgttaccacgaccgtaactggatag

SEQ ID NO: 43346 - DNA, 1972 bp, Artificial Sequence
  derived and/or modified sequence
cgtgctgccgcgggtcacgtgctgcggaggcttggggaggggcggcgaggcggggtttatagcccgggcgcccgcgggccccacgctttgaccgggtcgtggcagccggagtcgtcttcgggacgcgcctgctcttcgcctttcgctgcagtccgtcgatttctttctccaggaagaaaaatggcatccgttgcagttgatccacaaccgagtgtggtgactcgggtggtcaacctgcccttggtgagctccacgtatgacctcatgtcctcagcctatctcagtacaaaggaccagtatccctacctgaagtctgtgtgtgagatggcagagaacggtgtgaagaccatcacctccgtggccatgaccagtgctctgcccatcatccagaagctagagccgcaaattgcagttgccaatacctatgcctgtaaggggctagacaggattgaggagagactgcctattctgaatcagccatcaactcagattgttgccaatgccaaaggcgctgtgactggggcaaaagatgctgtgacgactactgtgactggggccaaggattctgtggccagcacgatcacaggggtgatggacaagaccaaaggggcagtgactggcagtgtggagaagaccaagtctgtggtcagtggcagcattaacacagtcttggggagtcggatgatgcagctcgtgagcagtggcgtagaaaatgcactcaccaaatcagagctgttggtagaacagtacctccctctcactgaggaagaactagaaaaagaagcaaaaaaagttgaaggatttgatctggttcagaagccaagttattatgttagactgggatccctgtctaccaagcttcactcccgtgcctaccagcaggctctcagcagggttaaagaagctaagcaaaaaagccaacagaccatttctcagctccattctactgttcacctgattgaatttgccaggaagaatgtgtatagtgccaatcagaaaattcaggatgctcaggataagctctacctctcatgggtagagtggaaaaggagcattggatatgatgatactgatgagtcccactgtgctgagcacattgagtcacgtactcttgcaattgcccgcaacctgactcagcagctccagaccacgtgccacaccctcctgtccaacatccaaggtgtaccacagaacatccaagatcaagccaagcacatgggggtgatggcaggcgacatctactcagtgttccgcaatgctgcctcctttaaagaagtgtctgacagcctcctcacttctagcaaggggcagctgcagaaaatgaaggaatctttagatgacgtgatggattatcttgttaacaacacgcccctcaactggctggtaggtcccttttatcctcagctgactgagtctcagaatgctcaggaccaaggtgcagagatggacaagagcagccaggagacccagcgatctgagcataaaactcattaaacctgcccctatcactagtgcatgctgtggccagacagatgacaccttttgttatgttgaaattaacttgctaggcaaccctaaattgggaagcaagtagctagtataaaggccctcaattgtagttgtttccagctgaattaagagctttaaagtttctggcattagcagatgatttctgttcacctggtaagaaaagaatgataggcttgtcagagcctatagccagaactcagaaaaaattcaaatgcacttatgttctcattctatggccattgtgttgcctctgttactgtttgtattgaataaaaacatcttcatgtgggctggggtagaaactggtgtctgctctggtgtgatctgaaaaggcgtcttcactgctttatctcatgatgcttgcttgtaaaacttgattttagtttttcatttctcaaataggaatactacctttgaattcaataaaattcactgcaggata

SEQ ID NO: 43347 - DNA, 655 bp, Artificial Sequence
  derived and/or modified sequence
tttgaccgggtcgtggcagccggagtcgtcttcgggacgcgcctgctcttcgcctttcgctgcagtccgtcgatttctttctccaggaagaaaaatggcatccgttgcagttgatccacaaccgagtgtggtgactcgggtggtcaacctgcccttggtgagctccacgtatgacctcatgtcctcagcctatctcagtacaaaggaccagtatccctacctgaagtctgtgtgtgagatggcagagaacggtgtgaagaccatcacctccgtggccatgaccagtgctctgcccatcatccagaagctagagccgcaaattgcagttgccaatacctatgcctgtaaggggctagacaggattgaggagagactgcctattctgaatcagccatcaactcaggtgagcttgggacaaaagtgctgagacttgacacttcacatgttttcatcttctatctgttaaaacaagctgtacatatcacaaacaggcaaatacttgttttcccaacctggatctggatgtatgtttgaaaaataatggccacttccttacttcctgaactgttgtcaagttgtatctacgaagcagagaagaactagcctcctttggattagaaaacttttagtgtgttgtctatcagtttgtgtcttt

SEQ ID NO: 43348 - DNA, 631 bp, Artificial Sequence
  derived and/or modified sequence
ggcagccggagtcgtcttcgggacgcgcctgctcttcgcctttcgctgcagtccgtcgatttctttctccaggaagaaaaatggcatccgttgcagttgatccacaaccgagtgtggtgactcgggtggtcaacctgcccttggtgagctccacgtatgacctcatgtcctcagcctatctcagtacaaaggaccagtatccctacctgaagtctgtgtgtgagatggcagagaacggtgtgaagaccatcacctccgtggccatgaccagtgctctgcccatcatccagaagctagagccgcaaattgcagttgccaatacctatgcctgtaaggggctagacaggattgaggagagactgcctattctgaatcagccatcaactcaggcaaatacttgttttcccaacctggatctggatgtatgtttgaaaaataatggccacttccttacttcctgaactgttgtcaagttgtatctacgaagcagagaagaactagcctcctttggattagaaaacttttagtgtgttgtctatcagtttgtgtctttgctcctataaatgaaattgctgtctcaagtaactgattgtcttgtggtattaaataaatgcagacgtgatatatataa

SEQ ID NO: 43349 - DNA, 1736 bp, Artificial Sequence
  derived and/or modified sequence
gtgctgccgcgggtcacgtgctgcggaggcttggggaggggcggcgaggcggggtttatagcccgggcgcccgcgggccccacgctttgaccgggtcgtggcagccggagtcgtcttcgggacgcgcctgctcttcgcctttcgctgcagtccgtcgatttctttctccaggaagaaaaatggcatccgttgcagttgatccacaaccgagtgtggtgactcgggtggtcaacctgcccttggtgagctccacgtatgacctcatgtcctcagcctatctcagtacaaaggaccagtatccctacctgaagtctgtgtgtgagatggcagagaacggtgtgaagaccatcacctccgtggccatgaccagtgctctgcccatcatccagaagctagagccgcaaattgcagttgccaatacctatgcctgtaaggggctagacaggattgaggagagactgcctattctgaatcagccatcaactcagattgttgccaatgccaaaggcgctgtgactggggcaaaagatgctgtgacgactactgtgactggggccaaggattctgtggccagcacgatcacaggggtgatggacaagaccaaaggggcagtgactggcagtgtggagaagaccaagtctgtgaaaaagaagcaaaaaaagttgaaggatttgatctggttcagaagccaactccattctactgttcacctgattgaatttgccaggaagaatgtgtatagtgccaatcagaaaattcaggatgctcaggataagctctacctctcatgggtagagtggaaaaggagcattggatatgatgatactgatgagtcccactgtgctgagcacattgagtcacgtactcttgcaattgcccgcaacctgactcagcagctccagaccacgtgccacaccctcctgtccaacatccaaggtgtaccacagaacatccaagatcaagccaagcacatgggggtgatggcaggcgacatctactcagtgttccgcaatgctgcctcctttaaagaagtgtctgacagcctcctcacttctagcaaggggcagctgcagaaaatgaaggaatctttagatgacgtgatggattatcttgttaacaacacgcccctcaactggctggtaggtcccttttatcctcagctgactgagtctcagaatgctcaggaccaaggtgcagagatggacaagagcagccaggagacccagcgatctgagcataaaactcattaaacctgcccctatcactagtgcatgctgtggccagacagatgacaccttttgttatgttgaaattaacttgctaggcaaccctaaattgggaagcaagtagctagtataaaggccctcaattgtagttgtttccagctgaattaagagctttaaagtttctggcattagcagatgatttctgttcacctggtaagaaaagaatgataggcttgtcagagcctatagccagaactcagaaaaaattcaaatgcacttatgttctcattctatggccattgtgttgcctctgttactgtttgtattgaataaaaacatcttcatgtgggctggggtagaaactggtgtctgctctggtgtgatctgaaaaggcgtcttcactgctttatctcatgatgcttgcttgtaaaacttgattttagtttttcatttctcaaataggaatactacctttgaattcaataaaattcactgcaggatagaccagtt

SEQ ID NO: 43350 - DNA, 623 bp, Artificial Sequence
  derived and/or modified sequence
cagaacgttttgtcagaacaattatggctttcttcctgaagtgtgcttggccggaaaagaaagcaggagacctcaagggctaataatctagcagtggctgacactgaaatgatgcatggaagaaaggctaccaagcaagggaggtggagagcagtttgaagcaactggggtaaagtccggagaagaagctggtgagaaagagacaggagccagatgctgaatgacgatttctttctccaggaagaaaaatggcatccgttgcagttgatccacaaccgagtgtggtgactcgggtggtcaacctgcccttggtgagctccacgtatgacctcatgtcctcagcctatctcagtacaaaggaccagtatccctacctgaagtctgtgtgtgagatggcagagaacggtgtgaagaccatcacctccgtggccatgaccagtgctctgcccatcatccagaagctagagccgcaaattgcagttgccaatacctatgcctgtaaggggctagacaggattgaggagagactgcctattctgaatcagccatcaactcagattgttgccaatgccaaaggcgctgtgactggggcaaaagatgctgtgacgactactgtgactggg

SEQ ID NO: 43351 - DNA, 1314 bp, Artificial Sequence
  derived and/or modified sequence
atggcctccgttgcagtagatccacagccaagtgtggtcacacgagttgtgaatctgcctcttgtgagctccacctatgacctgatgtcctcagcctatctgagtaccaaggaccagtacccctatctgaaatcagtgtgtgagatggcggagaatggcgtaaaaaccatcacgtcagtggccatgaccagcgcgctgcccatcatccagaaactggaaccgcagatcgccgtggctaatacctacgcatgtaaagggctggatagaatcgaagagcgactgcctatcctcaatcagccatctacccagatcgtggctaatgccaagggggcagtgacgggcgctaaagacgctgtgaccacaaccgttaccggggcaaaggattccgtagcttccacaattaccggggttatggataaaaccaaaggagccgtgaccggctctgttgaaaaaacaaaaagcgtcgtttctggcagcattaatacagtgcttggatctaggatgatgcagctcgtttcttccggcgtggaaaatgcgttgacaaaaagtgaacttctggtcgaacagtatctgccactcacagaagaagagctggaaaaggaagccaagaaggtggaaggatttgatctcgtgcaaaaacccagctactatgtgcggctgggctcattatctaccaagctgcactcaagagcgtatcagcaggccctcagccgtgttaaagaggcgaagcagaagagccagcagacgatttctcaactgcattctaccgtgcacctgattgaatttgccagaaagaacgtgtactccgccaatcaaaaaattcaggacgcacaggacaagttgtatctgtcttgggtggaatggaagaggagtataggttatgacgatacggatgaaagccattgtgcagaacacatcgaatccaggacccttgctattgcacgcaaccttactcagcagctccagaccacgtgtcataccttgctgtcaaacattcagggagtacctcagaatatccaggatcaggccaaacatatgggggttatggctggagatatttactcagtcttcagaaatgcggctagttttaaagaagtgtctgacagtttgttgacgtcaagcaagggccaactccagaagatgaaggagtcccttgatgatgttatggattatctggtgaacaatactcccctaaactggttggtagggcctttttaccctcagctgacagagagccagaacgcccaggatcaaggagccgaaatggataagtctagccaggaaacccaacggtcggagcataagacacattag

SEQ ID NO: 43352 - DNA, 333 bp, Artificial Sequence
  derived and/or modified sequence
atggcctccgttgctgtggatcctcagccttcagtagtgacacgcgttgtgaatcttccccttgtttccagcacctacgacctgatgtctagcgcctatctgtccacaaaagatcagtatccatatctgaaatccgtatgtgaaatggctgagaatggcgtcaaaaccattacctcggttgcgatgacttctgcgctgccgatcatccaaaagctggagccccagatagccgttgcgaatacgtacgcatgtaagggtctggatcgcatcgaagagcgcctccctatcctgaaccaaccatcaacccaagtttccctgggacagaagtgttag

SEQ ID NO: 43353 - DNA, 381 bp, Artificial Sequence
  derived and/or modified sequence
atggcaagtgtcgccgttgacccccagccctccgtcgttacccgcgtggtgaatcttcccttggtgtctagcacgtatgaccttatgtcttccgcgtatttgagcactaaggatcaatatccatatctgaaatcagtctgtgaaatggctgaaaatggagtgaaaacgattacctccgtcgccatgaccagtgccttgcctataatccaaaagctggagcctcagatcgccgtggcaaacacatatgcctgcaagggactggatcgaatcgaggaaaggcttccaatccttaatcagccaagcactcaggccaacacttgttttccaaatttggatctggacgtctgcctcaagaacaatggacacttcctgacaagttag

SEQ ID NO: 43354 - DNA, 1071 bp, Artificial Sequence
  derived and/or modified sequence
atggctagtgttgcggtggatcctcagccaagcgtggttacacgcgtggtgaatctccctttagtgtccagcacctacgatctaatgtcttctgcctacttgagcactaaggaccagtacccttatctaaaatcagtgtgtgaaatggccgagaatggtgttaaaacgattaccagcgtggctatgaccagcgctctgcccatcatccagaaactggagccccagatagcagtggccaatacgtacgcttgtaagggcctggaccgcattgaggaacgtcttcctatcttgaaccagccaagtacccagatcgtggcaaacgcgaaaggcgctgtcacaggtgcaaaggacgctgtgactacaacggtgacaggcgctaaggacagtgtcgcttcaacaataaccggtgtgatggataagaccaaaggcgctgtcaccggaagcgtcgaaaagacaaagagcgtcaagaaaaagcagaaaaagctgaaggacctgatctggttccggtcccaactgcactccacggtgcacctaattgagtttgcaagaaagaacgtgtattcagctaaccagaagattcaggatgcacaagacaaattatacttatcttgggtcgagtggaaaagaagcatcggttacgatgatacagatgagagccactgtgccgaacatattgaaagccggacattggccattgcacgtaatctcactcagcagcttcagaccacatgccacacgttactgagcaatatccagggcgtcccgcaaaacattcaggaccaagctaaacatatgggagtaatggccggagacatatactctgtcttcaggaacgctgctagcttcaaggaggtgtcggattcccttctaacctcatccaaaggccagcttcagaagatgaaggagtccctcgatgacgttatggattacctcgttaataatacgcccctaaactggctggtggggcctttctatccacaactcacagaatcccagaacgcccaggaccaaggcgcagagatggacaagtctagtcaggagacgcagcgcagcgagcataagacccattag

SEQ ID NO: 43355 - DNA, 378 bp, Artificial Sequence
  derived and/or modified sequence
atggcttcggtcgcagtggatccccagccctcagtggtaactagggtagtgaatctcccactcgtgagctccacctatgacctaatgtctagcgcatatctgtccaccaaggaccagtacccatacctgaagagcgtttgcgaaatggccgaaaacggcgtcaaaaccattacgtcggtggctatgacctccgccttgcctatcatacagaaactcgagcctcagatcgctgtcgccaatacatatgcctgtaagggtctggacagaatcgaagaacggctcccaattctaaatcaacccagcacacagatagttgctaatgctaagggtgccgtcaccggcgctaaagacgccgttaccacaactgtgaccgggtag

SEQ ID NO: 43356 - DNA, 1314 bp, Artificial Sequence
  derived and/or modified sequence
atggccagcgtggccgtggacccccagcccagcgtggtgaccagagtggtgaacctgcccctggtgagcagcacctacgacctgatgagcagcgcctacctgagcaccaaggaccagtacccctacctgaagagcgtgtgcgagatggccgagaacggcgtgaagaccatcaccagcgtggccatgaccagcgccctgcccatcatccagaagctggagccccagatcgccgtggccaacacctacgcctgcaagggcctggacagaatcgaggagagactgcccatcctgaaccagcccagcacccagatcgtggccaacgccaagggcgccgtgaccggcgccaaggacgccgtgaccaccaccgtgaccggcgccaaggacagcgtggccagcaccatcaccggcgtgatggacaagaccaagggcgccgtgaccggcagcgtggagaagaccaagagcgtggtgagcggcagcatcaacaccgtgctgggcagcagaatgatgcagctggtgagcagcggcgtggagaacgccctgaccaagagcgagctgctggtggagcagtacctgcccctgaccgaggaggagctggagaaggaggccaagaaggtggagggcttcgacctggtgcagaagcccagctactacgtgagactgggcagcctgagcaccaagctgcacagcagagcctaccagcaggccctgagcagagtgaaggaggccaagcagaagagccagcagaccatcagccagctgcacagcaccgtgcacctgatcgagttcgccagaaagaacgtgtacagcgccaaccagaagatccaggacgcccaggacaagctgtacctgagctgggtggagtggaagagaagcatcggctacgacgacaccgacgagagccactgcgccgagcacatcgagagcagaaccctggccatcgccagaaacctgacccagcagctgcagaccacctgccacaccctgctgagcaacatccagggcgtgccccagaacatccaggaccaggccaagcacatgggcgtgatggccggcgacatctacagcgtgttcagaaacgccgccagcttcaaggaggtgagcgacagcctgctgaccagcagcaagggccagctgcagaagatgaaggagagcctggacgacgtgatggactacctggtgaacaacacccccctgaactggctggtgggccccttctacccccagctgaccgagagccagaacgcccaggaccagggcgccgagatggacaagagcagccaggagacccagagaagcgagcacaagacccactag

SEQ ID NO: 43357 - DNA, 333 bp, Artificial Sequence
  derived and/or modified sequence
atggccagcgtggccgtggacccccagcccagcgtggtgaccagagtggtgaacctgcccctggtgagcagcacctacgacctgatgagcagcgcctacctgagcaccaaggaccagtacccctacctgaagagcgtgtgcgagatggccgagaacggcgtgaagaccatcaccagcgtggccatgaccagcgccctgcccatcatccagaagctggagccccagatcgccgtggccaacacctacgcctgcaagggcctggacagaatcgaggagagactgcccatcctgaaccagcccagcacccaggtgagcctgggccagaagtgctag

SEQ ID NO: 43358 - DNA, 381 bp, Artificial Sequence
  derived and/or modified sequence
atggccagcgtggccgtggacccccagcccagcgtggtgaccagagtggtgaacctgcccctggtgagcagcacctacgacctgatgagcagcgcctacctgagcaccaaggaccagtacccctacctgaagagcgtgtgcgagatggccgagaacggcgtgaagaccatcaccagcgtggccatgaccagcgccctgcccatcatccagaagctggagccccagatcgccgtggccaacacctacgcctgcaagggcctggacagaatcgaggagagactgcccatcctgaaccagcccagcacccaggccaacacctgcttccccaacctggacctggacgtgtgcctgaagaacaacggccacttcctgaccagctag

SEQ ID NO: 43359 - DNA, 1071 bp, Artificial Sequence
  derived and/or modified sequence
atggccagcgtggccgtggacccccagcccagcgtggtgaccagagtggtgaacctgcccctggtgagcagcacctacgacctgatgagcagcgcctacctgagcaccaaggaccagtacccctacctgaagagcgtgtgcgagatggccgagaacggcgtgaagaccatcaccagcgtggccatgaccagcgccctgcccatcatccagaagctggagccccagatcgccgtggccaacacctacgcctgcaagggcctggacagaatcgaggagagactgcccatcctgaaccagcccagcacccagatcgtggccaacgccaagggcgccgtgaccggcgccaaggacgccgtgaccaccaccgtgaccggcgccaaggacagcgtggccagcaccatcaccggcgtgatggacaagaccaagggcgccgtgaccggcagcgtggagaagaccaagagcgtgaagaagaagcagaagaagctgaaggacctgatctggttcagaagccagctgcacagcaccgtgcacctgatcgagttcgccagaaagaacgtgtacagcgccaaccagaagatccaggacgcccaggacaagctgtacctgagctgggtggagtggaagagaagcatcggctacgacgacaccgacgagagccactgcgccgagcacatcgagagcagaaccctggccatcgccagaaacctgacccagcagctgcagaccacctgccacaccctgctgagcaacatccagggcgtgccccagaacatccaggaccaggccaagcacatgggcgtgatggccggcgacatctacagcgtgttcagaaacgccgccagcttcaaggaggtgagcgacagcctgctgaccagcagcaagggccagctgcagaagatgaaggagagcctggacgacgtgatggactacctggtgaacaacacccccctgaactggctggtgggccccttctacccccagctgaccgagagccagaacgcccaggaccagggcgccgagatggacaagagcagccaggagacccagagaagcgagcacaagacccactag

SEQ ID NO: 43360 - DNA, 378 bp, Artificial Sequence
  derived and/or modified sequence
atggccagcgtggccgtggacccccagcccagcgtggtgaccagagtggtgaacctgcccctggtgagcagcacctacgacctgatgagcagcgcctacctgagcaccaaggaccagtacccctacctgaagagcgtgtgcgagatggccgagaacggcgtgaagaccatcaccagcgtggccatgaccagcgccctgcccatcatccagaagctggagccccagatcgccgtggccaacacctacgcctgcaagggcctggacagaatcgaggagagactgcccatcctgaaccagcccagcacccagatcgtggccaacgccaagggcgccgtgaccggcgccaaggacgccgtgaccaccaccgtgaccggctag

SEQ ID NO: 43361 - protein, 345 aa, Artificial Sequence
  derived and/or modified sequence
MTSVRENILFGMGNPLLDISAVVDKDFLDKYSLKPNDQILAEDKHKELFDELVKKFKVEYHAGGSTQNSIKVAQWMIQQPHKAATFFGCIGIDKFGEILKRKAAEAHVDAHYYEQNEQPTGTCAACITGDNRSLIANLAAANCYKKEKHLDLEKNWMLVEKARVCYIAGFFLTVSPESVLKVAHHASENNRIFTLNLSAPFISQFYKESLMKVMPYVDILFGNETEAATFAREQGFETKDIKEIAKKTQALPKMNSKRQRIVIFTQGRDDTIMATESEVTAFAVLDQDQKEIIDTNGAGDAFVGGFLSQLVSDKPLTECIRAGHYAASIIIRRTGCTFPEKPDFH

SEQ ID NO: 43362 - DNA, 1038 bp, Artificial Sequence
  derived and/or modified sequence
atgacaagtgtgagggagaatattctgttcggcatggggaacccccttctcgatatatctgctgtggtcgataaggatttcttagataaatacagcctcaagcccaatgaccaaattctcgccgaagacaaacacaaagaactcttcgatgagctggtcaaaaaattcaaagtagaataccatgccggcggctccacccaaaattcaatcaaagtcgctcaatggatgattcaacaacctcacaaggcggcaacctttttcggatgcattggtattgacaaattcggagagatcctgaaaagaaaggccgccgaggcccatgtggatgcgcattattacgaacagaatgagcagcctacaggaacctgcgcagcctgcatcactggcgataatcgcagtctcatcgctaatttagcggctgccaactgctacaagaaggaaaagcatctggacctagaaaaaaactggatgctcgttgagaaagccagggtgtgctacattgccggattttttctcacggtgtctcctgaatccgttctgaaggttgctcaccacgcttccgaaaacaaccgtatatttacgctgaacctgagcgccccatttatttcacaattttacaaggagagcctgatgaaagttatgccgtatgtcgacattttatttggtaatgagaccgaggctgccactttcgctcgggagcaaggtttcgaaaccaaagatatcaaggagatcgccaaaaaaactcaagcactgcccaagatgaacagtaagagacaacggatagtgatcttcacgcaagggcgagatgacacaattatggcaacggaaagtgaagtcactgcctttgccgtcctggatcaggatcagaaggagatcatcgacactaatggcgccggcgatgccttcgtgggaggttttctgtcgcagttagtaagtgacaaacccctcacggaatgcattagggcaggtcattatgctgcttcaatcattatcagacgcactggctgcactttccctgagaagccagacttccattag

SEQ ID NO: 43363 - DNA, 2083 bp, Artificial Sequence
  derived and/or modified sequence
cgccttccctccaatcagcacgccgggccggctagccaggggccgcccgcgcgcggggtgtgtgaggacgcgctcccagtcgctgagtgcctgagccgggaagcagttgctgtggtacctgctgctgcccgagcggacgtagagcatcggacgcgggcgccgtggcgctgggcaggagggcgaagccatgacgtcagtcagagaaaatattctctttggaatgggaaatcctctgcttgacatctctgctgtagtggacaaagatttccttgataagtattctctgaaaccaaatgaccaaatcttggctgaagacaaacacaaggaactgtttgatgaacttgtgaaaaaattcaaagtcgaatatcatgctggtggctctacccagaattcaattaaagtggctcagtggatgattcaacagccacacaaagcagcaacattttttggatgcattgggatagataaatttggggagatcctgaagagaaaagctgctgaagcccatgtggatgctcattactacgagcagaatgagcagccaacaggaacttgtgctgcatgcatcactggtgacaacaggtccctcatagctaatcttgctgctgccaattgttataaaaaggaaaaacatcttgatctggagaaaaactggatgttggtagaaaaagcaagagtttgttatatagcaggcttttttcttacagtttccccagagtcagtattaaaggtggctcaccatgcttctgaaaacaacaggattttcactttgaatctatctgcaccgtttattagccagttctacaaggaatcattgatgaaagttatgccttatgttgatatactttttggaaatgagacagaagctgccacttttgctagagagcaaggctttgagactaaagacattaaagagatagccaaaaagacacaagccctgccaaagatgaactcaaagaggcagcgaatcgtgatcttcacccaagggagagatgacactataatggctacagaaagtgaagtcactgcttttgctgtcttggatcaagaccagaaagaaattattgataccaatggagctggagatgcatttgttggaggttttctgtctcaactggtctctgacaagcctctgactgaatgtatccgtgctggccactatgcagcaagcatcataattagacggactggctgcacctttcctgagaagccagacttccactgatggaagagctgaaaacacaagcccaggagtgcagacactgccctaattgcttcctgagaattcccatattaataaagaagaaaattatctgccattttttcctactataataatgctgaatcttaatttagagggtacaagggtatggtaatgcttgtagaatctttattatctcaacaatctaaaaaatgatgtttatttccatagtttgatagtgccacttaaatgccaattaaacaagaatataacatttcaatagaaatttttatttcattttcaattactttgtaaattcgtgtgtatttagtacactgatttgtttttttacatttctgctttgaatgcagatgcaatttaatataatagattttttaatgaattaatcttaacatagtaatctttagctttttatacaaatatatttaatttaggagtatatgtgtgtctatacacacacatacataaatataccacatatacacctgatagtcaaataaggtacagaaattttatcttgtcaattatgccaaataatctctttaatgtgcactcaaacatgtaataaactttggataattaaataatgtgccaaatttaagttgtaccacaatattcaaatcatagtcttatggaactctgtaattggacacaaacaaaaacttgtcatataggaatttttttctgtcttttccctgtgtacagcaaactgaggaagaaagatcattatttaatactgggccctgaaatgacacccaatttgttaatggaattatgaagaacagcaatataatacactgaagaataacttagtatcagagaccaataaatcacttttttaaggatgacaaaatggtataa

SEQ ID NO: 43364 - DNA, 1038 bp, Artificial Sequence
  derived and/or modified sequence
atgacctctgtgcgggagaacatcctgtttggcatgggcaaccccctgctggacatctctgctgtggtggacaaggacttcctggacaagtacagcctgaagcccaatgaccagatcctggccgaggacaagcacaaggagctgtttgatgagctggtgaagaagttcaaggtggagtaccacgccggcggcagcacccagaacagcatcaaggtggcccagtggatgatccagcagccccacaaggccgccaccttcttcggctgcatcggcatcgacaagtttggagagatcctgaagaggaaggctgctgaggcccacgtggatgcccactactatgagcagaatgagcagcccaccggcacctgtgccgcctgcatcaccggggacaacagaagcctgattgccaacctggccgccgccaactgctacaagaaggagaagcacctggacctggagaagaactggatgctggtggagaaggcccgggtgtgctacatcgccggcttcttcctgactgtgtccccagagagcgtgctgaaggtggcccaccacgccagcgagaacaaccgcatcttcaccctgaacctgagcgcccccttcatcagccagttctacaaggagagcctgatgaaggtgatgccctacgtggacatcctgtttggaaatgaaacagaagctgccacctttgcccgggagcagggctttgagaccaaggacatcaaggagatcgccaagaagacccaggccctgcccaagatgaacagcaagaggcagagaattgtcatcttcacccagggcagagatgacaccatcatggccacagaaagtgaggtgacagcctttgctgtgctggaccaggaccagaaggagatcatcgacaccaacggggctggagatgcctttgtgggcggcttcctgagccagctggtgtctgacaagcccctgacagagtgcatccgggccggccactacgccgccagcatcatcatccggaggacaggctgcaccttccctgagaagccagacttccactag

SEQ ID NO: 43365 - DNA, 1038 bp, Artificial Sequence
  derived and/or modified sequence
atgaccagcgtgcgggagaacatcctgttcggcatgggcaaccccctactggacattagtgccgtggtggataaggatttcctggacaagtattctttaaagcctaacgatcagatattagctgaggataagcataaagagctgttcgacgagctagtgaagaagtttaaagtagagtatcatgcaggcggctctacacaaaactccatcaaagtggcccagtggatgattcaacagcctcataaggcagctacctttttcggatgcatcggaatcgacaagttcggagaaatcctgaaacggaaggccgcggaagcccatgttgatgcgcattactacgaacagaacgaacagcccactggaacgtgtgccgcctgtatcaccggtgataatcgtagcctgattgctaatctggccgctgctaattgttataagaaggagaaacatctggacctggagaagaactggatgttggtcgaaaaagccagagtgtgctatattgccggctttttcctaacggtgtccccagagagtgttctgaaggtggcacaccatgcctcagaaaacaatagaatttttacactgaatctttccgctccattcatctcacagttctataaagagtcattgatgaaggtcatgccctatgtggacattctgttcggaaatgagacggaggccgcgacattcgccagagaacaaggttttgaaacaaaggacatcaaggaaatcgccaagaagactcaggccttaccaaagatgaacagcaaacggcagaggatcgtgatttttactcaggggcgagacgacactatcatggcaaccgagtccgaggtgactgcctttgccgtgctcgatcaggatcagaaggagattattgatacgaatggggccggcgatgcctttgtcggcggctttctttcacagctggtgagcgacaaacctttgacagagtgcatcagggcgggtcattacgctgcatccatcatcattcgccgtactggttgcacttttcccgaaaagcctgactttcattag

SEQ ID NO: 43366 - DNA, 1038 bp, Artificial Sequence
  derived and/or modified sequence
atgacctcagtaagagagaatattctctttggcatgggtaatcccctgcttgacatctctgctgtagttgacaaggacttcctggacaagtatagcttaaagccaaatgaccagatactggcagaggacaaacacaaggaattgtttgatgagctcgtgaagaagttcaaggttgagtaccacgctgggggatctactcaaaactcaataaaagtcgcccaatggatgattcaacagccgcataaagcagcgacatttttcggctgtatcggaattgacaaatttggagagattttaaagagaaaagcagcagaggcccacgtggatgctcactattatgaacagaacgagcagcctaccgggacttgcgcggcatgcataacgggcgataacaggagcctcatagccaacttagctgccgctaactgctacaaaaaagaaaaacacctggatcttgagaaaaactggatgctcgtggaaaaagctcgagtgtgttacattgccggtttctttctgacggtcagcccagagagcgtgctcaaagtggcccatcacgcatcagagaataatcggatctttaccctcaacttatcagctcctttcatttctcagttctacaaggaatcccttatgaaagtgatgccctatgtcgacatactgtttgggaacgagaccgaggctgcgacttttgcacgggaacagggtttcgagactaaagatattaaagagatcgccaagaagacccaggccttacccaagatgaacagtaagaggcagcgcatcgttatctttacacagggtagggacgataccatcatggccaccgaaagcgaagtgactgcgtttgcagtgctggatcaggatcaaaaggagatcattgacacaaatggggctggcgatgccttcgttggcggatttcttagccagctggtctctgacaagccattgaccgagtgtatcagggctggccactatgccgctagtattatcatccgacggaccggttgtacttttcctgagaaacctgatttccactag

SEQ ID NO: 43367 - DNA, 1038 bp, Artificial Sequence
  derived and/or modified sequence
atgaccagcgtgagagagaacatcctgttcggcatgggcaaccccctgctggacatcagcgccgtggtggacaaggacttcctggacaagtacagcctgaagcccaacgaccagatcctggccgaggacaagcacaaggagctgttcgacgagctggtgaagaagttcaaggtggagtaccacgccggcggcagcacccagaacagcatcaaggtggcccagtggatgatccagcagccccacaaggccgccaccttcttcggctgcatcggcatcgacaagttcggcgagatcctgaagagaaaggccgccgaggcccacgtggacgcccactactacgagcagaacgagcagcccaccggcacctgcgccgcctgcatcaccggcgacaacagaagcctgatcgccaacctggccgccgccaactgctacaagaaggagaagcacctggacctggagaagaactggatgctggtggagaaggccagagtgtgctacatcgccggcttcttcctgaccgtgagccccgagagcgtgctgaaggtggcccaccacgccagcgagaacaacagaatcttcaccctgaacctgagcgcccccttcatcagccagttctacaaggagagcctgatgaaggtgatgccctacgtggacatcctgttcggcaacgagaccgaggccgccaccttcgccagagagcagggcttcgagaccaaggacatcaaggagatcgccaagaagacccaggccctgcccaagatgaacagcaagagacagagaatcgtgatcttcacccagggcagagacgacaccatcatggccaccgagagcgaggtgaccgccttcgccgtgctggaccaggaccagaaggagatcatcgacaccaacggcgccggcgacgccttcgtgggcggcttcctgagccagctggtgagcgacaagcccctgaccgagtgcatcagagccggccactacgccgccagcatcatcatcagaagaaccggctgcaccttccccgagaagcccgacttccactag

SEQ ID NO: 43368 - protein, 185 aa, Artificial Sequence
  derived and/or modified sequence
MKLVSVALMYLGSLAFLGADTARLDVASEFRKKWNKWALSRGKRELRMSSSYPTGLADVKAGPAQTLIRPQDMKGASRSPEDSSPDAARIRVKRYRQSMNNFQGLRSFGCRFGTCTVQKLAHQIYQFTDKDKDNVAPRSKISPQGYGRRRRRSLPEAGPGRTLVSSKPQAHGAPAPPSGSAPHFL

SEQ ID NO: 43369 - DNA, 558 bp, Artificial Sequence
  derived and/or modified sequence
atgaagctggtctctgtggctctcatgtaccttggtagcctagccttcctgggagctgatactgccagactagacgtcgccagcgaattccgcaagaaatggaacaagtgggctctctcccggggaaaacgtgagcttcggatgagctcctcatatccgactggcctcgcagacgtgaaggcaggaccggcacaaacgctcattcgcccccaggatatgaagggggcgtccaggagccccgaggatagcagccccgacgccgctcgcattagagtaaagagatacaggcagtctatgaataattttcaaggcctgagaagtttcgggtgcagattcggaacctgcaccgtgcagaagttggcccatcagatttaccaattcaccgacaaagataaggataatgttgcccctagatccaaaatctcaccccaagggtatggccgccgccgcagaagatcattaccagaggccggaccaggcagaacactcgtgtcctccaaacctcaggctcacggtgcaccagcacccccttctggttcagccccacactttctgtag

SEQ ID NO: 43370 - DNA, 558 bp, Artificial Sequence
  derived and/or modified sequence
atgaagctcgtatcagtagcactgatgtacctgggcagtttggcgtttcttggcgccgacaccgcacggctcgatgttgcctctgaatttagaaaaaagtggaataagtgggcgttgagtagaggcaagagggagctgcgtatgagttccagttaccctaccgggttggccgacgttaaagctggacccgctcagactctgatccgccctcaagacatgaaaggcgcctcgcggtcaccggaggactccagtcccgacgctgctcgaattcgggtcaaacggtatcggcagtctatgaataatttccaggggctgcgcagctttgggtgcagattcgggacgtgcacagtccaaaagctggctcaccagatttatcagttcacggataaagacaaagacaacgtcgctccccggtctaagataagcccccagggttatggacggaggagaagaagatcattgcccgaagccgggccaggccgaacactggtgtcttctaagccacaggcccacggggcaccggctcccccgagcggcagcgcgccacacttcctatag

SEQ ID NO: 43371 - DNA, 558 bp, Artificial Sequence
  derived and/or modified sequence
atgaagctggtgagcgtcgctctgatgtacctcggctctttggccttcttgggggcagataccgcccgcctcgacgtcgccagtgaattccgaaagaagtggaacaaatgggccctctcacgggggaagcgcgagcttcggatgagctcctcctatcctactggactcgcagatgtcaaggctgggcctgcccagaccttgatcagacctcaagatatgaagggggcgtccaggtcaccagaagacagctcacctgatgctgctcgcatccgggtgaagcgatacagacagtctatgaacaacttccagggcctgcggagtttcgggtgtcgctttgggacttgcaccgttcagaaacttgcgcaccagatatatcagtttacagacaaggataaagataacgtcgcccctcggtctaaaataagtccgcagggatatgggcgaagacggcgacgcagtctgccagaggctggccctggcagaaccttggtctcctccaagccacaggctcatggagctccagccccaccttcaggctccgcccctcatttcctatag

SEQ ID NO: 43372 - DNA, 558 bp, Artificial Sequence
  derived and/or modified sequence
atgaagctggtgtctgtggccctgatgtacctgggcagcctggccttcctgggcgctgacacagcccggctggatgtggccagcgagttcaggaagaagtggaacaagtgggccctgagccggggcaagcgggagctgaggatgagcagcagctaccccaccggcctggctgatgtgaaggccggccctgcccagaccctcatccggccccaggacatgaagggggccagccgcagccctgaggacagcagcccagatgctgcccgcatccgggtgaagcgctaccggcagagcatgaacaacttccagggcctgcggagctttggctgccgcttcggcacctgcaccgtgcagaagctggcccaccagatctaccagttcacagacaaggacaaggacaacgtggcccccaggagcaagatcagcccccagggctacggcagaagaagaagaagaagcctgcctgaggccggccctggccgcaccctggtgagcagcaagccccaggcccatggagccccagccccacccagcggcagcgccccccacttcctgtag

SEQ ID NO: 43373 - DNA, 558 bp, Artificial Sequence
  derived and/or modified sequence
atgaagctggtgagcgtggccctgatgtacctgggcagcctggccttcctgggcgcggatactgcccgcctggatgtagcttccgagttccggaaaaagtggaataagtgggccttgtccagaggaaagcgtgagttgaggatgtcgtcttcatacccgacaggtctggcagatgtcaaggccgggccggctcagactctgataaggccacaagacatgaaaggagcatcacgctcaccggaagattccagtcccgacgccgcgaggatcagggttaaacgttatcggcagagcatgaataattttcagggtctccgctctttcggctgccggtttgggacatgtacagttcaaaaactagcacaccaaatctaccaatttacagataaggacaaagataacgtcgccccacgaagcaagatctccccccaagggtacggacggagacggagaaggtctctccccgaggcaggccccggcagaacactggtgtcatccaaaccccaagctcacggggcgcccgctcccccctcaggctccgccccccactttctgtag

SEQ ID NO: 43374 - DNA, 558 bp, Artificial Sequence
  derived and/or modified sequence
atgaagctggtgagcgtggccctgatgtacctgggcagcctggccttcctgggcgcagacaccgcccgtctcgacgtcgcatcagagttccgcaaaaaatggaacaaatgggcactctctagagggaaaagagagctcagaatgtcttccagctatcctacagggctcgccgatgtgaaagccggacctgcacagacattgattagacctcaggacatgaaaggagcaagccgatctcccgaggattcaagtcccgacgccgccaggatccgagtgaaacggtatcggcagagcatgaacaactttcagggattgcggtcctttgggtgccgcttcgggacttgcacagtacagaaactcgcccaccagatctaccagtttaccgacaaggacaaggacaatgtggcccctaggtcgaaaatctcaccacaaggatacggacgccgccgtaggcgctcccttccagaggcaggccccggtcggacactggtgagctctaagcctcaggcgcacggggcacctgctccccccagcggttccgcaccccattttttatag

SEQ ID NO: 43375 - DNA, 558 bp, Artificial Sequence
  derived and/or modified sequence
atgaagctggtgagcgtggccctgatgtacctgggcagcctggccttcttgggggccgataccgccagactggacgttgcctctgagtttaggaaaaagtggaacaaatgggccctgtccagggggaagcgagagctaaggatgtcgagctcctatcccacaggcctggccgatgttaaggccggccctgcgcagacgctaatccgcccccaggatatgaaaggagcgagtagaagcccggaggactcatctcccgatgcggcccgaatccgggttaagaggtatagacagtccatgaataacttccagggactgaggtcattcggctgtaggtttggtacatgtaccgtgcagaaattagctcaccaaatctatcagttcacagacaaagataaggacaatgtagctccaaggagcaagatcagcccacaggggtacgggcgtcgcaggcgaagaagtttgccagaggcagggcccggtagaacattggtgagcagtaaacctcaagcccacggtgcaccagcgccacccagtggatctgccccccatttcctctag

SEQ ID NO: 43376 - DNA, 1885 bp, Artificial Sequence
  derived and/or modified sequence
atccgcgctgtcccttccgcgggctcttgctgttcttcgccaggaggctttgcactccgggccgcatgggtcctggataaggacctcaagaggttgtagtggcgccccttcgctccggcgtactgtctgaaccctgtgcccaaagagggctgtggcagttcctgcaccaaccgcctggagcccatacctaagccctctgggcacgagggacctcctctcccccgctcccccctccccccatcccaactccagccccaaaggaagcaatgcgcgcgtccgagagcaggagcgcgcgtggctgaggaaagaaagggaaggcaaccgggcagcccaggccccgccccgccgctcccccacccgtgcgcttataaagcacaggaaccagagctggccactcagtggtttcttggtgacactggatagaacagctcaagccttgccacttcgggcttctcactgcagctgggcttggacttcggagttttgccattgccagtgggacgtctgagactttctccttcaagtacttggcagatcactctcttagcagggtctgcgcttcgcagccgggatgaagctggtttccgtcgccctgatgtacctgggttcgctcgccttcctaggcgctgacaccgctcggttggatgtcgcgtcggagtttcgaaagaagtggaataagtgggctctgagtcgtgggaagagggaactgcggatgtccagcagctaccccaccgggctcgctgacgtgaaggccgggcctgcccagacccttattcggccccaggacatgaagggtgcctctcgaagccccgaagacagcagtccggatgccgcccgcatccgagtcaagcgctaccgccagagcatgaacaacttccagggcctccggagctttggctgccgcttcgggacgtgcacggtgcagaagctggcacaccagatctaccagttcacagataaggacaaggacaacgtcgcccccaggagcaagatcagcccccagggctacggccgccggcgccggcgctccctgcccgaggccggcccgggtcggactctggtgtcttctaagccacaagcacacggggctccagcccccccgagtggaagtgctccccactttctttaggatttaggcgcccatggtacaaggaatagtcgcgcaagcatcccgctggtgcctcccgggacgaaggacttcccgagcggtgtggggaccgggctctgacagccctgcggagaccctgagtccgggaggcaccgtccggcggcgagctctggctttgcaagggcccctccttctgggggcttcgcttccttagccttgctcaggtgcaagtgccccagggggcggggtgcagaagaatccgagtgtttgccaggcttaaggagaggagaaactgagaaatgaatgctgagacccccggagcaggggtctgagccacagccgtgctcgcccacaaactgatttctcacggcgtgtcaccccaccagggcgcaagcctcactattacttgaactttccaaaacctaaagaggaaaagtgcaatgcgtgttgtacatacagaggtaactatcaatatttaagtttgttgctgtcaagattttttttgtaacttcaaatatagagatatttttgtacgttatatattgtattaagggcattttaaaagcaattatattgtcctcccctattttaagacgtgaatgtctcagcgaggtgtaaagttgttcgccgcgtggaatgtgagtgtgtttgtgtgcatgaaagagaaagactgattacctcctgtgtggaagaaggaaacaccgagtctctgtataatctatttacataaaatgggtgatatgcgaacagcaaaccaataaactgtctcaatgctga

SEQ ID NO: 43377 - DNA, 867 bp, Artificial Sequence
  derived and/or modified sequence
ggtgacactggatagaacagctcaagccttgccacttcgggcttctcactgcagctgggcttggacttcggagttttgccattgccagtgggacgtctgagactttctccttcaagtacttggcagatcactctcttagcagggtctgcgcttcgcagccgggatgaagctggtttccgtcgccctgatgtacctgggttcgctcgccttcctaggcgctgacaccgctcggttggatgtcgcgtcggagtttcgaaagaagtggaataagtgggctctgagtcgtgggaagagggaactgcggatgtccagcagctaccccaccgggctcgctgacgtgaaggccgggcctgcccagacccttattcggccccaggacatgaagggtgcctctcgaagccccgaagacagcagtccggatgccgcccgcatccgagtcaagcgctaccgccagagcatgaacaacttccagggcctccggagctttggctgccgcttcgggacgtgcacggtgcagaagctggcacaccagatctaccagttcacagataaggacaaggacaacgtcgcccccaggagcaagatcagcccccagggctacggccgccggcgccggcgctccctgcccgaggccggcccgggtcggactctggtgtcttctaagccacaagcacacggggctccagcccccccgagtggaagtgctccccactttctttaggatttaggcaccgtccggcggcgagctctggctttgcaagggcccctccttctgggggcttcgcttccttagccttgctcaggtgcaagtgccccagggggcggggtgcagaagaatccgagtgtttgccaggcttaaggagagga

SEQ ID NO: 43378 - DNA, 1889 bp, Artificial Sequence
  derived and/or modified sequence
tcttggtgacactggatagaacagctcaagccttgccacttcgggcttctcactgcagctgggcttggacttcggagttttgccattgccagtgggacgtctgagactttctccttcaagtacttggcagatcactctcttagcaggtaggtgccgcagaccctgcgggttaagaggtggggtggggggcagtgcttgccaaggccctaaactgggagcgctgggtgaggggaacaacccactttggagggttctctgagagatagatacaccccatatcctgggcccagctcgtgcacacagctggaggtccagagacccagtcccctctgctccgtcagccaagttccaagaagttgagcagagaccctctgggagcctggcggggtgcagcggcctcccctgcggggcctgtcacccggccggcgcgtgcaaacgcctctggcgcctctctgcgcggagggagataagcgtctgagccagggaaagcgcgggctaaacccgcctcgccggggcccctgcccgccctccgtgccccgcccgggcggtgcagctggcccgggtgctcacgctcgactctctttcttcttttccagggtctgcgcttcgcagccgggatgaagctggtttccgtcgccctgatgtacctgggttcgctcgccttcctaggcgctgacaccgctcggttggatgtcgcgtcggagtttcgaaagaagtggaataagtgggctctgagtcgtgggaagagggaactgcggatgtccagcagctaccccaccgggctcgctgacgtgaaggccgggcctgcccagacccttattcggccccaggacatgaagggtgcctctcgaagccccgaagacagcagtccggatgccgcccgcatccgagtcaagcgctaccgccagagcatgaacaacttccagggcctccggagctttggctgccgcttcgggacgtgcacggtgcagaagctggcacaccagatctaccagttcacagataaggacaaggacaacgtcgcccccaggagcaagatcagcccccagggctacggccgccggcgccggcgctccctgcccgaggccggcccgggtcggactctggtgtcttctaagccacaagcacacggggctccagcccccccgagtggaagtgctccccactttctttaggatttaggcgcccatggtacaaggaatagtcgcgcaagcatcccgctggtgcctcccgggacgaaggacttcccgagcggtgtggggaccgggctctgacagccctgcggagaccctgagtccgggaggcaccgtccggcggcgagctctggctttgcaagggcccctccttctgggggcttcgcttccttagccttgctcaggtgcaagtgccccagggggcggggtgcagaagaatccgagtgtttgccaggcttaaggagaggagaaactgagaaatgaatgctgagacccccggagcaggggtctgagccacagccgtgctcgcccacaaactgatttctcacggcgtgtcaccccaccagggcgcaagcctcactattacttgaactttccaaaacctaaagaggaaaagtgcaatgcgtgttgtacatacagaggtaactatcaatatttaagtttgttgctgtcaagattttttttgtaacttcaaatatagagatatttttgtacgttatatattgtattaagggcattttaaaagcaattatattgtcctcccctattttaagacgtgaatgtctcagcgaggtgtaaagttgttcgccgcgtggaatgtgagtgtgtttgtgtgcatgaaagagaaagactgattacctcctgtgtggaagaaggaaacaccgagtctctgtataatctatttacataaaatgg

SEQ ID NO: 43379 - DNA, 558 bp, Artificial Sequence
  derived and/or modified sequence
atgaaactcgtgtctgtggccctgatgtatctaggttcactcgcttttttgggggctgatactgcacgcttggatgtcgcctctgaatttaggaagaagtggaataaatgggctctgagcagagggaaaagagagctcaggatgagctcaagctatccaactggactggccgatgtgaaagcgggacccgcacagaccctcatccgcccacaggatatgaagggagcgagccgttctccagaagacagctcaccagacgcagcccgaattagagtcaagagataccggcaatccatgaacaactttcagggactgcgctcctttggctgcagatttggaacctgcaccgtgcagaaacttgctcaccagatctaccagtttacggacaaggataaggataatgtggcgcctaggtctaagatctcacctcagggatacggccgacgtaggagacggagcctgcccgaggctggcccaggccgaaccctggtcagcagtaagccacaggctcacggcgctcctgcccctccttctgggagtgccccacatttcctgtag

SEQ ID NO: 43380 - DNA, 558 bp, Artificial Sequence
  derived and/or modified sequence
atgaagttggtgtcagtcgccttaatgtacctggggtctctggctttcttaggtgcagacacagcacgattggacgttgccagtgagttcagaaaaaaatggaacaaatgggctctgagcagggggaagagagaactgcgtatgtctagctcttaccctactggattagctgacgtcaaagccggacccgcacaaacccttattcgcccacaagacatgaagggggcatctagatccccagaggattctagtcccgacgccgcacggatccgggtcaaaagataccgacagtctatgaacaattttcagggattaaggtcgttcggttgccggtttggcacatgcaccgtccagaagctggcacaccagatatatcagttcactgacaaggacaaagacaacgtagctcctcggagtaagatctccccccaaggatatggtaggagaaggaggcgaagtctcccagaggcaggtcccggaagaacactggtttcttctaaacctcaggctcatggcgctcctgccccaccctctggctccgctcctcatttcctgtag

SEQ ID NO: 43381 - DNA, 558 bp, Artificial Sequence
  derived and/or modified sequence
atgaaactggtgtctgtggccctaatgtatctgggcagcctagccttcttgggggctgacaccgcaagattagacgtggctagtgagttccgcaaaaaatggaacaagtgggctctgtctaggggaaagagagaattacgaatgagttcatcctaccccaccggcctggcggatgtgaaggccggaccggcacagaccttgatccgacctcaagatatgaagggcgcaagtcggtcccctgaggactcatcccccgacgccgctcggatcagggtcaaacgctatcgccagtccatgaataattttcaggggttacgctcttttggctgccgttttggcacctgtacggttcagaaattagctcaccagatctaccagtttacagacaaagataaagacaatgttgccccacggtctaaaattagcccacaaggctatggacgaagaaggcggaggtctctgcccgaagccggtccaggcaggactctggtgtctagcaagccgcaggcacatggcgcaccagccccaccctctggtagcgcccctcactttttgtag

SEQ ID NO: 43382 - DNA, 558 bp, Artificial Sequence
  derived and/or modified sequence
atgaagctggtgagcgtggccctgatgtacctgggcagcctggccttcctgggcgccgacaccgccagactggacgtggccagcgagttcagaaagaagtggaacaagtgggccctgagcagaggcaagagagagctgagaatgagcagcagctaccccaccggcctggccgacgtgaaggccggccccgcccagaccctgatcagaccccaggacatgaagggcgccagcagaagccccgaggacagcagccccgacgccgccagaatcagagtgaagagatacagacagagcatgaacaacttccagggcctgagaagcttcggctgcagattcggcacctgcaccgtgcagaagctggcccaccagatctaccagttcaccgacaaggacaaggacaacgtggcccccagaagcaagatcagcccccagggctacggcagaagaagaagaagaagcctgcccgaggccggccccggcagaaccctggtgagcagcaagccccaggcccacggcgcccccgccccccccagcggcagcgccccccacttcctgtag

SEQ ID NO: 43383 - protein, 411 aa, Artificial Sequence
  derived and/or modified sequence
MVCFRLFPVPGSGLVLVCLVLGAVRSYALELNLTDSENATCLYAKWQMNFTVRYETTNKTYKTVTISDHGTVTYNGSICGDDQNGPKIAVQFGPGFSWIANFTKAASTYSIDSVSFSYNTGDNTTFPDAEDKGILTVDELLAIRIPLNDLFRCNSLSTLEKNDVVQHYWDVLVQAFVQNGTVSTNEFLCDKDKTSTVAPTIHTTVPSPTTTPTPKEKPEAGTYSVNNGNDTCLLATMGLQLNITQDKVASVININPNTTHSTGSCRSHTALLRLNSSTIKYLDFVFAVKNENRFYLKEVNISMYLVNGSVFSIANNNLSYWDAPLGSSYMCNKEQTVSVSGAFQINTFDLRVQPFNVTQGKYSTAEECSADSDLNFLIPVAVGVALGFLIIVVFISYMIGRRKSRTGYQSV

SEQ ID NO: 43384 - protein, 300 aa, Artificial Sequence
  derived and/or modified sequence
MVCFRLFPVPGSGLVLVCLVLGILTVDELLAIRIPLNDLFRCNSLSTLEKNDVVQHYWDVLVQAFVQNGTVSTNEFLCDKDKTSTVAPTIHTTVPSPTTTPTPKEKPEAGTYSVNNGNDTCLLATMGLQLNITQDKVASVININPNTTHSTGSCRSHTALLRLNSSTIKYLDFVFAVKNENRFYLKEVNISMYLVNGSVFSIANNNLSYWDAPLGSSYMCNKEQTVSVSGAFQINTFDLRVQPFNVTQGKYSTAEECSADSDLNFLIPVAVGVALGFLIIVVFISYMIGRRKSRTGYQSV

SEQ ID NO: 43385 - DNA, 1236 bp, Artificial Sequence
  derived and/or modified sequence
atggtgtgttttagattgttcccagttcccggtagcggcctagttctggtttgtcttgtgctgggagcagtgcgtagctatgcgctggagctgaaccttaccgactcagagaacgccacttgtttatacgccaagtggcagatgaactttacggtgcgctatgaaactaccaacaaaacctacaaaacggtgaccatctctgatcacggcaccgtgacatacaatggtagcatctgtggagacgatcagaacggtccgaagattgctgtgcaatttggacccggcttctcatggatcgcaaattttaccaaagccgcctctacttattccatagatagcgtgagcttcagctacaatactggcgataatactacattcccagatgccgaggataagggtatcctgaccgtcgacgagctgcttgccatcaggattcctctcaacgacctgtttcggtgtaatagcttgagcacactggaaaagaatgatgttgtccagcactactgggatgtgctcgtgcaggcgttcgttcagaacggcaccgtatcaacaaatgagtttctgtgcgacaaggacaagaccagcactgtcgccccaacaatccacacgaccgttccctctcccactaccacacctaccccgaaagaaaagcctgaggccggtacctattcggtcaataatggaaacgacacatgtctgttggcaacgatgggacttcagctgaacattacccaggataaggtggcaagcgtgatcaatatcaaccccaacacaacccacagtaccgggtcctgtcgcagccacacagctctgctacgcctgaattcttccacaattaagtatctcgattttgtgtttgcagtgaaaaacgaaaataggttttacctgaaagaggtgaacatctctatgtatctggtgaacggctcagtcttttctatagcgaacaacaacttaagctattgggatgctccactggggtccagttatatgtgcaataaagagcagacagttagcgtaagcggggcctttcagattaacacgttcgacctcagagtgcagccgttcaacgttacccagggaaaatatagtacagctgaggaatgctcagcagactcagacctcaatttccttatacccgtggccgtaggggtggccctgggcttcttgatcattgtcgtgtttataagctacatgattgggcgccgaaaaagtcgcaccggttatcagagtgtctag

SEQ ID NO: 43386 - DNA, 903 bp, Artificial Sequence
  derived and/or modified sequence
atggtgtgcttccgcctgtttccagtccccggcagcggactcgtccttgtctgtcttgtcttgggcatcttgacagtggacgaacttttggccataagaatccctttgaacgatctgtttcgctgtaactcgctgagcaccttagagaaaaatgacgtggttcagcactattgggacgtgttggtgcaggctttcgtgcagaatggtactgtctctacgaatgaatttctgtgtgataaggacaagaccagtactgtggcacccacaatccacactactgtgcctagccccacaactaccccgacgcctaaggagaaacctgaggccggtacctatagtgtgaataacgggaatgatacctgtctcctggctactatggggctccagctgaatattactcaggacaaagtggcttccgtcattaacatcaacccgaacacaacacactccacagggagctgtaggtcacacacggccctgttgaggttaaactcctccaccattaaatacctagattttgtattcgcagtcaagaacgaaaaccggttctatcttaaagaagttaacatttccatgtatctagtgaacggatctgtcttttccatagcaaataataacttgtcctattgggacgctcccctggggagctcgtacatgtgcaacaaagagcagacagtctcagtgtctggcgcttttcagatcaataccttcgacttgcgggtgcagccctttaatgtgacccaaggaaagtactcaaccgctgaggagtgttccgcagatagcgacctcaactttctgatccccgtagccgtgggcgtggctctgggttttctcattatagtggttttcatctcctacatgatcggccgccgaaaatcgaggactggctaccagagcgtctag

SEQ ID NO: 43387 - DNA, 1236 bp, Artificial Sequence
  derived and/or modified sequence
atggtgtgcttccgcctcttccctgtgcccggcagcggcctggtgctggtgtgcctggtgctgggcgctgtgcgctcctatgccctggagctgaacctgacagacagtgaaaatgccacctgcctgtatgccaagtggcagatgaacttcaccgtgcgctatgagaccaccaacaagacctacaagacagtgaccatcagtgaccatggaacagtgacctacaacggcagcatctgtggagatgaccagaatggccccaagattgctgtgcagtttggacctggcttctcctggatcgccaacttcaccaaggccgccagcacctacagcattgattctgtgtccttctcctacaacacaggagacaacaccaccttcccagatgctgaggacaagggcatcctgactgtggatgagctgctggccatccgcatccccctgaatgacctcttccgctgcaacagcctgagcaccctggagaagaatgatgtggtgcagcactactgggatgtgctggtgcaggcctttgtgcagaatggaacagtgtccaccaatgagttcctgtgtgacaaggacaagaccagcacagtggcccccaccatccacaccaccgtgcccagccccaccaccacccccacccccaaggagaagccagaggccggcacctacagcgtgaacaatggaaatgacacctgcctgctggccaccatgggcctgcagctgaacatcacccaggacaaggtggccagcgtcatcaacatcaaccccaacaccacccacagcacaggcagctgccgcagccacacagccctgctgcggctgaacagcagcaccatcaagtacctggactttgtgtttgctgtgaagaatgaaaatcgcttctacctgaaggaggtgaacatctccatgtacctggtgaatggatctgtgttcagcatcgccaacaacaacctgagctactgggatgcccccctgggcagcagctacatgtgcaacaaggagcagacagtgtctgtgtctggggccttccagatcaacacctttgacctgcgggtgcagcccttcaacgtgacccagggcaagtacagcacagcagaagaatgttctgctgacagcgacctgaacttcctgatccctgtggccgtgggcgtggccctgggcttcctgatcatcgtggtgttcatctcctacatgattggaagaaggaagagcaggacaggctaccagagcgtgtag

SEQ ID NO: 43388 - DNA, 903 bp, Artificial Sequence
  derived and/or modified sequence
atggtgtgcttccgcctcttccctgtgcccggcagcggcctggtgctggtgtgcctggtgctgggcatcctgactgtggatgagctgctggccatccgcatccccctgaatgacctcttccgctgcaacagcctgagcaccctggagaagaatgatgtggtgcagcactactgggatgtgctggtgcaggcctttgtgcagaatggcaccgtgtccaccaatgagttcctgtgtgacaaggacaagaccagcacagtggcccccaccatccacaccaccgtgcccagccccaccaccacccccacccccaaggagaagccagaggccggcacctacagcgtgaacaatggaaatgacacctgcctgctggccaccatgggcctgcagctgaacatcacccaggacaaggtggccagcgtcatcaacatcaaccccaacaccacccacagcacaggcagctgccgcagccacacagccctgctgcggctgaacagcagcaccatcaagtacctggactttgtgtttgctgtgaagaatgaaaatcgcttctacctgaaggaggtgaacatctccatgtacctggtgaatggcagcgtcttcagcatcgccaacaacaacctgagctactgggatgcccccctgggcagcagctacatgtgcaacaaggagcagacagtgtctgtgtctggggccttccagatcaacacctttgacctgcgggtgcagcccttcaacgtgacccagggcaagtacagcacagctgaggagtgcagcgctgacagcgacctgaacttcctgatccctgtggccgtgggcgtggccctgggcttcctgatcatcgtggtgttcatctcctacatgattggccgcaggaagagcaggacaggctaccagagcgtgtag

SEQ ID NO: 43389 - DNA, 2089 bp, Artificial Sequence
  derived and/or modified sequence
gagattggctgtaagcaagaaagagccccgcccctagtcttatgactcgcactgaagcgccgattcctggcttttgcaaggctgtggtcggtggtcatcagtgctcttgacccaggtccagcgagccttttccctggtgttgcagctgttgttgtaccgccgccgtcgccgccgtcgccgcctgctctgcggggtcatggtgtgcttccgcctcttcccggttccgggctcagggctcgttctggtctgcctagtcctgggagctgtgcggtcttatgcattggaacttaatttgacagattcagaaaatgccacttgcctttatgcaaaatggcagatgaatttcacagtacgctatgaaactacaaataaaacttataaaactgtaaccatttcagaccatggcactgtgacatataatggaagcatttgtggggatgatcagaatggtcccaaaatagcagtgcagttcggacctggcttttcctggattgcgaattttaccaaggcagcatctacttattcaattgacagcgtctcattttcctacaacactggtgataacacaacatttcctgatgctgaagataaaggaattcttactgttgatgaacttttggccatcagaattccattgaatgacctttttagatgcaatagtttatcaactttggaaaagaatgatgttgtccaacactactgggatgttcttgtacaagcttttgtccaaaatggcacagtgagcacaaatgagttcctgtgtgataaagacaaaacttcaacagtggcacccaccatacacaccactgtgccatctcctactacaacacctactccaaaggaaaaaccagaagctggaacctattcagttaataatggcaatgatacttgtctgctggctaccatggggctgcagctgaacatcactcaggataaggttgcttcagttattaacatcaaccccaatacaactcactccacaggcagctgccgttctcacactgctctacttagactcaatagcagcaccattaagtatctagactttgtctttgctgtgaaaaatgaaaaccgattttatctgaaggaagtgaacatcagcatgtatttggttaatggctccgttttcagcattgcaaataacaatctcagctactgggatgcccccctgggaagttcttatatgtgcaacaaagagcagactgtttcagtgtctggagcatttcagataaatacctttgatctaagggttcagcctttcaatgtgacacaaggaaagtattctacagctgaagaatgttctgctgactctgacctcaactttcttattcctgttgcagtgggtgtggccttgggcttccttataattgttgtctttatctcttatatgattggaagaaggaaaagtcgtactggttatcagtctgtgtaatcagttaaatctagtgtttgtttgtttttttcaattagaagttacgtttccattggctaaaagccaggacatgctgtgcaatagattgtttaagatatgcagactaacttcagtgagttcctagctaacttgggcatgagtacacttatttaagacaaaatatattaggaccaatttttttctgttttttttcttcctttgttaaagtataattaaaagaaaaattgtggcttagaattttttaagtaaataatgattttaagcccctggatccaattatgaaagcatttttgctgatgtgtaattttatatgttacagttacttatattttactactttgatgttatttgcaaaatcaaaggtgttaaagaatttaacttgcttcaggaaataaattcaagaacatagtggattcattttcattggtggcagacacgaaatttggttcatgataagacttcctttccccacctcctgatcagcattatttaaatctgtatttttctgttagttaagaaagaaatggcttcatgatattgtatttaatagcaaaagtttggctgtcttcttcattactgttaatagctactatattttaacaaggagatttctttttttgttgttgttgttctagagtttggaatatactgattatc

SEQ ID NO: 43390 - DNA, 1433 bp, Artificial Sequence
  derived and/or modified sequence
gtcttatgactcgcactgaagcgccgattcctggcttttgcaaggctgtggtcggtggtcatcagtgctcttgacccaggtccagcgagccttttccctggtgttgcagctgttgttgtaccgccgccgtcgccgccgtcgccgcctgctctgcggggtcatggtgtgcttccgcctcttcccggttccgggctcagggctcgttctggtctgcctagtcctgggaattcttactgttgatgaacttttggccatcagaattccattgaatgacctttttagatgcaatagtttatcaactttggaaaagaatgatgttgtccaacactactgggatgttcttgtacaagcttttgtccaaaatggcacagtgagcacaaatgagttcctgtgtgataaagacaaaacttcaacagtggcacccaccatacacaccactgtgccatctcctactacaacacctactccaaaggaaaaaccagaagctggaacctattcagttaataatggcaatgatacttgtctgctggctaccatggggctgcagctgaacatcactcaggataaggttgcttcagttattaacatcaaccccaatacaactcactccacaggcagctgccgttctcacactgctctacttagactcaatagcagcaccattaagtatctagactttgtctttgctgtgaaaaatgaaaaccgattttatctgaaggaagtgaacatcagcatgtatttggttaatggctccgttttcagcattgcaaataacaatctcagctactgggatgcccccctgggaagttcttatatgtgcaacaaagagcagactgtttcagtgtctggagcatttcagataaatacctttgatctaagggttcagcctttcaatgtgacacaaggaaagtattctacagctgaagaatgttctgctgactctgacctcaactttcttattcctgttgcagtgggtgtggccttgggcttccttataattgttgtctttatctcttatatgattggaagaaggaaaagtcgtactggttatcagtctgtgtaatcagttaaatctagtgtttgtttgtttttttcaattagaagttacgtttccattggctaaaagccaggacatgctgtgcaatagattgtttaagatatgcagactaacttcagtgagttcctagctaacttgggcatgagtacacttatttaagacaaaatatattaggaccaatttttttctgttttttttcttcctttgttaaagtataattaaaagaaaaattgtggcttagaattttttaagtaaataatgattttaagcccctggatccaattatgaaagcatttttgctgatgtgtaattttatatgttacagttacttatattttactactttgatgttatttgcaaaatcaaaggtgttaaa

SEQ ID NO: 43391 - DNA, 1236 bp, Artificial Sequence
  derived and/or modified sequence
atggtgtgcttccggctgttccccgtgcccggcagcggcctggtgctggtgtgtttggttcttggtgccgtgaggtcttatgctctggagctcaatctgaccgactccgaaaatgccacgtgcctgtatgctaagtggcagatgaatttcacagtcaggtatgaaacgactaataagacctacaagaccgttacaattagtgaccatggaactgtgacttataatggctcaatttgcggcgatgaccagaacggtcccaaaattgcagtgcagtttggaccaggattttcttggattgcaaactttaccaaagccgcctccacatactctatagatagtgtgtctttcagctataataccggtgacaatacaacattcccagacgcagaggataagggtattctgacagtggacgaactgcttgccattaggatacctctcaacgacctattcagatgtaattctttgagcacactggagaagaacgacgtggtgcagcactattgggatgtcctggtccaggcttttgtacagaatggtaccgtctccacaaacgagtttctctgtgataaggataaaacctcaactgtggcacctacaatccacaccacagtcccgagtcccaccacaactcctactcccaaggaaaagccagaggccgggacatactcagtcaataacggaaacgatacatgtctgttggcaactatgggattacagctcaacatcacccaggacaaagtcgcatctgtgatcaatatcaatccaaacacaacgcactctacaggaagttgcaggagccacacagctctgttaaggctgaacagttccaccatcaagtaccttgatttcgtttttgccgtcaaaaacgaaaatcggttctatttgaaagaggtgaacatctctatgtacctggtgaatgggtccgtcttctccattgctaataataatttgtcatactgggacgcgcctcttggctcaagctatatgtgtaataaagagcagactgttagcgtctctggagcgttccagattaacaccttcgatttaagagtgcaaccctttaacgtcacacaggggaaatattctaccgctgaagaatgtagcgctgattctgatctgaacttcctaataccggtagcagtgggcgtcgctctcggatttttaatcatcgttgtctttatctcctacatgatcgggcgcagaaagtccaggactggctaccagagcgtgtag

SEQ ID NO: 43392 - DNA, 903 bp, Artificial Sequence
  derived and/or modified sequence
atggtgtgcttccggctgttccccgtgcccggcagcggcctggtgctcgtttgcctggtcctggggatattgaccgtggacgaactgctcgccataagaattccattaaacgatcttttccggtgtaattccctgagcacacttgagaagaatgacgtggtacagcactactgggatgttttagtccaggcatttgtgcagaacggaaccgtgtctaccaacgaatttctgtgcgacaaagataagacctctaccgtggcacccaccatccacaccaccgtgccttctcccactaccaccccaactccaaaagagaagcccgaggctgggacctattccgtaaacaatggtaatgatacctgtctgctggcaactatgggactccagctgaacatcactcaagataaagtcgcttccgtcattaacatcaatccaaacaccacccactccacagggagttgccgcagtcacaccgccctgctcagacttaactcctcaaccatcaagtatttagactttgtattcgctgtgaagaatgagaatcggttttatctgaaggaagtgaatatttcaatgtatctagtgaacggatcagtgttcagtatagctaataacaacctgagctactgggatgccccactggggtcttcttatatgtgtaataaggagcagactgtgtcagtgtctggagcttttcagattaacacatttgacctgagagtccagcctttcaatgttacacagggcaagtatagcaccgcagaggagtgttccgcagactccgacttgaacttcttgatcccagtggccgtgggagtggctctcggttttctgattattgtggtctttatatcttatatgattggccgccgaaagagtcggacgggctaccaaagcgtgtag

SEQ ID NO: 43393 - DNA, 1236 bp, Artificial Sequence
  derived and/or modified sequence
atggtctgcttccgtttgtttccagttcctgggtcagggcttgttttagtgtgcctggtcttaggtgcagtaagatcatacgccctggaactgaacctgactgattcagagaatgccacctgtctgtacgccaagtggcagatgaactttaccgtgcgatatgaaacaacaaacaaaacgtacaagaccgtgactatttccgatcacggaaccgtgacttataacggcagtatttgcggcgacgatcaaaacgggcctaaaattgccgtgcagtttggtcccggattcagctggatcgctaacttcacgaaagccgcatccacttatagcatcgattcagtctccttttcttacaatacaggggacaacacaacatttccagacgcagaagataaaggaattctgaccgttgacgaactcctggctatcagaatcccactgaatgacctgttcagatgcaattcactatctaccctagagaaaaacgatgtcgtgcagcattactgggacgtcctggtgcaggcttttgtccaaaacggcaccgtttccacaaacgagttcctctgcgataaggacaagacctcaacggtagctccaaccatacataccacagtaccttccccgaccaccacacccacacccaaagagaagccggaagcaggcacatactctgttaataatggaaacgacacctgcctgctagctacaatggggctacagcttaacattacccaggacaaagtggcttccgtgattaatattaatcccaacaccacccactccactggatcatgtcggagccacaccgcgctcctgagattaaatagttccactatcaaatatcttgactttgtgttcgccgttaagaacgagaatcgcttttacttgaaagaggtgaacatctccatgtacttggtgaatgggtccgtcttctctattgcaaacaacaacctctcctattgggacgcaccgctgggctcctcatacatgtgcaacaaggaacagaccgtctccgtttccggagcctttcagattaatacctttgacctccgcgtgcagccttttaatgtgacacaaggtaaatattccaccgccgaggagtgctcagcagacagcgatctgaactttttgatccccgttgcagttggggtggcactgggatttctaatcattgtggtctttatctcgtacatgattgggcgacggaaaagccgcacggggtaccaatcagtgtag

SEQ ID NO: 43394 - DNA, 903 bp, Artificial Sequence
  derived and/or modified sequence
atggtatgctttaggctgttccctgtgcctgggtctggtctggtccttgtctgcctcgtgttagggatcctgacggttgacgagctgctggctatcagaatcccactgaacgacttattcaggtgcaactccctttcaactctcgagaagaacgatgtggtccaacattactgggatgtactggtgcaggcctttgtccaaaatggcacggtctccaccaacgaattcttgtgcgataaggacaagacctcgaccgtcgctcccaccatccacacgactgtgccttccccaacaacaacccccacaccaaaagagaaaccggaggccggaacttactccgtgaacaatggaaacgatacctgcctgttggccacaatgggattacagctgaacattacccaggacaaggttgccagcgtaatcaacattaaccccaacactactcattctactggcagctgccggagccacaccgcactcctccgcctgaacagttcaactatcaaatacctcgatttcgtctttgccgtgaagaacgaaaatagattctatctcaaggaggtcaacatctcgatgtatttggtgaacgggtccgtattctctatagcgaataataacttaagctactgggacgcgccactgggttcctcgtatatgtgtaacaaagagcagaccgtctcagtgtccggggcattccagatcaatacttttgacctgcgggtgcagccattcaatgtgacgcagggcaagtactccacagctgaggagtgctcagcagactctgacctcaacttcctcatcccagttgccgtcggagtggcccttggtttcctgattattgtcgtcttcatctcttacatgatcggcaggcggaagtcccgaacaggctaccagtcagtctag

SEQ ID NO: 43395 - DNA, 1236 bp, Artificial Sequence
  derived and/or modified sequence
atggtgtgcttcagactgttccccgtgcccggcagcggcctggtgctggtgtgcctggtgctgggcgccgtgagaagctacgccctggagctgaacctgaccgacagcgagaacgccacctgcctgtacgccaagtggcagatgaacttcaccgtgagatacgagaccaccaacaagacctacaagaccgtgaccatcagcgaccacggcaccgtgacctacaacggcagcatctgcggcgacgaccagaacggccccaagatcgccgtgcagttcggccccggcttcagctggatcgccaacttcaccaaggccgccagcacctacagcatcgacagcgtgagcttcagctacaacaccggcgacaacaccaccttccccgacgccgaggacaagggcatcctgaccgtggacgagctgctggccatcagaatccccctgaacgacctgttcagatgcaacagcctgagcaccctggagaagaacgacgtggtgcagcactactgggacgtgctggtgcaggccttcgtgcagaacggcaccgtgagcaccaacgagttcctgtgcgacaaggacaagaccagcaccgtggcccccaccatccacaccaccgtgcccagccccaccaccacccccacccccaaggagaagcccgaggccggcacctacagcgtgaacaacggcaacgacacctgcctgctggccaccatgggcctgcagctgaacatcacccaggacaaggtggccagcgtgatcaacatcaaccccaacaccacccacagcaccggcagctgcagaagccacaccgccctgctgagactgaacagcagcaccatcaagtacctggacttcgtgttcgccgtgaagaacgagaacagattctacctgaaggaggtgaacatcagcatgtacctggtgaacggcagcgtgttcagcatcgccaacaacaacctgagctactgggacgcccccctgggcagcagctacatgtgcaacaaggagcagaccgtgagcgtgagcggcgccttccagatcaacaccttcgacctgagagtgcagcccttcaacgtgacccagggcaagtacagcaccgccgaggagtgcagcgccgacagcgacctgaacttcctgatccccgtggccgtgggcgtggccctgggcttcctgatcatcgtggtgttcatcagctacatgatcggcagaagaaagagcagaaccggctaccagagcgtgtag

SEQ ID NO: 43396 - DNA, 903 bp, Artificial Sequence
  derived and/or modified sequence
atggtgtgcttcagactgttccccgtgcccggcagcggcctggtgctggtgtgcctggtgctgggcatcctgaccgtggacgagctgctggccatcagaatccccctgaacgacctgttcagatgcaacagcctgagcaccctggagaagaacgacgtggtgcagcactactgggacgtgctggtgcaggccttcgtgcagaacggcaccgtgagcaccaacgagttcctgtgcgacaaggacaagaccagcaccgtggcccccaccatccacaccaccgtgcccagccccaccaccacccccacccccaaggagaagcccgaggccggcacctacagcgtgaacaacggcaacgacacctgcctgctggccaccatgggcctgcagctgaacatcacccaggacaaggtggccagcgtgatcaacatcaaccccaacaccacccacagcaccggcagctgcagaagccacaccgccctgctgagactgaacagcagcaccatcaagtacctggacttcgtgttcgccgtgaagaacgagaacagattctacctgaaggaggtgaacatcagcatgtacctggtgaacggcagcgtgttcagcatcgccaacaacaacctgagctactgggacgcccccctgggcagcagctacatgtgcaacaaggagcagaccgtgagcgtgagcggcgccttccagatcaacaccttcgacctgagagtgcagcccttcaacgtgacccagggcaagtacagcaccgccgaggagtgcagcgccgacagcgacctgaacttcctgatccccgtggccgtgggcgtggccctgggcttcctgatcatcgtggtgttcatcagctacatgatcggcagaagaaagagcagaaccggctaccagagcgtgtag

SEQ ID NO: 43397 - protein, 250 aa, Artificial Sequence
  derived and/or modified sequence
MRIPVDASTSRRFTPPSTALSPGKMSEALPLGAPDAGAALAGKLRSGDRSMVEVLADHPGELVRTDSPNFLCSVLPTHWRCNKTLPIAFKVVALGDVPDGTLVTVMAGNDENYSAELRNATAAMKNQVARFNDLRFVGRSGRGKSFTLTITVFTNPPQVATYHRAIKITVDGPREPRRHRQKLDDQTKPGSLSFSERLSELEQLRRTAMRVSPHHPAPTPNPRASLNHSTAFNPQPQSQMQEEDTAPWRC

SEQ ID NO: 43398 - DNA, 753 bp, Artificial Sequence
  derived and/or modified sequence
atgagaatccccgtggacgccagcaccagcagaagattcaccccccccagcaccgccctgagccccggcaagatgagcgaggccctgcccctgggcgcccccgacgccggcgccgccctggccggcaagctgagaagcggcgacagaagcatggtggaggtgctggccgaccaccccggcgagctggtgagaaccgacagccccaacttcctgtgcagcgtgctgcccacccactggagatgcaacaagaccctgcccatcgccttcaaggtggtggccctgggcgacgtgcccgacggcaccctggtgaccgtgatggccggcaacgacgagaactacagcgccgagctgagaaacgccaccgccgccatgaagaaccaggtggccagattcaacgacctgagattcgtgggcagaagcggcagaggcaagagcttcaccctgaccatcaccgtgttcaccaaccccccccaggtggccacctaccacagagccatcaagatcaccgtggacggccccagagagcccagaagacacagacagaagctggacgaccagaccaagcccggcagcctgagcttcagcgagagactgagcgagctggagcagctgagaagaaccgccatgagagtgagcccccaccaccccgcccccacccccaaccccagagccagcctgaaccacagcaccgccttcaacccccagccccagagccagatgcaggaggaggacaccgccccctggagatgctag

SEQ ID NO: 43399 - DNA, 753 bp, Artificial Sequence
  derived and/or modified sequence
atgcggatccctgtggacgcgagcacaagcaggcggtttacacccccttctaccgcactgtctccaggcaaaatgtctgaggccctgccattgggcgcccccgacgcaggagcggctctggccggtaaattaagatcaggcgatcgcagtatggtggaggtcctcgccgatcaccccggggagctcgtcaggacagactcgcccaactttctttgcagtgtcctgcctacgcattggcggtgcaacaaaacattacctatcgccttcaaagttgtagcccttggagacgtgccggacgggaccctggtaactgtgatggccggcaacgacgaaaactatagcgcggagcttcgcaatgcgaccgctgctatgaaaaaccaagtagccagattcaatgacttgcgcttcgttggtagatccggaagaggaaaatccttcactctcactataacagtgttcaccaatccgccgcaagttgcaacctatcatagggccattaaaattaccgtggatggtcctcgcgaacctcggcgccacagacaaaaattagatgatcaaaccaagcccggttccctcagtttcagtgaaagactatctgagctagagcagctacgtcggactgctatgcgtgtgtccccacaccatcctgcccccacccctaacccaagagcctcattaaatcacagcaccgcctttaatccccaaccacagtcacagatgcaagaggaagacacagcaccttggaggtgttag

SEQ ID NO: 43400 - DNA, 753 bp, Artificial Sequence
  derived and/or modified sequence
atgagaattcctgtggatgccagcaccagccgccgcttcaccccacccagcacagccctgagccctgggaagatgtctgaggccctgcccctgggcgccccagatgctggggccgccctggccggcaagctgcggagcggggaccgctccatggtggaggtgctggccgaccaccctggagagctggtgaggacagacagccccaacttcctgtgcagcgtgctgcccacccactggcgctgcaacaagaccctgcccatcgccttcaaggtggtggccctgggagatgtgcctgatggcaccctggtgacagtgatggctggaaatgatgagaactacagcgctgagctgagaaatgccacagctgccatgaagaaccaggtggcccgcttcaatgacctgcgctttgtgggccgcagcggccggggcaagagcttcaccctgaccatcaccgtcttcaccaaccccccccaggtggccacctaccaccgggccatcaagatcaccgtggatggcccccgggagcccaggaggcaccggcagaagctggatgaccagaccaagccaggcagcctgtccttcagcgagcggctgtctgagctggagcagctgcggaggacagccatgagggtgagcccccaccacccagcccccacccccaacccccgggccagcctgaaccacagcacagccttcaacccccagccccagagccagatgcaggaggaggacacagccccctggcgctgctag

SEQ ID NO: 43401 - DNA, 753 bp, Artificial Sequence
  derived and/or modified sequence
atgcggatccccgtggacgccagcaccagccggcggttcacccccccgtccacggcgctatcaccagggaaaatgagcgaggccttgccgctgggagcccctgatgctggtgcggccctggccggaaaacttagatctggggatcgctcgatggtggaagtgttggcagaccaccccggcgagctcgtgcggactgactcgcccaatttcttgtgctccgtgctgcctacccactggagatgcaataagaccctccctattgcatttaaggtggtagcgctgggggacgtgcccgatggcacactagtcacagttatggctggcaacgatgaaaattacagtgctgaactcaggaacgccacagccgcaatgaagaatcaggtggcccgcttcaacgacttgcgctttgttgggagatccggaagaggaaaatctttcaccctgaccatcaccgtgtttactaaccctccacaagtggccacttatcaccgggcaattaagataacagtggacggccccagggagccacgaaggcacaggcagaagctggacgaccagactaagcccggcagcctcagtttttctgaacggttgtctgaactcgaacagctgcgccgtacggctatgagagtctcacctcatcacccagcgcctacacccaaccctcgcgcatccttgaatcacagcaccgcttttaacccacagccccagtcccaaatgcaagaagaggatacagcaccttggcgctgctag

SEQ ID NO: 43402 - DNA, 753 bp, Artificial Sequence
  derived and/or modified sequence
atgcggattcctgtagacgccagtacctctagacgatttacgcccccttccacagctctctcccctgggaaaatgagcgaagccctgcctctcggggctcccgatgccggagctgctctggctggtaaactccgcagtggagacaggtctatggttgaagttctggccgaccatcctggcgagctcgttcgcaccgattctccaaacttcttgtgcagtgtgctgcctacacactggcggtgtaacaaaacactcccgatagcgttcaaggtggtggcactaggagatgttcctgacggaacattagtgacagttatggccggaaacgacgaaaactacagcgcagaattaaggaacgccacagccgctatgaagaaccaggttgctcgttttaacgacttgagattcgtcggaaggtctgggaggggaaagtcttttaccttgacaataactgtctttacgaatccacctcaagtcgctacctatcacagggctatcaaaatcactgtggatggaccgagagagcctcgcagacaccggcaaaagctggacgaccagacaaagccaggttcactttctttctccgaacgtctctccgagctggaacagctgaggaggaccgccatgagggtgtctcctcaccaccccgcacccacccccaaccctagagccagcctaaaccactccaccgcattcaaccctcagcctcagagccagatgcaagaagaggataccgctccgtggcgatgctag

SEQ ID NO: 43403 - DNA, 2720 bp, Artificial Sequence
  derived and/or modified sequence
catagagccagcgggcgcgggcgggacgggcgccccgcggccggacccagccagggcaccacgctgcccggccctgcgccgccaggcacttctttccggggctcctagggacgccagaaggaagtcaacctctgctgcttctccttggcctgcgttggaccttcctttttttgttgtttttttttgtttttcccctttcttccttttgaattaactggcttcttggctggatgttttcaacttctttcctggctgcgaacttttccccaattgttttccttttacaacagggggagaaagtgctctgtggtccgaggcgagccgtgaagttgcgtgtgcgtggcagtgtgcgtggcaggatgtgcgtgcgtgtgtaacccgagccgcccgatctgtttcgatctgcgccgcggagccctccctcaaggcccgctccacctgctgcggttacgcggcgctcgtgggtgttcgtgcctcggagcagctaaccggcgggtgctgggcgacggtggaggagtatcgtctcgctgctgcccgagtcagggctgagtcacccagctgatgtagacagtggctgccttccgaagagtgcgtgtttgcatgtgtgtgactctgcggctgctcaactcccaacaaaccagaggaccagccacaaacttaaccaacatccccaaacccgagttcacagatgtgggagagctgtagaaccctgagtgtcatcgactgggccttcttatgattgttgttttaagattagctgaagatctctgaaacgctgaattttctgcactgagcgttttgacagaattcattgagagaacagagaacatgacaagtacttctagctcagcactgctccaactactgaagctgattttcaaggctacttaaaaaaatctgcagcgtacattaatggatttctgttgtgtttaaattctccacagattgtattgtaaatattttatgaagtagagcatatgtatatatttatatatacgtgcacatacattagtagcactacctttggaagtctcagctcttgcttttcgggactgaagccagttttgcatgataaaagtggccttgttacgggagataattgtgttctgttgggactttagacaaaactcacctgcaaaaaactgacaggcattaactactggaacttccaaataatgtgtttgctgatcgttttactcttcgcataaatattttaggaagtgtatgagaattttgccttcaggaacttttctaacagccaaagacagaacttaacctctgcaagcaagattcgtggaagatagtctccactttttaatgcactaagcaatcggttgctaggagcccatcctgggtcagaggccgatccgcagaaccagaacgttttcccctcctggactgttagtaacttagtctccctcctcccctaaccacccccgcccccccccaccccccgcagtaataaaggcccctgaacgtgtatgttggtctcccgggagctgcttgctgaagatccgcgcccctgtcgccgtctggtaggagctgtttgcagggtcctaactcaatcggcttgttgtgatgcgtatccccgtagatgccagcacgagccgccgcttcacgccgccttccaccgcgctgagcccaggcaagatgagcgaggcgttgccgctgggcgccccggacgccggcgctgccctggccggcaagctgaggagcggcgaccgcagcatggtggaggtgctggccgaccacccgggcgagctggtgcgcaccgacagccccaacttcctctgctccgtgctgcctacgcactggcgctgcaacaagaccctgcccatcgctttcaaggtggtggccctaggggatgttccagatggcactctggtcactgtgatggctggcaatgatgaaaactactcggctgagctgagaaatgctaccgcagccatgaagaaccaggttgcaagatttaatgacctcaggtttgtcggtcgaagtggaagagggaaaagcttcactctgaccatcactgtcttcacaaacccaccgcaagtcgccacctaccacagagccatcaaaatcacagtggatgggccccgagaacctcgaagacatcggcagaaactagatgatcagaccaagcccgggagcttgtccttttccgagcggctcagtgaactggagcagctgcggcgcacagccatgagggtcagcccacaccacccagcccccacgcccaaccctcgtgcctccctgaaccactccactgcctttaaccctcagcctcagagtcagatgcaggaggaagacacagcaccctggagatgttaaggcagaagtcagttcttctgtccatccctctccccagccaggatagagctatcttttccatctcatcctcagaagagactcagaagaaagatgacagccctcagaatgcacgttatgaggaaggcagaatgtgggtctgtaattcctccgtgtcccttctccccctctgcaaaccgtcgtaacaataatagttcctaacacatgggacaattgtgaggattaaatgagttagcctgcagaaatcacttgatgcacagcacatgggaagcattgtgtgtatttattaatccttcacaaagtctttgagatatatttttatcaaatatttagcatggatcccggtacactttcaatacttaataaatggtcaatgttattctttttcacta

SEQ ID NO: 43404 - protein, 268 aa, Artificial Sequence
  derived and/or modified sequence
MGLSPSAPAVAVQASNASASPPSGCPMHEGKMKGCPVNTEPSGPTCEKKTYSVPAHQERAYEYVECPIRGTAAENKENLDPSNLMPPPNQTPAPDQPFALSTVREESSIPRADSEKKWVYPSEQMFWNAMLKKGWKWKDEDISQKDMYNIIRIHNQNNEQAWKEILKWEALHAAECPCGPSLIRFGGKAKEYSPRARIRSWMGYELPFDRHDWIINRCGTEVRYVIDYYDGGEVNKDYQFTILDVRPALDSLSAVWDRMKVAWWRWTS

SEQ ID NO: 43405 - DNA, 807 bp, Artificial Sequence
  derived and/or modified sequence
atgggcctgtcaccctcagctcccgccgtagccgtgcaggcatcaaacgcatccgccagtccccctagcggatgccctatgcatgagggaaaaatgaagggatgccctgttaatactgaaccctccggcccgacttgtgaaaagaaaacatattccgtccctgcccaccaagagagagcttacgaatacgtggaatgcccaattcgtggcaccgcagcagaaaataaggaaaatcttgacccaagcaatctcatgcctcccccaaatcagacacccgctcccgatcaacccttcgccttgtctaccgtgcgggaggaaagctctattccccgcgccgactccgaaaaaaagtgggtctacccatctgagcagatgttctggaacgctatgctgaagaagggctggaagtggaaagacgaggatatctcccagaaagacatgtacaacatcattcggatccacaatcaaaataacgaacaggcatggaaggagattttgaagtgggaggctctccacgcagcagaatgtccttgcggcccgtctcttatcagatttggtggtaaagctaaagaatattcgccacgcgcacgtattagaagttggatggggtatgagttacccttcgatcgacacgattggattattaaccgatgcggcacagaggtgagatacgtgatcgattactacgacggcggcgaagtgaacaaggattaccaatttaccatcctggacgtcaggccggccctggatagtctttctgcagtgtgggaccggatgaaggtggcttggtggcggtggaccagctag

SEQ ID NO: 43406 - DNA, 807 bp, Artificial Sequence
  derived and/or modified sequence
atgggactgtctccctctgcacccgcggttgcagtgcaagcctccaacgcgtccgccagcccacccagtggttgtccaatgcacgaaggcaagatgaaaggatgcccagtaaacacagagccttctggacctacatgcgagaagaagacctactcagtgccggcccaccaggaacgtgcctacgagtacgtggaatgtcctatcaggggcacggcagcggagaataaggagaatttggatccatccaacttgatgcccccccctaatcagacacccgctcctgatcagccctttgcactctccacggtgagggaagagtcaagcattccaagggccgattctgagaagaaatgggtttacccatcggagcagatgttttggaacgccatgcttaaaaagggctggaagtggaaggacgaggacatcagtcagaaggacatgtacaatattattcgaatccataatcaaaacaatgaacaggcctggaaggagatcctgaaatgggaggctcttcacgccgcagagtgtccatgtggcccgagcctgatacgcttcggcggcaaggctaaggagtactctccaagggctcggattcgtagctggatgggctacgagctccccttcgaccgccacgattggatcattaacaggtgcggcacggaagtgcggtacgtgattgactactatgacggaggagaggtcaataaggactatcagtttaccatcctggatgtgaggcctgcactggactccctgtcagccgtgtgggaccgaatgaaggtggcctggtggaggtggacctcttag

SEQ ID NO: 43407 - DNA, 807 bp, Artificial Sequence
  derived and/or modified sequence
atgggactctctccctctgcgccagctgtcgccgtgcaggcaagcaacgcttccgcctcgcccccaagcggttgtcccatgcatgaggggaagatgaaggggtgccctgttaatacagaaccttctggcccgacctgtgagaaaaagacctactcagtgccagctcatcaggaacgggcctacgagtatgttgagtgcccgatacgagggacagcagctgagaacaaggaaaatcttgatccatccaaccttatgccccctccgaaccagacgcccgcccctgaccagcctttcgcactgtccaccgtccgggaggaatcaagcatcccacgggcagatagcgaaaaaaaatgggtgtacccctcagaacagatgttctggaatgcaatgctcaagaaaggctggaaatggaaggacgaggacatctcccaaaaagatatgtataacattatccgaatacacaaccagaataatgaacaggcttggaaagagattctgaaatgggaggcattacacgccgctgagtgcccttgtgggccttctctgattcgattcggcggaaaggctaaggagtactcacccagagctcggattaggagctggatgggctacgagttaccatttgatagacatgattggattataaataggtgcggtaccgaggtacgctatgtaattgattactatgacggcggggaagttaacaaagactaccagttcaccatcctagacgtgcggcccgctttggacagcctgtccgctgtttgggaccgtatgaaggtggcttggtggcgatggacaagttag

SEQ ID NO: 43408 - DNA, 2277 bp, Artificial Sequence
  derived and/or modified sequence
gtgcgtgagaacgccggcggtgaccgcagccacagcggtgaccgagtgagaggaaggcggcggcggcggcggcggcggcgtgaagtcactgctgctctgggttcgggttggcgactgaaggcggtaccggcctcccggaacagcccgggggagggcttaggtggaaatttaaaattgtttacagtcaacactgtttccagccatgggtttgtctccatctgctcctgctgttgcagttcaggcctcaaatgcttcagcgtccccaccttcaggatgcccgatgcatgaagggaaaatgaaaggctgtccagtgaatacagagccatctggcccaacctgtgagaagaaaacatactctgtgcctgcccaccaggaacgcgcctatgagtacgtggagtgtcccattaggggcactgcggctgagaataaggagaacctagatccttcaaatctgatgccaccaccaaatcaaacaccagctccagatcagccatttgcattgtctactgtcagagaagagtcatccattccgagagcagattcagagaaaaagtgggtttacccttctgagcagatgttctggaatgcaatgttaaagaaagggtggaagtggaaggatgaggatatcagtcagaaggatatgtataatatcattagaattcacaatcagaataacgagcaggcttggaaggagattttgaagtgggaagcccttcatgctgcagagtgtccttgtggtccatcattgatccggtttggagggaaagcaaaagagtattcaccaagggcacgaattcgttcctggatggggtatgagttgccttttgataggcacgattggatcataaaccgttgcgggacagaagttagatatgtgattgattattatgatggtggtgaagtcaacaaggactaccagttcaccatcctggacgtccgtcctgccttagattcactttcggcagtatgggacagaatgaaagtcgcttggtggcgttggacctcgtaaagcactgtttcagatggaaaaatataaactatttttttctgagcgatacattaaactattttccccagattgaattgcactcatgatgtaatgggaacttcaagtgggtaatcacactttttccttcacttaacgaaggatactatgcactgttcacttttgacttgtgttgtaccttgcagtttatagcagatcattttgttttcttcctacttagcttaagtgggaagcagtctctcagtttttcctttacctgcagtattgtctgtatatttcatctcgaaaagcctgaacaacctctgaaaaagagcttttaaaaagtgatgaaagttgcttttttttcttactattttctcaggaatactccagagatgtaaagcctgagagtccatggtgatgctcaagagctttcatctggccaaatattttaactaaagctgttcattataaataagaggtgattataccttttttaaaaaaagttaccattatttctaaagcccctatggtatgattgtgacctttaacaaaatgcaaaggtatacactggaaaggtactcagcaaaattctctccaaattctgatttatatgaatttcttggactggatagagtactttcaactataccttcctttggaacataccttttaaaaaatgttccctttaaatcctgttattctaatatgtaactctgctcccaacaaacaggtctcctcattgtccttggcatttgacaagttatcccaacttcgaatctcatttcttcctttgctggcagcctccacccttccccacatcagtcggcctaatccaaaccttgaaagcctggcttaagtcccagtatcagtgatggtccccctctaaaacatgattttatatttggctgagtgttaaaattcacaagatgagcatttttttcccagatggagaacgcttcaactcagtctagattttttttgtttgttttaaggaagctctaagtttgccattgaaactttttgtaccagtaatccataaactggttgttctatttatagcagcatgttacaaatgactgctttttttttttaactgtctatactattaaatcctttaatttatcctgaatgctgtagtgttaaattagtggatgaaattggcagtctgtgggtgattaatttggtatggatttgtcagttttgtgtggagtttaagaaatagaacagccttaaactctacatttcaaaatacttgtatattttaaaataaagctgattagttcacaggt

SEQ ID NO: 43409 - DNA, 1072 bp, Artificial Sequence
  derived and/or modified sequence
ggcggcggcggcggcgtgaagtcactgctgctctgggttcgggttggcgactgaaggcggtaccggcctcccggaacagcccgggggagggcttaggtgcagaagggcaggctggccgcggccggtttggtctggggaccacgggctggagcaggtggaaatttaaaattgtttacagtcaacactgtttccagccatgggtttgtctccatctgctcctgctgttgcagttcaggcctcaaatgcttcagcgtccccaccttcaggatgcccgatgcatgaagggaaaatgaaaggctgtccagtgaatacagagccatctggcccaacctgtgagaagaaaacatactctgtgcctgcccaccaggaacgcgcctatgagtacgtggagtgtcccattaggggcactgcggctgagaataaggagaacctagatccttcaaatctgatgccaccaccaaatcaaacaccagctccagatcagccatttgcattgtctactgtcagagaagagtcatccattccgagagcagattcagagaaaaagtgggtttacccttctgagcagatgttctggaatgcaatgttaaagaaagggtggaagtggaaggatgaggatatcagtcagaaggatatgtataatatcattagaattcacaatcagaataacgagcaggcttggaaggagattttgaagtgggaagcccttcatgctgcagagtgtccttgtggtccatcattgatccggtttggagggaaagcaaaagagtattcaccaagggcacgaattcgttcctggatggggtatgagttgccttttgataggcacgattggatcataaaccgttgcgggacagaagttagatatgtgattgattattatgatggtggtgaagtcaacaaggactaccagttcaccatcctggacgtccgtcctgccttagattcactttcggcagtatgggacagaatgaaagtcgcttggtggcgttggacctcgtaaagcactgtttcagatggaaaaatataaactatttttttctgagcgatacattaaactattttccccaga

SEQ ID NO: 43410 - DNA, 1000 bp, Artificial Sequence
  derived and/or modified sequence
ccgagtgagaggaaggcggcggcggcggcggcggcggcgtgaagtcactgctgctctgggttcgggttggcgactgaaggcggtggaaatttaaaattgtttacagtcaacactgtttccagccatgggtttgtctccatctgctcctgctgttgcagttcaggcctcaaatgcttcagcgtccccaccttcaggatgcccgatgcatgaagggaaaatgaaaggctgtccagtgaatacagagccatctggcccaacctgtgagaagaaaacatactctgtgcctgcccaccaggaacgcgcctatgagtacgtggagtgtcccattaggggcactgcggctgagaataaggagaacctagatccttcaaatctgatgccaccaccaaatcaaacaccagctccagatcagccatttgcattgtctactgtcagagaagagtcatccattccgagagcagattcagagaaaaagtgggtttacccttctgagcagatgttctggaatgcaatgttaaagaaagggtggaagtggaaggatgaggatatcagtcagaaggatatgtataatatcattagaattcacaatcagaataacgagcaggcttggaaggagattttgaagtgggaagcccttcatgctgcagagtgtccttgtggtccatcattgatccggtttggagggaaagcaaaagagtattcaccaagggcacgaattcgttcctggatggggtatgagttgccttttgataggcacgattggatcataaaccgttgcgggacagaagttagatatgtgattgattattatgatggtggtgaagtcaacaaggactaccagttcaccatcctggacgtccgtcctgccttagattcactttcggcagtatgggacagaatgaaagtcgcttggtggcgttggacctcgtaaagcactgtttcagatggaaaaatataaactatttttttctgagcgatacattaaactattttccccaga

SEQ ID NO: 43411 - DNA, 807 bp, Artificial Sequence
  derived and/or modified sequence
atgggcctgagccccagcgccccagctgtggccgtgcaggccagcaatgccagcgccagccccccatctggctgccccatgcatgagggcaagatgaagggctgccctgtgaacacagagcccagcggccccacctgtgagaagaagacctacagcgtgcctgcccaccaggagcgggcctatgaatatgtggagtgccccatccggggcacagctgctgagaacaaggagaacctggaccccagcaacctgatgcccccacccaaccagaccccagccccagaccagccctttgccctgagcacagtgcgggaggagagcagcatccccagggctgacagcgagaagaagtgggtgtaccccagcgagcagatgttctggaatgccatgctgaagaagggctggaagtggaaggatgaggacatcagccagaaggacatgtacaacatcatccgcatccacaaccagaacaatgagcaggcctggaaggagatcctgaagtgggaggccctgcatgctgctgaatgtccctgtggccccagcctcatccgctttggaggcaaggccaaggagtacagcccccgggcccgcatccgctcctggatgggctatgagctgccctttgacagacatgactggatcatcaacagatgtggcacagaggtgcgctacgtgattgactactatgatggaggagaggtgaacaaggactaccagttcaccatcctggatgtgcggcctgccctggacagcctgtctgctgtgtgggacaggatgaaggtggcctggtggcgctggaccagctag

SEQ ID NO: 43412 - DNA, 807 bp, Artificial Sequence
  derived and/or modified sequence
atgggcctgagccccagcgcccccgccgtggccgtgcaggccagcaacgccagcgcaagtcccccttccggatgtccgatgcatgaaggcaagatgaaggggtgtccagttaataccgaaccatccggacccacttgtgagaagaagacatactctgtcccagcacaccaggaaagagcctatgagtatgtggaatgtccaatcaggggaactgcagccgagaacaaggagaatttagatcccagcaatctcatgcccccccctaatcaaactccagctcctgatcaacctttcgcactaagtaccgtccgcgaggagtcctccattcccagggccgattccgagaaaaagtgggtgtacccatccgaacagatgttctggaatgccatgctcaaaaagggatggaagtggaaagatgaggatatttcccagaaggatatgtacaacatcattagaatccataatcagaataacgaacaggcgtggaaagagatcctcaagtgggaagcactccatgctgcagagtgtccatgtgggcctagtctcatcaggttcgggggtaaagccaaagaatattctccacgggcaagaattcgcagctggatgggatatgagctgcctttcgaccggcacgattggatcatcaatcgctgtgggacagaagttcgatatgtgattgactactacgacgggggggaggtgaacaaagactatcagtttacaattttagacgtccggcccgccctcgatagtctctccgccgtgtgggatagaatgaaggttgcctggtggaggtggacatcctag

SEQ ID NO: 43413 - DNA, 807 bp, Artificial Sequence
  derived and/or modified sequence
atgggcctgagccccagcgcccccgccgtggccgtgcaggccagcaatgcttccgcctccccaccttccggatgccctatgcacgaagggaaaatgaaaggatgcccagttaatacggagcctagcggaccaacctgcgaaaagaaaacttatagtgtaccggcccaccaggagcgggcgtacgaatacgtggaatgtccaattagggggacagccgcagagaacaaagagaatctagatccttccaacttaatgccacctcctaaccagacccctgcccctgaccagccttttgcactctcaacagtgcgtgaggagagtagtattccccgagcagacagcgagaagaagtgggtttatccatcagaacaaatgttctggaatgctatgctaaaaaagggatggaagtggaaggacgaggatataagccagaaggacatgtacaatattatccgaatccataaccagaataacgaacaggcgtggaaagaaatactcaagtgggaggccttgcacgctgcagaatgcccttgcggccctagtcttattcgattcggtggtaaggctaaggaatacagcccacgagccagaatccggagctggatgggttatgaacttcctttcgacaggcatgattggatcatcaataggtgcggaaccgaggtgagatacgttatcgactattatgacggtggagaggtgaataaggattaccagtttactattctggatgtgagacccgccttggactcgctgagcgctgtgtgggacaggatgaaagtcgcgtggtggcggtggacttcttag

SEQ ID NO: 43414 - DNA, 807 bp, Artificial Sequence
  derived and/or modified sequence
atgggcctgagccccagcgcccccgccgtggccgtgcaggccagcaacgctagcgcctctcctccatccggttgcccaatgcacgagggcaagatgaaggggtgccctgtgaacacagagccatctggccctacctgtgagaaaaagacttattccgttcctgcccaccaggaacgcgcgtatgagtatgtggaatgtcccatcagaggtactgcagctgagaataaggaaaatcttgaccctagcaatctaatgccacccccgaaccagacacctgccccagaccaaccttttgccctgtctacggtacgagaagagtccagcattccgagggcggactctgaaaagaagtgggtatacccctcagaacagatgttttggaacgcaatgttaaaaaagggttggaagtggaaggatgaggacattagccagaaggatatgtacaatatcatccgaatacataatcagaataatgaacaagcatggaaagagattctgaagtgggaagccctgcacgcagctgagtgtccatgtggccccagcctaatcagatttgggggcaaagccaaggagtacagtccacgggcccgaatccgatcttggatgggctacgagttgccgttcgataggcacgactggataattaaccgatgcggcacagaagtgagatacgtgattgactactacgatgggggggaggtaaacaaagactatcagtttacaattcttgatgtacgacctgccctggacagcctaagtgccgtatgggatcgaatgaaggtggcctggtggcggtggacatcttag

SEQ ID NO: 43415 - DNA, 807 bp, Artificial Sequence
  derived and/or modified sequence
atgggtttgtccccgtccgctcctgcggtggccgtccaggcttccaacgctagcgccagtcccccatccgggtgtccaatgcacgaaggcaagatgaagggttgcccagtgaacactgaaccaagtggacccacctgtgaaaaaaagacctactcagtccccgctcaccaggagcgagcctatgaatacgtagaatgtccaattcggggaacagccgctgagaataaagagaaccttgatccatcaaacctgatgccacctcctaatcagacgccagcaccagaccagcctttcgcccttagcactgtccgggaggaaagttccatccccagagctgacagcgagaagaagtgggtgtacccaagtgagcagatgttttggaatgccatgctgaaaaagggttggaagtggaaggacgaggacatttcgcagaaagatatgtataacatcatccgcatccacaatcagaacaacgagcaggcctggaaggagattctgaagtgggaagccctccatgcggcagagtgcccctgtgggccatcactgattaggtttgggggtaaggccaaagagtattctcccagggcacgcatccgtagctggatggggtatgaactgccttttgatagacatgactggattatcaatcgctgtggaacagaagtccggtatgtcatcgattactatgatgggggagaagtcaacaaggattaccagttcaccattttggacgtccgtccggcattagacagtctgtctgccgtatgggaccggatgaaggtggcctggtggagatggacctcatag

SEQ ID NO: 43416 - DNA, 807 bp, Artificial Sequence
  derived and/or modified sequence
atgggcctgagcccaagcgctccagcggtggctgtccaggcttctaatgcttcagcaagcccaccttctgggtgtcccatgcacgaggggaagatgaagggttgccccgttaacacagaacccagcggcccaacttgcgagaagaaaacgtattctgtccctgcccaccaggaacgtgcctatgaatatgtcgagtgccccattcgcggaacggccgcagaaaataaggaaaatctagaccctagcaatctgatgcctccccctaatcaaacccccgctccggaccagccttttgccttgtccacagtgcgcgaggagagtagtattccgagagcagattctgagaagaagtgggtctacccgtccgagcagatgttttggaacgcaatgcttaagaaggggtggaagtggaaggacgaagacatctcccagaaagatatgtataacatcatacgtattcacaatcaaaataatgaacaggcctggaaggagatcttgaagtgggaggcgctccatgccgctgagtgcccatgtggcccttccttgattagattcggaggtaaagccaaggaatattctccaagagcaaggatccgcagctggatgggttatgagcttccgtttgacaggcacgattggattattaacagatgtggcaccgaggttagatatgtgattgactattacgacggaggcgaggtgaacaaggattatcagtttacaatactggacgtgcggcctgcgctcgattctttgagcgctgtatgggacaggatgaaagtcgcttggtggcgatggacctcctag

SEQ ID NO: 43417 - DNA, 807 bp, Artificial Sequence
  derived and/or modified sequence
atggggttgtctccctcagcacctgccgtggctgtgcaggcgtccaacgcctcagctagccctccaagtggatgcccaatgcatgaaggtaagatgaaaggatgcccggtcaacaccgagccatcaggcccaacctgtgaaaagaaaacatacagtgtgcccgctcaccaggaaagagcgtacgagtatgtggagtgtcccatccggggtaccgccgcagaaaataaagaaaatctggatcctagtaatttaatgccaccacccaaccagacacccgcacctgaccaaccttttgccctttctaccgtgcgagaggaatcatccatcccacgcgctgacagcgagaaaaagtgggtttatccctctgaacaaatgttttggaatgcaatgctgaaaaaaggatggaaatggaaagacgaagatatctctcaaaaagatatgtacaacatcattcgaattcataaccagaataatgagcaggcttggaaggagatcctaaagtgggaagctctgcacgccgcagaatgcccctgcggaccaagtttgatccggttcggcggaaaagctaaggagtacagcccaagagcccgaattcggtcatggatgggctatgagttgcccttcgacagacacgattggattataaatcgatgcggcaccgaagtgcgatacgtgatcgattattatgatggtggagaggtgaacaaggactatcagtttaccattctggatgtgaggccggcactggattcactgtctgcagtgtgggacaggatgaaggtggcatggtggcgatggacatcttag

SEQ ID NO: 43418 - DNA, 807 bp, Artificial Sequence
  derived and/or modified sequence
atgggcctgagccccagcgcccccgccgtggccgtgcaggccagcaacgccagcgccagcccccccagcggctgccccatgcacgagggcaagatgaagggctgccccgtgaacaccgagcccagcggccccacctgcgagaagaagacctacagcgtgcccgcccaccaggagagagcctacgagtacgtggagtgccccatcagaggcaccgccgccgagaacaaggagaacctggaccccagcaacctgatgcccccccccaaccagacccccgcccccgaccagcccttcgccctgagcaccgtgagagaggagagcagcatccccagagccgacagcgagaagaagtgggtgtaccccagcgagcagatgttctggaacgccatgctgaagaagggctggaagtggaaggacgaggacatcagccagaaggacatgtacaacatcatcagaatccacaaccagaacaacgagcaggcctggaaggagatcctgaagtgggaggccctgcacgccgccgagtgcccctgcggccccagcctgatcagattcggcggcaaggccaaggagtacagccccagagccagaatcagaagctggatgggctacgagctgcccttcgacagacacgactggatcatcaacagatgcggcaccgaggtgagatacgtgatcgactactacgacggcggcgaggtgaacaaggactaccagttcaccatcctggacgtgagacccgccctggacagcctgagcgccgtgtgggacagaatgaaggtggcctggtggagatggaccagctag

SEQ ID NO: 43419 - DNA, 918 bp, Artificial Sequence
  derived and/or modified sequence
atggagagactggtggccagaggcaccttccccgtgctggtgagaaccagcgcctgcagaagcctgttcggccccgtggaccacgaggagctgagcagagagctgcaggccagactggccgagctgaacgccgaggaccagaacagatgggactacgacttccagcaggacatgcccctgagaggccccggcagactgcagtggaccgaggtggacagcgacagcgtgcccgccttctacagagagaccgtgcaggtgggcagatgcagactgctgctggcccccagacccgtggccgtggccgtggccgtgagcccccccctggagcccgccgccgagagcctggacggcctggaggaggcccccgagcagctgcccagcgtgcccgtgcccgcccccgccagcacccccccccccgtgcccgtgctggcccccgcccccgcccccgcccccgcccccgtggccgcccccgtggccgcccccgtggccgtggccgtgctggcccccgcccccgcccccgcccccgcccccgcccccgcccccgcccccgtggccgcccccgcccccgcccccgcccccgcccccgcccccgcccccgcccccgcccccgcccccgacgccgccccccaggagagcgccgagcagggcgccaaccagggccagagaggccaggagcccctggccgaccagctgcacagcggcatcagcggcagacccgccgccggcaccgccgccgccagcgccaacggcgccgccatcaagaagctgagcggccccctgatcagcgacttcttcgccaagagaaagagaagcgcccccgagaagagcagcggcgacgtgcccgccccctgccccagccccagcgccgcccccggcgtgggcagcgtggagcagacccccagaaagagactgagatag

SEQ ID NO: 43420 - DNA, 918 bp, Artificial Sequence
  derived and/or modified sequence
atggagcgcctggtcgcccgaggaacgttccccgtgctagtcaggacctcagcttgccgctccctgttcggaccggtggatcacgaggagctgtctagggaactgcaagcacgcctggccgaacttaacgccgaagatcagaatcgatgggactatgattttcaacaggacatgcctctgagagggcctggcagacttcagtggaccgaagtggatagcgacagcgtcccggctttctatagagagactgttcaagtgggtcggtgcagacttttacttgcaccgagacctgttgctgtcgccgttgcggtgagccctcctctagagcctgccgccgagagtctggacggcctggaagaagcaccggaacagttgccgtctgtccccgttcccgcccctgcatccacgccaccccccgttcccgtactggccccagccccagcccctgcacctgcaccagtcgcggcgcctgttgctgcccccgtagccgtcgcagtattagcccccgcgccagcgcctgctcctgcccctgcccccgctccagcgccagtggcagcaccagcaccggcccctgctcccgcacctgctccggcgcccgcccctgcccctgcacccgatgccgcaccccaggagagcgccgagcagggagccaatcaaggacagcggggacaagagccgcttgcagatcagttgcacagcggcattagcggtcggcccgccgcagggaccgcggcagctagcgcgaacggcgcagcgatcaaaaagctgtctgggccacttatttcagatttcttcgccaaaagaaaaaggagcgccccagagaagtcaagcggggacgtgccagccccatgcccttcacctagtgccgctcccggagtcggaagcgtcgaacagacacctcgcaaacggctgaggtag

SEQ ID NO: 43421 - DNA, 918 bp, Artificial Sequence
  derived and/or modified sequence
atggaacgcctcgtggccaggggaacttttcccgtcctcgtccggacgtccgcctgcagatcattatttggcccggtcgaccacgaagagctttctagggagcttcaggcaaggctggccgaactgaacgctgaagaccagaatcggtgggattatgatttccaacaggatatgcctttgcggggtcctgggaggctccaatggaccgaggtagattccgattccgtgccagcattttatagagaaacagtccaggtcggtcgatgccgactgctgctggcaccacgcccagtcgctgtggccgtggccgtgagccctccccttgaaccagctgctgaatcactggatgggctggaggaagctccagaacaactgcccagtgtgccggtccccgccccagccagtacaccacctcccgtgccagttctcgccccggctccagcccctgcccccgcgcccgtcgccgctcccgtggcagctcctgtggccgtcgccgtcctcgcacctgcacccgcaccggcacctgctcccgcacccgcccccgcccctgtagccgcacccgcaccagcacccgctccagcacctgcccctgcccccgctccagctccggcccctgacgctgctcctcaggagtccgccgaacaaggcgcgaaccaggggcagcgtggacaggagccactcgccgaccagttgcactccggaatctcggggagaccggcggctggtacagctgccgcaagtgccaacggggccgctattaagaagctgtctgggcctctcattagcgatttctttgctaagagaaaacgctcagccccggaaaaatcctcaggtgatgtgcccgcaccgtgccccagcccttccgcagctccgggagtcggctccgtggagcagaccccacggaagcgtttgcgttag

SEQ ID NO: 43422 - DNA, 918 bp, Artificial Sequence
  derived and/or modified sequence
atggagcggctggtggcccggggcaccttccctgtgctggtgaggaccagcgcctgccgcagcctgtttggacctgtggaccacgaggagctgagccgggagctgcaggcccggctggccgagctgaatgctgaggaccagaaccgctgggactatgacttccagcaggacatgcccctgcggggccctggccgcctgcagtggacagaggtggacagcgacagcgtgcctgccttctaccgggagaccgtgcaggtgggccgctgccgcctgctgctggcccccaggcctgtggccgtggccgtggccgtgagcccccccctggagcctgctgctgagagcctggatggcctggaggaggcccctgagcagctgcccagcgtgcctgtgcctgccccagccagcaccccacctcctgtgcctgtgctggccccagccccagccccagccccagcccctgtggccgcccctgtggccgcccctgtggccgtggccgtgctggccccagccccagccccagccccagccccagccccagccccagcccctgtggccgccccagccccagccccagccccagccccagccccagccccagccccagccccagccccagatgctgccccccaggagagcgctgagcagggcgccaaccagggccagaggggccaggagcccctggccgaccagctgcacagcggcatcagcggccggcctgctgctggaacagctgctgccagcgccaatggagctgccatcaagaagctgagcggccccctcatcagtgacttctttgccaagaggaagaggtctgcccctgagaagagcagtggagatgtgcctgccccctgccccagccccagcgctgcccctggggtgggctctgtggagcagacccccaggaagaggctgaggtag

SEQ ID NO: 43423 - DNA, 918 bp, Artificial Sequence
  derived and/or modified sequence
atggagcggctggtggcccggggcaccttccccgtgctggtgcggacctcggcatgcagatctctattcggaccagtcgaccacgaagaactgagtcgcgaactccaggcccgtcttgccgaactgaacgccgaagatcagaaccgatgggactacgatttccagcaggacatgcctctgagaggcccgggacgtctccaatggaccgaggtggattcggatagcgtgcctgccttttaccgggagaccgtccaggtgggtcgatgtcgcttgcttttagccccgaggcctgttgcggtcgcagtggccgtttccccacccttggagcccgccgcagagtcactagatggactggaagaggccccagagcagttaccctccgtgcccgtccccgcacccgcttcaacccccccacctgttcccgttctcgccccggcccctgcccccgccccagcacctgtcgccgcgcccgtcgctgcacccgtggccgttgctgtcctggcacctgcgccagctccagccccagccccagcccctgccccggcacccgtggccgcccccgcacccgcccccgcgccagcacctgcacctgccccggcaccagcgccagcccccgatgcggcaccacaggagagtgcagagcagggcgcaaaccagggccagcgcgggcaggagcctttagccgatcagctgcatagtggcatatctggccggccagccgcaggaactgcggcagctagcgcaaacggagcagcgatcaaaaagctgtcaggaccgttgatctccgactttttcgccaaaaggaagaggagtgctcctgagaagtcgtctggagacgtaccagcaccctgcccatctcccagcgcagcacccggggtggggtccgtcgagcaaacgcctaggaaaagactgcgctag

SEQ ID NO: 43424 - DNA, 918 bp, Artificial Sequence
  derived and/or modified sequence
atggagcggctggtggcccggggcaccttccccgtgctggtgcggacgtcagcctgtagatctctgtttgggcctgtagatcacgaggaactctccagggaattacaagcccggctagctgagttaaatgcggaagatcagaatcggtgggattatgatttccagcaagatatgcccctccgaggcccggggcgacttcagtggaccgaagttgacagtgattccgtgcctgccttttaccgcgaaactgttcaggtgggaaggtgccggcttttgctggcacctaggccggtggcagtggccgtggcagtgtccccacctttggaacctgctgccgagagtctggacgggcttgaagaggctcctgagcaactgccaagcgtaccagttcccgcccctgccagcacacctccgcctgtcccagtcctggccccagctcctgccccggctccagcgcccgtggccgctccagtggctgcacctgttgcagttgctgtgctcgccccggccccagcccccgctcccgcccctgctcctgccccggcacccgtggccgcaccggcccctgccccagcgcctgcccctgctcccgcccccgcgcccgcccctgctccagacgccgcaccacaggagtctgcggagcagggagcgaatcagggacagcgagggcaggaaccgcttgctgaccaactgcatagtggcatctcgggtcgacctgctgctggcacagcagccgcctctgctaatggagctgccatcaagaagctgtctggtcctctgatctctgatttctttgctaaacgaaaacggtctgcccccgaaaagtcatctggggacgtaccggccccgtgcccctccccttctgccgctccgggagtggggtccgtcgagcagactccaagaaagaggctgcgctag

SEQ ID NO: 43425 - DNA, 918 bp, Artificial Sequence
  derived and/or modified sequence
atggagcgactagtggcccgaggtacgtttcctgtactggttaggaccagtgcgtgtaggtctttatttggacccgttgaccatgaggagctgtctagagagctgcaggccagactagccgagctgaacgctgaggaccagaacaggtgggactacgatttccagcaggacatgcccctcagaggccctggacgattgcagtggacagaagtggacagcgattcggtccctgctttttacagagagacagtgcaggtagggaggtgtcgattactgttagcaccccgtccagttgccgtggcagtggctgtgagtccacccctggagccagccgctgaatctctggatggcttggaggaggccccagagcaactgccctcggtgcccgtgccagcacccgcttccacccccccacctgtccctgtcttagcccctgctcctgccccagccccagcccctgtcgcagcccctgtcgcagctcccgttgccgtggccgtcctggctccggctcctgcccctgctcctgcgccagcgcctgcgcctgctccagtggcagctcccgcacctgcaccagctccagcccctgctccagcgccagcgccagccccagccccagacgcagccccacaggaatccgcagagcagggggctaaccagggacagcgaggccaagaacccttagccgaccagctgcattctggaatttccggtagaccggcagccggtacagctgccgcttctgccaacggcgcagctattaagaaactttctgggcctcttatttccgacttctttgccaagcggaagagatctgctcctgagaagtcttcaggggacgtgcctgctccgtgtccatcccccagtgcagcaccaggagttgggagcgtggaacagacacccaggaagagactgagatag

SEQ ID NO: 43426 - DNA, 918 bp, Artificial Sequence
  derived and/or modified sequence
atggaacggttggtggctcggggaactttccctgtgttggtacgtacatccgcctgcagatctctatttggccctgtggaccacgaagagctaagccgagaattgcaagccagactggcagagttgaatgccgaggatcagaatcgttgggactacgacttccagcaagatatgccacttaggggccctggcaggctgcagtggactgaagtcgactccgatagtgtaccggcattctacagggagactgtgcaagtggggcgttgtcggcttttgctggctcctcggcctgttgccgtggccgtggcggtgagcccccctctggaacctgctgcagagtcgctggatgggctagaagaagccccagaacaactgccctcagttcccgtgccagctcccgctagtaccccccctcctgtgccagttctggccccagctcccgctcctgctcccgctccagtggcggcacccgtggcggctcccgtggccgttgcagtgctggcacccgcacccgctcccgcaccagcccctgctcctgctccagcccctgtggctgcccctgcccctgcacctgcccctgctcccgctccagcaccagcccctgcgcctgctcccgatgccgcacctcaagagtccgctgaacagggcgcaaatcagggtcaaaggggtcaggaacccctggctgatcagctgcattccggtataagtggcaggcctgcggcaggcactgccgcagccagtgccaacggggctgccatcaagaagttgtctgggccacttatttcagacttttttgccaaacgcaagagaagcgccccagaaaaatcgagtggagatgtgcctgccccatgcccttctccttccgctgcccctggtgttggtagtgtggagcagacgcccaggaaaagacttagatag

SEQ ID NO: 43427 - protein, 121 aa, Artificial Sequence
  derived and/or modified sequence
MTRILTAFKVVRTLKTGFGFTNVTAHQKWKFSRPGIRLLSVKAQTAHIVLEDGTKMKGYSFGHPSSVAGEVVFNTGLGGYPEAITDPAYKGQILTMANPIIGNGGAPDTTALDELGLSKYL

SEQ ID NO: 43428 - protein, 1506 aa, Artificial Sequence
  derived and/or modified sequence
MPQIIKMTRILTAFKVVRTLKTGFGFTNVTAHQKWKFSRPGIRLLSVKAQTAHIVLEDGTKMKGYSFGHPSSVAGEVVFNTGLGGYPEAITDPAYKGQILTMANPIIGNGGAPDTTALDELGLSKYLESNGIKVSGLLVLDYSKDYNHWLATKSLGQWLQEEKVPAIYGVDTRMLTKIIRDKGTMLGKIEFEGQPVDFVDPNKQNLIAEVSTKDVKVYGKGNPTKVVAVDCGIKNNVIRLLVKRGAEVHLVPWNHDFTKMEYDGILIAGGPGNPALAEPLIQNVRKILESDRKEPLFGISTGNLITGLAAGAKTYKMSMANRGQNQPVLNITNKQAFITAQNHGYALDNTLPAGWKPLFVNVNDQTNEGIMHESKPFFAVQFHPEVTPGPIDTEYLFDSFFSLIKKGKATTITSVLPKPALVASRVEVSKVLILGSGGLSIGQAGEFDYSGSQAVKAMKEENVKTVLMNPNIASVQTNEVGLKQADTVYFLPITPQFVTEVIKAEQPDGLILGMGGQTALNCGVELFKRGVLKEYGVKVLGTSVESIMATEDRQLFSDKLNEINEKIAPSFAVESIEDALKAADTIGYPVMIRSAYALGGLGSGICPNRETLMDLSTKAFAMTNQILVEKSVTGWKEIEYEVVRDADDNCVTVCNMENVDAMGVHTGDSVVVAPAQTLSNAEFQMLRRTSINVVRHLGIVGECNIQFALHPTSMEYCIIEVNARLSRSSALASKATGYPLAFIAAKIALGIPLPEIKNVVSGKTSACFEPSLDYMVTKIPRWDLDRFHGTSSRIGSSMKSVGEVMAIGRTFEESFQKALRMCHPSIEGFTPRLPMNKEWPSNLDLRKELSEPSSTRIYAIAKAIDDNMSLDEIEKLTYIDKWFLYKMRDILNMEKTLKGLNSESMTEETLKRAKEIGFSDKQISKCLGLTEAQTRELRLKKNIHPWVKQIDTLAAEYPSVTNYLYVTYNGQEHDVNFDDHGMMVLGCGPYHIGSSVEFDWCAVSSIRTLRQLGKKTVVVNCNPETVSTDFDECDKLYFEELSLERILDIYHQEACGGCIISVGGQIPNNLAVPLYKNGVKIMGTSPLQIDRAEDRSIFSAVLDELKVAQAPWKAVNTLNEALEFAKSVDYPCLLRPSYVLSGSAMNVVFSEDEMKKFLEEATRVSQEHPVVLTKFVEGAREVEMDAVGKDGRVISHAISEHVEDAGVHSGDATLMLPTQTISQGAIEKVKDATRKIAKAFAISGPFNVQFLVKGNDVLVIECNLRASRSFPFVSKTLGVDFIDVATKVMIGENVDEKHLPTLDHPIIPADYVAIKAPMFSWPRLRDADPILRCEMASTGEVACFGEGIHTAFLKAMLSTGFKIPQKGILIGIQQSFRPRFLGVAEQLHNEGFKLFATEATSDWLNANNVPATPVAWPSQEGQNPSLSSIRKLIRDGSIDLVINLPNNNTKFVHDNYVIRRTAVDSGIPLLTNFQVTKLFAEAVQKSRKVDSKSLFHYRQYSAGKAA

SEQ ID NO: 43429 - protein, 513 aa, Artificial Sequence [sequence omitted]

SEQ ID NO: 43430 - protein, 70 aa, Artificial Sequence
  derived and/or modified sequence
MTRILTAFKVVRTLKTGFGFTNVTAHQKWKFSRPGIRLLSVKAQTAHIVLEDRDADTPAPLLNQPEPHVI

SEQ ID NO: 43431 - DNA, 4500 bp, Artificial Sequence
  derived and/or modified sequence
atgacccgcatcctgaccgccttcaaggtggtgcgcaccctgaagaccggcttcggcttcaccaacgtgaccgcccaccagaagtggaagttcagccgccccggcatccgcctgctgagcgtgaaggcccagaccgcccacatcgtgctggaggacggcaccaagatgaagggctacagcttcggccaccccagcagcgtggccggcgaggtggtgttcaacaccggcctgggcggctaccccgaggccatcaccgaccccgcctacaagggccagatcctgaccatggccaaccccatcatcggcaacggcggcgcccccgacaccaccgccctggacgagctgggcctgagcaagtacctggagagcaacggcatcaaggtgagcggcctgctggtgctggactacagcaaggactacaaccactggctggccaccaagagcctgggccagtggctgcaggaggagaaggtgcccgccatctacggcgtggacacccgcatgctgaccaagatcatccgcgacaagggcaccatgctgggcaagatcgagttcgagggccagcccgtggacttcgtggaccccaacaagcagaacctgatcgccgaggtgagcaccaaggacgtgaaggtgtacggcaagggcaaccccaccaaggtggtggccgtggactgcggcatcaagaacaacgtgatccgcctgctggtgaagcgcggcgccgaggtgcacctggtgccctggaaccacgacttcaccaagatggagtacgacggcatcctgatcgccggcggccccggcaaccccgccctggccgagcccctgatccagaacgtgcgcaagatcctggagagcgaccgcaaggagcccctgttcggcatcagcaccggcaacctgatcaccggcctggccgccggcgccaagacctacaagatgagcatggccaaccgcggccagaaccagcccgtgctgaacatcaccaacaagcaggccttcatcaccgcccagaaccacggctacgccctggacaacaccctgcccgccggctggaagcccctgttcgtgaacgtgaacgaccagaccaacgagggcatcatgcacgagagcaagcccttcttcgccgtgcagttccaccccgaggtgacccccggccccatcgacaccgagtacctgttcgacagcttcttcagcctgatcaagaagggcaaggccaccaccatcaccagcgtgctgcccaagcccgccctggtggccagccgcgtggaggtgagcaaggtgctgatcctgggcagcggcggcctgagcatcggccaggccggcgagttcgactacagcggcagccaggccgtgaaggccatgaaggaggagaacgtgaagaccgtgctgatgaaccccaacatcgccagcgtgcagaccaacgaggtgggcctgaagcaggccgacaccgtgtacttcctgcccatcaccccccagttcgtgaccgaggtgatcaaggccgagcagcccgacggcctgatcctgggcatgggcggccagaccgccctgaactgcggcgtggagctgttcaagcgcggcgtgctgaaggagtacggcgtgaaggtgctgggcaccagcgtggagagcatcatggccaccgaggaccgccagctgttcagcgacaagctgaacgagatcaacgagaagatcgcccccagcttcgccgtggagagcatcgaggacgccctgaaggccgccgacaccatcggctaccccgtgatgatccgcagcgcctacgccctgggcggcctgggcagcggcatctgccccaaccgcgagaccctgatggacctgagcaccaaggccttcgccatgaccaaccagatcctggtggagaagagcgtgaccggctggaaggagatcgagtacgaggtggtgcgcgacgccgacgacaactgcgtgaccgtgtgcaacatggagaacgtggacgccatgggcgtgcacaccggcgacagcgtggtggtggcccccgcccagaccctgagcaacgccgagttccagatgctgcgccgcaccagcatcaacgtggtgcgccacctgggcatcgtgggcgagtgcaacatccagttcgccctgcaccccaccagcatggagtactgcatcatcgaggtgaacgcccgcctgagccgcagcagcgccctggccagcaaggccaccggctaccccctggccttcatcgccgccaagatcgccctgggcatccccctgcccgagatcaagaacgtggtgagcggcaagaccagcgcctgcttcgagcccagcctggactacatggtgaccaagatcccccgctgggacctggaccgcttccacggcaccagcagccgcatcggcagcagcatgaagagcgtgggcgaggtgatggccatcggccgcaccttcgaggagagcttccagaaggccctgcgcatgtgccaccccagcatcgagggcttcaccccccgcctgcccatgaacaaggagtggcccagcaacctggacctgcgcaaggagctgagcgagcccagcagcacccgcatctacgccatcgccaaggccatcgacgacaacatgagcctggacgagatcgagaagctgacctacatcgacaagtggttcctgtacaagatgcgcgacatcctgaacatggagaagaccctgaagggcctgaacagcgagagcatgaccgaggagaccctgaagcgcgccaaggagatcggcttcagcgacaagcagatcagcaagtgcctgggcctgaccgaggcccagacccgcgagctgcgcctgaagaagaacatccacccctgggtgaagcagatcgacaccctggccgccgagtaccccagcgtgaccaactacctgtacgtgacctacaacggccaggagcacgacgtgaacttcgacgaccacggcatgatggtgctgggctgcggcccctaccacatcggcagcagcgtggagttcgactggtgcgccgtgagcagcatccgcaccctgcgccagctgggcaagaagaccgtggtggtgaactgcaaccccgagaccgtgagcaccgacttcgacgagtgcgacaagctgtacttcgaggagctgagcctggagcgcatcctggacatctaccaccaggaggcctgcggcggctgcatcatcagcgtgggcggccagatccccaacaacctggccgtgcccctgtacaagaacggcgtgaagatcatgggcaccagccccctgcagatcgaccgcgccgaggaccgcagcatcttcagcgccgtgctggacgagctgaaggtggcccaggccccctggaaggccgtgaacaccctgaacgaggccctggagttcgccaagagcgtggactacccctgcctgctgcgccccagctacgtgctgagcggcagcgccatgaacgtggtgttcagcgaggacgagatgaagaagttcctggaggaggccacccgcgtgagccaggagcaccccgtggtgctgaccaagttcgtggagggcgcccgcgaggtggagatggacgccgtgggcaaggacggccgcgtgatcagccacgccatcagcgagcacgtggaggacgccggcgtgcacagcggcgacgccaccctgatgctgcccacccagaccatcagccagggcgccatcgagaaggtgaaggacgccacccgcaagatcgccaaggccttcgccatcagcggccccttcaacgtgcagttcctggtgaagggcaacgacgtgctggtgatcgagtgcaacctgcgcgccagccgcagcttccccttcgtgagcaagaccctgggcgtggacttcatcgacgtggccaccaaggtgatgatcggcgagaacgtggacgagaagcacctgcccaccctggaccaccccatcatccccgccgactacgtggccatcaaggcccccatgttcagctggccccgcctgcgcgacgccgaccccatcctgcgctgcgagatggccagcaccggcgaggtggcctgcttcggcgagggcatccacaccgccttcctgaaggccatgctgagcaccggcttcaagatcccccagaagggcatcctgatcggcatccagcagagcttccgcccccgcttcctgggcgtggccgagcagctgcacaacgagggcttcaagctgttcgccaccgaggccaccagcgactggctgaacgccaacaacgtgcccgccacccccgtggcctggcccagccaggagggccagaaccccagcctgagcagcatccgcaagctgatccgcgacggcagcatcgacctggtgatcaacctgcccaacaacaacaccaagttcgtgcacgacaactacgtgatccgccgcaccgccgtggacagcggcatccccctgctgaccaacttccaggtgaccaagctgttcgccgaggccgtgcagaagagccgcaaggtggacagcaagagcctgttccactaccgccagtacagcgccggcaaggccgcc

SEQ ID NO: 43432 - DNA, 4518 bp, Artificial Sequence
  derived and/or modified sequence
atgccccagatcatcaagatgacccgcatcctgaccgccttcaaggtggtgcgcaccctgaagaccggcttcggcttcaccaacgtgaccgcccaccagaagtggaagttcagccgccccggcatccgcctgctgagcgtgaaggcccagaccgcccacatcgtgctggaggacggcaccaagatgaagggctacagcttcggccaccccagcagcgtggccggcgaggtggtgttcaacaccggcctgggcggctaccccgaggccatcaccgaccccgcctacaagggccagatcctgaccatggccaaccccatcatcggcaacggcggcgcccccgacaccaccgccctggacgagctgggcctgagcaagtacctggagagcaacggcatcaaggtgagcggcctgctggtgctggactacagcaaggactacaaccactggctggccaccaagagcctgggccagtggctgcaggaggagaaggtgcccgccatctacggcgtggacacccgcatgctgaccaagatcatccgcgacaagggcaccatgctgggcaagatcgagttcgagggccagcccgtggacttcgtggaccccaacaagcagaacctgatcgccgaggtgagcaccaaggacgtgaaggtgtacggcaagggcaaccccaccaaggtggtggccgtggactgcggcatcaagaacaacgtgatccgcctgctggtgaagcgcggcgccgaggtgcacctggtgccctggaaccacgacttcaccaagatggagtacgacggcatcctgatcgccggcggccccggcaaccccgccctggccgagcccctgatccagaacgtgcgcaagatcctggagagcgaccgcaaggagcccctgttcggcatcagcaccggcaacctgatcaccggcctggccgccggcgccaagacctacaagatgagcatggccaaccgcggccagaaccagcccgtgctgaacatcaccaacaagcaggccttcatcaccgcccagaaccacggctacgccctggacaacaccctgcccgccggctggaagcccctgttcgtgaacgtgaacgaccagaccaacgagggcatcatgcacgagagcaagcccttcttcgccgtgcagttccaccccgaggtgacccccggccccatcgacaccgagtacctgttcgacagcttcttcagcctgatcaagaagggcaaggccaccaccatcaccagcgtgctgcccaagcccgccctggtggccagccgcgtggaggtgagcaaggtgctgatcctgggcagcggcggcctgagcatcggccaggccggcgagttcgactacagcggcagccaggccgtgaaggccatgaaggaggagaacgtgaagaccgtgctgatgaaccccaacatcgccagcgtgcagaccaacgaggtgggcctgaagcaggccgacaccgtgtacttcctgcccatcaccccccagttcgtgaccgaggtgatcaaggccgagcagcccgacggcctgatcctgggcatgggcggccagaccgccctgaactgcggcgtggagctgttcaagcgcggcgtgctgaaggagtacggcgtgaaggtgctgggcaccagcgtggagagcatcatggccaccgaggaccgccagctgttcagcgacaagctgaacgagatcaacgagaagatcgcccccagcttcgccgtggagagcatcgaggacgccctgaaggccgccgacaccatcggctaccccgtgatgatccgcagcgcctacgccctgggcggcctgggcagcggcatctgccccaaccgcgagaccctgatggacctgagcaccaaggccttcgccatgaccaaccagatcctggtggagaagagcgtgaccggctggaaggagatcgagtacgaggtggtgcgcgacgccgacgacaactgcgtgaccgtgtgcaacatggagaacgtggacgccatgggcgtgcacaccggcgacagcgtggtggtggcccccgcccagaccctgagcaacgccgagttccagatgctgcgccgcaccagcatcaacgtggtgcgccacctgggcatcgtgggcgagtgcaacatccagttcgccctgcaccccaccagcatggagtactgcatcatcgaggtgaacgcccgcctgagccgcagcagcgccctggccagcaaggccaccggctaccccctggccttcatcgccgccaagatcgccctgggcatccccctgcccgagatcaagaacgtggtgagcggcaagaccagcgcctgcttcgagcccagcctggactacatggtgaccaagatcccccgctgggacctggaccgcttccacggcaccagcagccgcatcggcagcagcatgaagagcgtgggcgaggtgatggccatcggccgcaccttcgaggagagcttccagaaggccctgcgcatgtgccaccccagcatcgagggcttcaccccccgcctgcccatgaacaaggagtggcccagcaacctggacctgcgcaaggagctgagcgagcccagcagcacccgcatctacgccatcgccaaggccatcgacgacaacatgagcctggacgagatcgagaagctgacctacatcgacaagtggttcctgtacaagatgcgcgacatcctgaacatggagaagaccctgaagggcctgaacagcgagagcatgaccgaggagaccctgaagcgcgccaaggagatcggcttcagcgacaagcagatcagcaagtgcctgggcctgaccgaggcccagacccgcgagctgcgcctgaagaagaacatccacccctgggtgaagcagatcgacaccctggccgccgagtaccccagcgtgaccaactacctgtacgtgacctacaacggccaggagcacgacgtgaacttcgacgaccacggcatgatggtgctgggctgcggcccctaccacatcggcagcagcgtggagttcgactggtgcgccgtgagcagcatccgcaccctgcgccagctgggcaagaagaccgtggtggtgaactgcaaccccgagaccgtgagcaccgacttcgacgagtgcgacaagctgtacttcgaggagctgagcctggagcgcatcctggacatctaccaccaggaggcctgcggcggctgcatcatcagcgtgggcggccagatccccaacaacctggccgtgcccctgtacaagaacggcgtgaagatcatgggcaccagccccctgcagatcgaccgcgccgaggaccgcagcatcttcagcgccgtgctggacgagctgaaggtggcccaggccccctggaaggccgtgaacaccctgaacgaggccctggagttcgccaagagcgtggactacccctgcctgctgcgccccagctacgtgctgagcggcagcgccatgaacgtggtgttcagcgaggacgagatgaagaagttcctggaggaggccacccgcgtgagccaggagcaccccgtggtgctgaccaagttcgtggagggcgcccgcgaggtggagatggacgccgtgggcaaggacggccgcgtgatcagccacgccatcagcgagcacgtggaggacgccggcgtgcacagcggcgacgccaccctgatgctgcccacccagaccatcagccagggcgccatcgagaaggtgaaggacgccacccgcaagatcgccaaggccttcgccatcagcggccccttcaacgtgcagttcctggtgaagggcaacgacgtgctggtgatcgagtgcaacctgcgcgccagccgcagcttccccttcgtgagcaagaccctgggcgtggacttcatcgacgtggccaccaaggtgatgatcggcgagaacgtggacgagaagcacctgcccaccctggaccaccccatcatccccgccgactacgtggccatcaaggcccccatgttcagctggccccgcctgcgcgacgccgaccccatcctgcgctgcgagatggccagcaccggcgaggtggcctgcttcggcgagggcatccacaccgccttcctgaaggccatgctgagcaccggcttcaagatcccccagaagggcatcctgatcggcatccagcagagcttccgcccccgcttcctgggcgtggccgagcagctgcacaacgagggcttcaagctgttcgccaccgaggccaccagcgactggctgaacgccaacaacgtgcccgccacccccgtggcctggcccagccaggagggccagaaccccagcctgagcagcatccgcaagctgatccgcgacggcagcatcgacctggtgatcaacctgcccaacaacaacaccaagttcgtgcacgacaactacgtgatccgccgcaccgccgtggacagcggcatccccctgctgaccaacttccaggtgaccaagctgttcgccgaggccgtgcagaagagccgcaaggtggacagcaagagcctgttccactaccgccagtacagcgccggcaaggccgcc

SEQ ID NO: 43433 - DNA, 4521 bp, Artificial Sequence
  derived and/or modified sequence
atgccccagatcatcaagatgaccagaatcctgaccgccttcaaggtggtgagaaccctgaagaccggcttcggcttcaccaacgtgaccgcccaccagaagtggaagttcagcagacccggcatcagactgctgagcgtgaaggcccagaccgcccacatcgtgctggaggacggcaccaagatgaagggctacagcttcggccaccccagcagcgtggccggcgaggtggtgttcaacaccggcctgggcggctaccccgaggccatcaccgaccccgcctacaagggccagatcctgaccatggccaaccccatcatcggcaacggcggcgcccccgacaccaccgccctggacgagctgggcctgagcaagtacctggagagcaacggcatcaaggtgagcggcctgctggtgctggactacagcaaggactacaaccactggctggccaccaagagcctgggccagtggctgcaggaggagaaggtgcccgccatctacggcgtggacaccagaatgctgaccaagatcatcagagacaagggcaccatgctgggcaagatcgagttcgagggccagcccgtggacttcgtggaccccaacaagcagaacctgatcgccgaggtgagcaccaaggacgtgaaggtgtacggcaagggcaaccccaccaaggtggtggccgtggactgcggcatcaagaacaacgtgatcagactgctggtgaagagaggcgccgaggtgcacctggtgccctggaaccacgacttcaccaagatggagtacgacggcatcctgatcgccggcggccccggcaaccccgccctggccgagcccctgatccagaacgtgagaaagatcctggagagcgacagaaaggagcccctgttcggcatcagcaccggcaacctgatcaccggcctggccgccggcgccaagacctacaagatgagcatggccaacagaggccagaaccagcccgtgctgaacatcaccaacaagcaggccttcatcaccgcccagaaccacggctacgccctggacaacaccctgcccgccggctggaagcccctgttcgtgaacgtgaacgaccagaccaacgagggcatcatgcacgagagcaagcccttcttcgccgtgcagttccaccccgaggtgacccccggccccatcgacaccgagtacctgttcgacagcttcttcagcctgatcaagaagggcaaggccaccaccatcaccagcgtgctgcccaagcccgccctggtggccagcagagtggaggtgagcaaggtgctgatcctgggcagcggcggcctgagcatcggccaggccggcgagttcgactacagcggcagccaggccgtgaaggccatgaaggaggagaacgtgaagaccgtgctgatgaaccccaacatcgccagcgtgcagaccaacgaggtgggcctgaagcaggccgacaccgtgtacttcctgcccatcaccccccagttcgtgaccgaggtgatcaaggccgagcagcccgacggcctgatcctgggcatgggcggccagaccgccctgaactgcggcgtggagctgttcaagagaggcgtgctgaaggagtacggcgtgaaggtgctgggcaccagcgtggagagcatcatggccaccgaggacagacagctgttcagcgacaagctgaacgagatcaacgagaagatcgcccccagcttcgccgtggagagcatcgaggacgccctgaaggccgccgacaccatcggctaccccgtgatgatcagaagcgcctacgccctgggcggcctgggcagcggcatctgccccaacagagagaccctgatggacctgagcaccaaggccttcgccatgaccaaccagatcctggtggagaagagcgtgaccggctggaaggagatcgagtacgaggtggtgagagacgccgacgacaactgcgtgaccgtgtgcaacatggagaacgtggacgccatgggcgtgcacaccggcgacagcgtggtggtggcccccgcccagaccctgagcaacgccgagttccagatgctgagaagaaccagcatcaacgtggtgagacacctgggcatcgtgggcgagtgcaacatccagttcgccctgcaccccaccagcatggagtactgcatcatcgaggtgaacgccagactgagcagaagcagcgccctggccagcaaggccaccggctaccccctggccttcatcgccgccaagatcgccctgggcatccccctgcccgagatcaagaacgtggtgagcggcaagaccagcgcctgcttcgagcccagcctggactacatggtgaccaagatccccagatgggacctggacagattccacggcaccagcagcagaatcggcagcagcatgaagagcgtgggcgaggtgatggccatcggcagaaccttcgaggagagcttccagaaggccctgagaatgtgccaccccagcatcgagggcttcacccccagactgcccatgaacaaggagtggcccagcaacctggacctgagaaaggagctgagcgagcccagcagcaccagaatctacgccatcgccaaggccatcgacgacaacatgagcctggacgagatcgagaagctgacctacatcgacaagtggttcctgtacaagatgagagacatcctgaacatggagaagaccctgaagggcctgaacagcgagagcatgaccgaggagaccctgaagagagccaaggagatcggcttcagcgacaagcagatcagcaagtgcctgggcctgaccgaggcccagaccagagagctgagactgaagaagaacatccacccctgggtgaagcagatcgacaccctggccgccgagtaccccagcgtgaccaactacctgtacgtgacctacaacggccaggagcacgacgtgaacttcgacgaccacggcatgatggtgctgggctgcggcccctaccacatcggcagcagcgtggagttcgactggtgcgccgtgagcagcatcagaaccctgagacagctgggcaagaagaccgtggtggtgaactgcaaccccgagaccgtgagcaccgacttcgacgagtgcgacaagctgtacttcgaggagctgagcctggagagaatcctggacatctaccaccaggaggcctgcggcggctgcatcatcagcgtgggcggccagatccccaacaacctggccgtgcccctgtacaagaacggcgtgaagatcatgggcaccagccccctgcagatcgacagagccgaggacagaagcatcttcagcgccgtgctggacgagctgaaggtggcccaggccccctggaaggccgtgaacaccctgaacgaggccctggagttcgccaagagcgtggactacccctgcctgctgagacccagctacgtgctgagcggcagcgccatgaacgtggtgttcagcgaggacgagatgaagaagttcctggaggaggccaccagagtgagccaggagcaccccgtggtgctgaccaagttcgtggagggcgccagagaggtggagatggacgccgtgggcaaggacggcagagtgatcagccacgccatcagcgagcacgtggaggacgccggcgtgcacagcggcgacgccaccctgatgctgcccacccagaccatcagccagggcgccatcgagaaggtgaaggacgccaccagaaagatcgccaaggccttcgccatcagcggccccttcaacgtgcagttcctggtgaagggcaacgacgtgctggtgatcgagtgcaacctgagagccagcagaagcttccccttcgtgagcaagaccctgggcgtggacttcatcgacgtggccaccaaggtgatgatcggcgagaacgtggacgagaagcacctgcccaccctggaccaccccatcatccccgccgactacgtggccatcaaggcccccatgttcagctggcccagactgagagacgccgaccccatcctgagatgcgagatggccagcaccggcgaggtggcctgcttcggcgagggcatccacaccgccttcctgaaggccatgctgagcaccggcttcaagatcccccagaagggcatcctgatcggcatccagcagagcttcagacccagattcctgggcgtggccgagcagctgcacaacgagggcttcaagctgttcgccaccgaggccaccagcgactggctgaacgccaacaacgtgcccgccacccccgtggcctggcccagccaggagggccagaaccccagcctgagcagcatcagaaagctgatcagagacggcagcatcgacctggtgatcaacctgcccaacaacaacaccaagttcgtgcacgacaactacgtgatcagaagaaccgccgtggacagcggcatccccctgctgaccaacttccaggtgaccaagctgttcgccgaggccgtgcagaagagcagaaaggtggacagcaagagcctgttccactacagacagtacagcgccggcaaggccgcctag

SEQ ID NO: 43434 - DNA, 1542 bp, Artificial Sequence
  derived and/or modified sequence
atgaccagaatcctgaccgccttcaaggtggtgagaaccctgaagaccggcttcggcttcaccaacgtgaccgcccaccagaagtggaagttcagcagacccggcatcagactgctgagcgtgaaggcccagaccgcccacatcgtgctggaggacggcaccaagatgaagggctacagcttcggccaccccagcagcgtggccggcgaggtggtgttcaacaccggcctgggcggctaccccgaggccatcaccgaccccgcctacaagggccagatcctgaccatggccaaccccatcatcggcaacggcggcgcccccgacaccaccgccctggacgagctgggcctgagcaagtacctggagagcaacggcatcaaggtgagcggcctgctggtgctggactacagcaaggactacaaccactggctggccaccaagagcctgggccagtggctgcaggaggagaaggtgcccgccatctacggcgtggacaccagaatgctgaccaagatcatcagagacaagggcaccatgctgggcaagatcgagttcgagggccagcccgtggacttcgtggaccccaacaagcagaacctgatcgccgaggtgagcaccaaggacgtgaaggtgtacggcaagggcaaccccaccaaggtggtggccgtggactgcggcatcaagaacaacgtgatcagactgctggtgaagagaggcgccgaggtgcacctggtgccctggaaccacgacttcaccaagatggagtacgacggcatcctgatcgccggcggccccggcaaccccgccctggccgagcccctgatccagaacgtgagaaagatcctggagagcgacagaaaggagcccctgttcggcatcagcaccggcaacctgatcaccggcctggccgccggcgccaagacctacaagatgagcatggccaacagaggccagaaccagcccgtgctgaacatcaccaacaagcaggccttcatcaccgcccagaaccacggctacgccctggacaacaccctgcccgccggctggaagcccctgttcgtgaacgtgaacgaccagaccaacgagggcatcatgcacgagagcaagcccttcttcgccgtgcagttccaccccgaggtgacccccggccccatcgacaccgagtacctgttcgacagcttcttcagcctgatcaagaagggcaaggccaccaccatcaccagcgtgctgcccaagcccgccctggtggccagcagagtggaggtgagcaaggtgctgatcctgggcagcggcggcctgagcatcggccaggccggcgagttcgactacagcggcagccaggccgtgaaggccatgaaggaggagaacgtgaagaccgtgctgatgaaccccaacatcgccagcgtgcagaccaacgaggtgggcctgaagcaggccgacaccgtgtacttcctgcccatcaccccccagttcgtgaccgaggtgatcaaggccgagcagcccgacggcctgatcctgggcatgggcgccagacagctgtag

SEQ ID NO: 43435 - DNA, 4527 bp, Artificial Sequence
  derived and/or modified sequence
agacccagaccccagatcatcaagatgaccagaatcctgaccgccttcaaggtggtgagaaccctgaagaccggcttcggcttcaccaacgtgaccgcccaccagaagtggaagttcagcagacccggcatcagactgctgagcgtgaaggcccagaccgcccacatcgtgctggaggacggcaccaagatgaagggctacagcttcggccaccccagcagcgtggccggcgaggtggtgttcaacaccggcctgggcggctaccccgaggccatcaccgaccccgcctacaagggccagatcctgaccatggccaaccccatcatcggcaacggcggcgcccccgacaccaccgccctggacgagctgggcctgagcaagtacctggagagcaacggcatcaaggtgagcggcctgctggtgctggactacagcaaggactacaaccactggctggccaccaagagcctgggccagtggctgcaggaggagaaggtgcccgccatctacggcgtggacaccagaatgctgaccaagatcatcagagacaagggcaccatgctgggcaagatcgagttcgagggccagcccgtggacttcgtggaccccaacaagcagaacctgatcgccgaggtgagcaccaaggacgtgaaggtgtacggcaagggcaaccccaccaaggtggtggccgtggactgcggcatcaagaacaacgtgatcagactgctggtgaagagaggcgccgaggtgcacctggtgccctggaaccacgacttcaccaagatggagtacgacggcatcctgatcgccggcggccccggcaaccccgccctggccgagcccctgatccagaacgtgagaaagatcctggagagcgacagaaaggagcccctgttcggcatcagcaccggcaacctgatcaccggcctggccgccggcgccaagacctacaagatgagcatggccaacagaggccagaaccagcccgtgctgaacatcaccaacaagcaggccttcatcaccgcccagaaccacggctacgccctggacaacaccctgcccgccggctggaagcccctgttcgtgaacgtgaacgaccagaccaacgagggcatcatgcacgagagcaagcccttcttcgccgtgcagttccaccccgaggtgacccccggccccatcgacaccgagtacctgttcgacagcttcttcagcctgatcaagaagggcaaggccaccaccatcaccagcgtgctgcccaagcccgccctggtggccagcagagtggaggtgagcaaggtgctgatcctgggcagcggcggcctgagcatcggccaggccggcgagttcgactacagcggcagccaggccgtgaaggccatgaaggaggagaacgtgaagaccgtgctgatgaaccccaacatcgccagcgtgcagaccaacgaggtgggcctgaagcaggccgacaccgtgtacttcctgcccatcaccccccagttcgtgaccgaggtgatcaaggccgagcagcccgacggcctgatcctgggcatgggcggccagaccgccctgaactgcggcgtggagctgttcaagagaggcgtgctgaaggagtacggcgtgaaggtgctgggcaccagcgtggagagcatcatggccaccgaggacagacagctgttcagcgacaagctgaacgagatcaacgagaagatcgcccccagcttcgccgtggagagcatcgaggacgccctgaaggccgccgacaccatcggctaccccgtgatgatcagaagcgcctacgccctgggcggcctgggcagcggcatctgccccaacagagagaccctgatggacctgagcaccaaggccttcgccatgaccaaccagatcctggtggagaagagcgtgaccggctggaaggagatcgagtacgaggtggtgagagacgccgacgacaactgcgtgaccgtgtgcaacatggagaacgtggacgccatgggcgtgcacaccggcgacagcgtggtggtggcccccgcccagaccctgagcaacgccgagttccagatgctgagaagaaccagcatcaacgtggtgagacacctgggcatcgtgggcgagtgcaacatccagttcgccctgcaccccaccagcatggagtactgcatcatcgaggtgaacgccagactgagcagaagcagcgccctggccagcaaggccaccggctaccccctggccttcatcgccgccaagatcgccctgggcatccccctgcccgagatcaagaacgtggtgagcggcaagaccagcgcctgcttcgagcccagcctggactacatggtgaccaagatccccagatgggacctggacagattccacggcaccagcagcagaatcggcagcagcatgaagagcgtgggcgaggtgatggccatcggcagaaccttcgaggagagcttccagaaggccctgagaatgtgccaccccagcatcgagggcttcacccccagactgcccatgaacaaggagtggcccagcaacctggacctgagaaaggagctgagcgagcccagcagcaccagaatctacgccatcgccaaggccatcgacgacaacatgagcctggacgagatcgagaagctgacctacatcgacaagtggttcctgtacaagatgagagacatcctgaacatggagaagaccctgaagggcctgaacagcgagagcatgaccgaggagaccctgaagagagccaaggagatcggcttcagcgacaagcagatcagcaagtgcctgggcctgaccgaggcccagaccagagagctgagactgaagaagaacatccacccctgggtgaagcagatcgacaccctggccgccgagtaccccagcgtgaccaactacctgtacgtgacctacaacggccaggagcacgacgtgaacttcgacgaccacggcatgatggtgctgggctgcggcccctaccacatcggcagcagcgtggagttcgactggtgcgccgtgagcagcatcagaaccctgagacagctgggcaagaagaccgtggtggtgaactgcaaccccgagaccgtgagcaccgacttcgacgagtgcgacaagctgtacttcgaggagctgagcctggagagaatcctggacatctaccaccaggaggcctgcggcggctgcatcatcagcgtgggcggccagatccccaacaacctggccgtgcccctgtacaagaacggcgtgaagatcatgggcaccagccccctgcagatcgacagagccgaggacagaagcatcttcagcgccgtgctggacgagctgaaggtggcccaggccccctggaaggccgtgaacaccctgaacgaggccctggagttcgccaagagcgtggactacccctgcctgctgagacccagctacgtgctgagcggcagcgccatgaacgtggtgttcagcgaggacgagatgaagaagttcctggaggaggccaccagagtgagccaggagcaccccgtggtgctgaccaagttcgtggagggcgccagagaggtggagatggacgccgtgggcaaggacggcagagtgatcagccacgccatcagcgagcacgtggaggacgccggcgtgcacagcggcgacgccaccctgatgctgcccacccagaccatcagccagggcgccatcgagaaggtgaaggacgccaccagaaagatcgccaaggccttcgccatcagcggccccttcaacgtgcagttcctggtgaagggcaacgacgtgctggtgatcgagtgcaacctgagagccagcagaagcttccccttcgtgagcaagaccctgggcgtggacttcatcgacgtggccaccaaggtgatgatcggcgagaacgtggacgagaagcacctgcccaccctggaccaccccatcatccccgccgactacgtggccatcaaggcccccatgttcagctggcccagactgagagacgccgaccccatcctgagatgcgagatggccagcaccggcgaggtggcctgcttcggcgagggcatccacaccgccttcctgaaggccatgctgagcaccggcttcaagatcccccagaagggcatcctgatcggcatccagcagagcttcagacccagattcctgggcgtggccgagcagctgcacaacgagggcttcaagctgttcgccaccgaggccaccagcgactggctgaacgccaacaacgtgcccgccacccccgtggcctggcccagccaggagggccagaaccccagcctgagcagcatcagaaagctgatcagagacggcagcatcgacctggtgatcaacctgcccaacaacaacaccaagttcgtgcacgacaactacgtgatcagaagaaccgccgtggacagcggcatccccctgctgaccaacttccaggtgaccaagctgttcgccgaggccgtgcagaagagcagaaaggtggacagcaagagcctgttccactacagacagtacagcgccggcaaggccgcctag

SEQ ID NO: 43436 - DNA, 4521 bp, Artificial Sequence
  derived and/or modified sequence
atgccccagataataaaaatgacaagaatattaaccgcatttaaggtagtccgtacactcaagactgggtttggttttacaaatgttacagctcaccaaaaatggaagttcagcaggcctgggattcggttgctgagtgttaaagcccaaacagcacatattgtgctggaagacggtactaaaatgaagggatactcttttggccacccatccagcgttgcaggtgaagtggtgttcaatactggcttgggggggtacccagaggcgatcaccgacccagcttacaaaggccaaattctcaccatggcaaatcctatcataggaaatggcggagcccctgataccaccgccctcgacgaacttgggctgtccaaatacctggaatcaaatggcatcaaagtttctgggctgctagtattggactatagcaaagattataatcactggctggctactaaatcactggggcagtggctacaggaagagaaagtgccagcaatttacggtgtggatacccgtatgctgaccaaaatcattcgcgataagggtaccatgcttggcaagatcgaattcgaaggtcagcctgtggacttcgtggaccccaacaagcagaatctcattgctgaggtgtccaccaaagacgtcaaggtttacgggaaggggaatcccacaaaagtcgttgccgtagactgtggaattaagaataatgtgatccggctactggtaaagcgaggtgccgaagttcacctggtcccttggaaccacgatttcaccaaaatggagtacgacgggatcctgatagccgggggccctgggaatcccgcgctggccgagcccctgatccagaatgtgaggaaaattctcgaatcggacagaaaggagcccctgttcggcatctctactggaaacctgattaccggactggcagccggagccaagacttataaaatgagcatggccaacagaggacagaaccagcctgtcctgaatattactaataaacaggccttcattacagctcagaatcatggctacgctctggataatacactcccggctggctggaagccactgttcgtaaatgttaatgatcagaccaatgagggtatcatgcacgagagcaaaccctttttcgctgtgcagttccaccccgaagtcactcccggccccatcgatactgagtacctctttgactcattcttctcactcatcaagaagggcaaggccaccaccattactagtgttctgccgaagcccgcgttggtagcgagccgggttgaagtgagtaaagtgctgatactgggctccgggggactcagcattggtcaggctggtgagttcgattacagcggcagtcaagctgtgaaagcaatgaaggaggaaaacgtgaaaacggttctgatgaaccccaacatagcaagcgttcagaccaacgaggttggccttaagcaggctgacacggtctactttcttccaattacaccccagtttgtgacagaggtaataaaggctgagcaacccgatggactgattttgggcatgggaggccaaacggcgctgaactgtggcgttgaattattcaaaagaggcgttctcaaagagtatggcgtgaaagtgctcggaacgtccgttgaaagtatcatggccaccgaagacagacagctcttttccgataagctgaatgaaataaacgaaaaaattgctccctccttcgctgtggaatctatcgaagacgctctcaaagccgctgacactatcgggtaccccgtgatgattaggtcagcttacgcgctcggtggcttaggaagcgggatctgtcccaatcgggagactctgatggatctctcaactaaagcttttgctatgacgaatcaaatactggtcgagaaatcagtgactggatggaaagagattgaatatgaggtggtgcgtgacgctgatgataactgtgtaaccgtgtgcaacatggagaacgttgatgcgatgggggtccatactggggatagcgtggtagtggcacccgcgcagaccctgagcaatgctgaattccagatgttgagacgaacaagcataaatgtagtccgccatcttggtattgtcggcgaatgtaatatccaatttgcgctgcaccccacctcaatggagtattgcattatcgaagtaaatgcaaggctctcaagaagctccgccctcgccagcaaagccaccggttatccattggcctttatcgcagccaagatcgccctgggcatcccactaccggaaataaaaaacgtggtgtccggaaagacatcggcatgctttgaaccctcacttgattacatggttactaaaatcccacgatgggacctggacagatttcatgggacttcaagtcgcatcgggagctctatgaagagcgtgggggaggtcatggctatcggccggacctttgaagagagcttccagaaggctttacggatgtgccatccgtccatcgagggtttcaccccacgcctacccatgaataaagaatggccatctaacctcgatcttcgaaaggaattgtcagagccatcatccacccgcatatatgccattgccaaggcgattgacgataacatgtctctcgacgagatagaaaagctgacctatatagacaagtggtttctgtacaaaatgcgtgacatccttaacatggagaaaactcttaaggggctgaattctgaatcaatgactgaggaaacactcaaacgggccaaggaaatcggatttagtgacaagcaaataagcaaatgtctcggcctgacagaggcacagacccgagaactgcggcttaaaaaaaacatccatccttgggtgaagcagatcgatactctggccgctgagtatccaagcgtgacaaactacctgtatgttacttacaacggccaggaacatgatgtgaacttcgatgaccacggtatgatggtgctcggttgtggcccgtaccatattgggtcaagtgtagaattcgactggtgcgctgtctcttccattaggaccctgcgacagttggggaaaaagactgtggtggtcaactgtaaccctgagaccgtctctactgatttcgacgagtgtgataagctgtactttgaagagctctcgttagagcgcatcctcgatatttaccatcaggaggcctgcggtggctgcattatctccgtcggtggacagataccgaacaatctggccgtgcctctatataaaaacggtgtgaagatcatggggacttccccacttcagatcgacagggcggaggatcgaagtatttttagcgcagtcctcgacgagctgaaagtggctcaggcaccctggaaagctgtaaacaccctaaatgaagccctggagttcgccaagagcgtggactacccttgccttcttaggccttcttatgtactgtccggcagcgccatgaacgtcgtgttcagtgaagatgaaatgaagaagttccttgaggaggcgaccagggtgagccaggagcaccccgtcgtactgacgaaatttgtagaaggcgcaagggaggtcgagatggatgccgtgggcaaggatggaagggtcatcagccacgccatctccgaacacgtggaagatgccggggtgcacagcggagatgcaacattgatgctgccgactcagaccatctcgcaaggggctattgagaaggtgaaggacgcaaccagaaagatcgccaaggcctttgccatcagcggaccttttaatgtacaatttctggttaagggaaacgatgtcctggtcatagagtgcaacttaagagcctcacggtcctttcctttcgtctcgaaaaccctgggagtagacttcattgatgtggcgacgaaagttatgatcggagaaaatgtggatgaaaagcatctgccaaccttggatcaccctataatccctgctgattatgtggctatcaaggcccccatgttttcctggcccagattgcgggacgctgaccccattctgaggtgcgagatggcctcaacgggcgaggtcgcctgttttggcgagggtattcatacagcattcctcaaagccatgttatccaccggattcaagattcctcaaaagggcattctcattggaattcagcagagttttcgaccacgctttctgggcgtggctgagcagttgcataacgagggctttaaactcttcgcaaccgaagctacctccgattggttgaatgctaacaacgtacctgctacccccgtagcttggccttcacaggaagggcagaatccatccctgagcagcatcaggaagcttatccgagacggctctatagatctcgtgattaacttgcccaacaataataccaagtttgtccacgacaactatgtcatccgacgcaccgccgttgattcgggaatcccactgcttacgaacttccaggtgacgaaattgtttgccgaagccgttcagaagtcccgcaaagttgactcgaagagcctgttccactacaggcaatatagtgccggaaaggctgcatag

SEQ ID NO: 43437 - DNA, 1542 bp, Artificial Sequence
  derived and/or modified sequence
atgacacgtatcctgactgcgttcaaggtggtgcgcacgctcaaaactggattcggattcaccaacgtgaccgcacaccaaaagtggaagttcagccgtccgggtatcagactgctgtccgttaaggctcagactgcacacattgttttggaggatggcaccaagatgaagggctattcttttggacacccttcttcagtcgcgggcgaggtggtgttcaataccggactgggagggtatcccgaggctattacggaccccgcttataaaggtcagatccttactatggccaatccaattattggtaacggcggcgcgcccgataccacagcattggacgagttgggactcagtaagtacctcgagagtaacggcattaaagtgtcaggactgctggtgttggactattcaaaagactataaccactggcttgcaacaaagtctctcggccagtggctacaggaagagaaggtgcccgccatttatggagttgatactcggatgctcaccaagataattcgggataaaggcacgatgttgggtaaaattgagttcgaaggacaacccgtggattttgtggatcccaacaagcaaaacctaattgcggaagtctcgacaaaagatgtcaaagtgtatggcaagggcaatcccacaaaggtggtcgctgtggattgtggcattaagaataatgttattcgactgcttgtcaaaaggggtgctgaagtacacctcgtcccctggaatcatgatttcaccaagatggaatatgatggcatccttatagctggcggtcccggtaatccagccctcgccgagccattgatccagaacgtgcgaaaaattctagaaagtgataggaaggagcccctgttcgggatctctaccggaaatctgatcacaggcctggcagccggggctaagacttacaagatgagtatggcaaatcgtggccaaaaccagcctgtcctaaacatcacaaataaacaggcctttatcaccgcgcagaaccatggttatgccctcgacaatacccttccggctgggtggaagcctctcttcgttaacgttaacgaccagacaaatgaaggaatcatgcacgaaagcaagccgttttttgcggtgcagtttcatcctgaggtgacgcccggaccaattgacaccgagtacctgttcgattcatttttctctctcatcaagaaggggaaagccaccactattacatccgttttgcctaagcctgcccttgtggccagccgcgttgaggtgagcaaggtgctgatattgggctcaggcggtctcagcatcgggcaggctggggagttcgactactctgggtcccaggccgtgaaggctatgaaggaagagaatgtcaagactgtgctcatgaacccgaacatagccagtgtgcagaccaatgaagtaggtttgaagcaggccgataccgtgtacttcctgccgattacaccccagttcgtcaccgaggttataaaagctgaacagcccgacggtcttatcctgggtatgggagcacgccagttgtag

SEQ ID NO: 43438 - DNA, 4527 bp, Artificial Sequence
  derived and/or modified sequence
agacccagaccacagataatcaaaatgacacgcatcttaactgcgttcaaggttgtgaggacactgaagactgggtttggtttcacaaacgttactgcccaccagaaatggaagttttccaggcccggaatacgactcctcagcgtgaaagcccaaaccgcccatattgtactggaagatgggactaagatgaagggttactcctttggacacccaagctccgttgcgggcgaagttgtttttaacacaggattgggaggctaccctgaggctataacagaccccgcctataaggggcagatactgacaatggcaaaccctatcattggaaatgggggtgctccagataccaccgccctggatgagctcggcctctctaagtacctggaatccaatggcattaaggtgagtggactgctagtgttggactacagtaaagactacaaccactggcttgctacaaaatctctgggccagtggttgcaggaagagaaggtaccagcaatttatggggtggatactcggatgctgacaaagattattagggataaaggcactatgttgggaaagattgaattcgaagggcagcctgtggactttgtggaccccaataaacagaacctcattgccgaagtgtcaactaaggacgtgaaagtatacggaaaaggtaaccctaccaaagtggtggccgttgattgcggcattaaaaacaatgtgattcggctgcttgtcaaaaggggcgctgaagtgcatctggtaccctggaatcatgacttcacgaaaatggaatacgacggtatcctcatagccggcggaccgggcaatccggctctggctgaaccactcatccagaatgtccggaaaatcctcgaatctgatcgtaaggaacccctgtttgggatctccacagggaatctgattaccggactcgccgccggcgccaagacctacaagatgtctatggccaaccgcggacagaatcagcctgtgctgaatatcaccaacaaacaagctttcataaccgcccaaaatcacggctatgctctggataacaccttgcccgcaggctggaagccgctgttcgtgaacgtgaatgaccaaactaatgagggcatcatgcacgagtctaagccgttcttcgccgtccagttccaccccgaggtcacacccgggccaatagatactgaataccttttcgactccttttttagcttgattaaaaaagggaaggccaccacaataacatcagtccttccaaagcccgcgcttgtcgcaagtagagttgaggtcagtaaggtactgatactagggtctgggggcctaagcatagggcaggctggggaattcgattatagtggttcccaggcagttaaagcgatgaaggaagaaaacgtgaagactgttctcatgaacccgaatattgcctcagtacagaccaacgaggtgggcttgaaacaggcagataccgtctatttcctgccaatcacaccacagtttgtaactgaagtgatcaaggccgagcagccagatggtctgatcctggggatgggcggtcaaactgcattaaactgcggggtcgaactattcaaaaggggcgttctgaaggaatacggtgtgaaggttttgggcacttctgtcgaatccatcatggccaccgaagataggcagctattctctgataaactcaatgagattaatgagaagatcgcccccagctttgctgtcgaaagcatcgaagacgccttgaaggccgccgacaccataggatatcctgtgatgatcaggtctgcgtatgccttgggggggttgggatcaggaatttgtcctaatcgcgagactctgatggatctctccacaaaagcattcgccatgaccaatcagatcctggtcgaaaaatcagttaccgggtggaaggagatcgagtatgaggtggtccgggacgccgacgataactgcgtcacggtgtgcaatatggagaacgtcgatgctatgggagtccatacaggagattctgtggtggtagctccagctcagacactgtccaatgctgaattccagatgctcagaagaacctctattaacgttgtcaggcatttggggatcgtgggagagtgcaatattcagttcgccctgcaccccacaagcatggagtattgtatcatagaggtgaatgccaggttgtccaggagttccgcgctagcctcaaaagccaccggatatccattggcatttattgctgccaaaatcgctctcggtattcccctgccggaaataaaaaatgtggtgtccggaaaaacctccgcttgctttgaaccttccctcgactatatggtgacaaaaatcccaagatgggatctcgataggttccatggaacatctagtcgaatcggctccagcatgaagagcgtcggtgaggtgatggccatcggtaggacattcgaagagagcttccagaaggccctccggatgtgccatccgtctatcgagggtttcacgccccgactgcccatgaataaggaatggcccagtaatctcgaccttcggaaggagctgagcgagccctcttctactcggatctatgccattgcaaaggcaatcgacgacaatatgagcctcgatgagatcgaaaagcttacatatattgataagtggtttctttataagatgagagacatcctgaacatggaaaaaacactcaagggcttgaactccgaatctatgaccgaagaaaccctaaaaagagcaaaagagattggcttcagcgataagcagatctctaaatgtttaggattgacagaagctcagacccgcgagctgcgcctgaagaagaatatccacccatgggtcaagcaaatcgacactctggcagcagaatatcccagtgttaccaattacctctatgtgacctacaatggacaggaacacgatgttaattttgacgaccatggcatgatggtgctgggatgcggcccttatcacatcggatccagcgttgaattcgactggtgcgccgtgagctccattcgtacgctgcgccaactcggaaagaagaccgtcgttgtgaattgcaaccccgaaaccgtgtcgactgactttgacgagtgcgataaattgtactttgaagagctgtcactggaacgcattctggacatctaccatcaagaggcatgcggggggtgtatcatcagcgtaggtggccagattcccaataacttggctgtaccgctgtataagaatggtgttaagataatgggcacttccccccttcagattgacagagccgaagatcgatcaattttttccgcggtgttagacgaacttaaggtggcccaggctccttggaaggccgtgaacacgctcaacgaagctctagagttcgcaaaaagcgttgactacccctgcctgctgcgaccctcctacgtcctgtccggaagtgccatgaatgtggtcttcagcgaggatgagatgaagaagttcctcgaggaggcaacacgcgtctctcaagaacaccccgtggtcctgactaagttcgttgagggagccagggaagtcgaaatggatgccgttggcaaggatggccgcgtgattagtcatgcaatcagcgagcatgtggaggatgctggcgtccattcgggcgacgccacgctgatgctgcccacccagacaatctcacagggagccatcgagaaagtgaaggatgcgacacgcaaaatagctaaagccttcgccatctccgggcctttcaatgttcagtttttagtgaagggaaacgatgttcttgtgatagagtgcaatctcagagccagcagatcattccccttcgtaagtaagacactgggcgtggactttatcgatgttgctactaaggttatgatcggagaaaacgtggacgagaagcatctgcccacacttgaccaccccatcattccagccgattatgttgctattaaggctcccatgttttcctggcccagactgagagatgccgatccaatcttgcgttgcgaaatggcttcgactggagaggtggcttgctttggtgagggaatccatacggcttttcttaaagcgatgctaagcacgggatttaagattcctcaaaaagggatactaataggtatccagcagagctttcggcctcgcttcctcggtgtagcagagcagctccacaatgagggtttcaaactgttcgcaaccgaggccacatctgactggttaaatgctaacaacgtgcctgcgacaccagtggcttggccgagtcaggagggccagaatccctctctctcatctatcagaaagctgataagagacggctcaattgacctcgtgataaatctacctaacaacaacaccaagtttgtgcacgacaactacgtcatcagaaggacagccgtggacagtggaattcctctgctgaccaacttccaggtgaccaagttgttcgcagaggctgtgcagaaatccaggaaggtggattccaaatcattgtttcactatcggcagtatagtgccggtaaagcggcatag

SEQ ID NO: 43439 - DNA, 5821 bp, Artificial Sequence
  derived and/or modified sequence
ggggttaagagaaggaggagctgtggctgaagacatttaatggcagaatgaatggaaattcaaagatcgctgtgcagtcagccttaaacactgactgcacccctcccagatttcttttacattaactaaaaagtcttatcacacaatctcataaaatttatgtaatttcatttaattttagccacaaatcatcaaaatgacgaggattttgacagctttcaaagtggtgaggacactgaagactggttttggctttaccaatgtgactgcacaccaaaaatggaaattttcaagacctggcatcaggctcctttctgtcaaggcacagacagcacacattgtcctggaagatggaactaagatgaaaggttactcctttggccatccatcctctgttgctggtgaagtggtttttaatactggcctgggagggtacccagaagctattactgaccctgcctacaaaggacagattctcacaatggccaaccctattattgggaatggtggagctcctgatactactgctctggatgaactgggacttagcaaatatttggagtctaatggaatcaaggtttcaggtttgctggtgctggattatagtaaagactacaaccactggctggctaccaagagtttagggcaatggctacaggaagaaaaggttcctgcaatttatggagtggacacaagaatgctgactaaaataattcgggataagggtaccatgcttgggaagattgaatttgaaggtcagcctgtggattttgtggatccaaataaacagaatttgattgctgaggtttcaaccaaggatgtcaaagtgtacggcaaaggaaaccccacaaaagtggtagctgtagactgtgggattaaaaacaatgtaatccgcctgctagtaaagcgaggagctgaagtgcacttagttccctggaaccatgatttcaccaagatggagtatgatgggattttgatcgcgggaggaccggggaacccagctcttgcagaaccactaattcagaatgtcagaaagattttggagagtgatcgcaaggagccattgtttggaatcagtacaggaaacttaataacaggattggctgctggtgccaaaacctacaagatgtccatggccaacagagggcagaatcagcctgttttgaatatcacaaacaaacaggctttcattactgctcagaatcatggctatgccttggacaacaccctccctgctggctggaaaccactttttgtgaatgtcaacgatcaaacaaatgaggggattatgcatgagagcaaacccttcttcgctgtgcagttccacccagaggtcaccccggggccaatagacactgagtacctgtttgattcctttttctcactgataaagaaaggaaaagctaccaccattacatcagtcttaccgaagccagcactagttgcatctcgggttgaggtttccaaagtccttattctaggatcaggaggtctgtccattggtcaggctggagaatttgattactcaggatctcaagctgtaaaagccatgaaggaagaaaatgtcaaaactgttctgatgaacccaaacattgcatcagtccagaccaatgaggtgggcttaaagcaagcggatactgtctactttcttcccatcacccctcagtttgtcacagaggtcatcaaggcagaacagccagatgggttaattctgggcatgggtggccagacagctctgaactgtggagtggaactattcaagagaggtgtgctcaaggaatatggtgtgaaagtcctgggaacttcagttgagtccattatggctacggaagacaggcagctgttttcagataaactaaatgagatcaatgaaaagattgctccaagttttgcagtggaatcgattgaggatgcactgaaggcagcagacaccattggctacccagtgatgatccgttccgcctatgcactgggtgggttaggctcaggcatctgtcccaacagagagactttgatggacctcagcacaaaggcctttgctatgaccaaccaaattctggtggagaagtcagtgacaggttggaaagaaatagaatatgaagtggttcgagatgctgatgacaattgtgtcactgtctgtaacatggaaaatgttgatgccatgggtgttcacacaggtgactcagttgttgtggctcctgcccagacactctccaatgccgagtttcagatgttgagacgtacttcaatcaatgttgttcgccacttgggcattgtgggtgaatgcaacattcagtttgcccttcatcctacctcaatggaatactgcatcattgaagtgaatgccagactgtcccgaagctctgctctggcctcaaaagccactggctacccattggcattcattgctgcaaagattgccctaggaatcccacttccagaaattaagaacgtcgtatccgggaagacatcagcctgttttgaacctagcctggattacatggtcaccaagattccccgctgggatcttgaccgttttcatggaacatctagccgaattggtagctctatgaaaagtgtaggagaggtcatggctattggtcgtacctttgaggagagtttccagaaagctttacggatgtgccacccatctatagaaggtttcactccccgtctcccaatgaacaaagaatggccatctaatttagatcttagaaaagagttgtctgaaccaagcagcacgcgtatctatgccattgccaaggccattgatgacaacatgtcccttgatgagattgagaagctcacatacattgacaagtggtttttgtataagatgcgtgatattttaaacatggaaaagacactgaaaggcctcaacagtgagtccatgacagaagaaaccctgaaaagggcaaaggagattgggttctcagataagcagatttcaaaatgccttgggctcactgaggcccagacaagggagctgaggttaaagaaaaacatccacccttgggttaaacagattgatacactggctgcagaatacccatcagtaacaaactatctctatgttacctacaatggtcaggagcatgatgtcaattttgatgaccatggaatgatggtgctaggctgtggtccatatcacattggcagcagtgtggaatttgattggtgtgctgtctctagtatccgcacactgcgtcaacttggcaagaagacggtggtggtgaattgcaatcctgagactgtgagcacagactttgatgagtgtgacaaactgtactttgaagagttgtccttggagagaatcctagacatctaccatcaggaggcatgtggtggctgcatcatatcagttggaggccagattccaaacaacctggcagttcctctatacaagaatggtgtcaagatcatgggcacaagccccctgcagatcgacagggctgaggatcgctccatcttctcagctgtcttggatgagctgaaggtggctcaggcaccttggaaagctgttaatactttgaatgaagcactggaatttgcaaagtctgtggactacccctgcttgttgaggccttcctatgttttgagtgggtctgctatgaatgtggtattctctgaggatgagatgaaaaaattcctagaagaggcgactagagtttctcaggagcacccagtggtgctgacaaaatttgttgaaggggcccgagaagtagaaatggacgctgttggcaaagatggaagggttatctctcatgccatctctgaacatgttgaagatgcaggtgtccactcgggagatgccactctgatgctgcccacacaaaccatcagccaaggggccattgaaaaggtgaaggatgctacccggaagattgcaaaggcttttgccatctctggtccattcaacgtccaatttcttgtcaaaggaaatgatgtcttggtgattgagtgtaacttgagagcttctcgatccttcccctttgtttccaagactcttggggttgacttcattgatgtggccaccaaggtgatgattggagagaatgttgatgagaaacatcttccaacattggaccatcccataattcctgctgactatgttgcaattaaggctcccatgttttcctggccccggttgagggatgctgaccccattctgagatgtgagatggcttccactggagaggtggcttgctttggtgaaggtattcatacagccttcctaaaggcaatgctttccacaggatttaagataccccagaaaggcatcctgataggcatccagcaatcattccggccaagattccttggtgtggctgaacaattacacaatgaaggtttcaagctgtttgccacggaagccacatcagactggctcaacgccaacaatgtccctgccaccccagtggcatggccgtctcaagaaggacagaatcccagcctctcttccatcagaaaattgattagagatggcagcattgacctagtgattaaccttcccaacaacaacactaaatttgtccatgataattatgtgattcggaggacagctgttgatagtggaatccctctcctcactaattttcaggtgaccaaactttttgctgaagctgtgcagaaatctcgcaaggtggactccaagagtcttttccactacaggcagtacagtgctggaaaagcagcatagagatgcagacaccccagccccattattaaatcaacctgagccacatgttatctaaaggaactgattcacaactttctcagagatgaatattgataactaaacttcatttcagtttactttgttatgccttaatattctgtgtcttttgcaattaaattgtcagtcacttcttcaaaaccttacagtccttcctaagttactcttcatgagatttcatccatttactaatactgtatttttggtggactaggcttgcctatgtgcttatgtgtagctttttactttttatggtgctgattaatggtgatcaaggtaggaaaagttgctgttctattttctgaactctttctatactttaagatactctatttttaaaacactatctgcaaactcaggacactttaacagggcagaatactctaaaaacttgataaaattaaatatagatttaatttatgaaccttccatcatgatgtttgtgtattgcttctttttggatcctcattctcacccatttggctaatccaggaatattgttatcccttcccattatattgaagttgagaaatgtgacagaggcatttagagtatggacttttcttttctttttctttttctttttttctttttgagatggagtcacactctccaggctggagtgcagtggcacaatctcggctcactgcaatttccgtctcccaagttcaagcgattctcctgctttagactatggatttctttaaggaatactggtttgcagttttgttttctggactatatcagcagatggtagacagtgtttatgtagatgtgttgttgtttttatcattggattttaacttggcccgagtgaaataatcagatttttgtcattcacactctcccccagttttggaataacttggaagtaaggttcattcccttaagacgatggattctgttgaactatggggtcccacactgcactattaattccacccactgtaagggcaaggacaccattccttctacatataagaaaaaagtctctccccaagggcagcctttgttacttttaaatattttctgttattacaagtgctctaattgtgaacttttaaataaaatactattaagaggtaa

SEQ ID NO: 43440 - DNA, 5698 bp, Artificial Sequence
  derived and/or modified sequence
gaaatgtagttgctttcttaacctcatcaaattcatgaagatttagccgaggcccatgccacaaatcatcaaaatgacgaggattttgacagctttcaaagtggtgaggacactgaagactggttttggctttaccaatgtgactgcacaccaaaaatggaaattttcaagacctggcatcaggctcctttctgtcaaggcacagacagcacacattgtcctggaagatggaactaagatgaaaggttactcctttggccatccatcctctgttgctggtgaagtggtttttaatactggcctgggagggtacccagaagctattactgaccctgcctacaaaggacagattctcacaatggccaaccctattattgggaatggtggagctcctgatactactgctctggatgaactgggacttagcaaatatttggagtctaatggaatcaaggtttcaggtttgctggtgctggattatagtaaagactacaaccactggctggctaccaagagtttagggcaatggctacaggaagaaaaggttcctgcaatttatggagtggacacaagaatgctgactaaaataattcgggataagggtaccatgcttgggaagattgaatttgaaggtcagcctgtggattttgtggatccaaataaacagaatttgattgctgaggtttcaaccaaggatgtcaaagtgtacggcaaaggaaaccccacaaaagtggtagctgtagactgtgggattaaaaacaatgtaatccgcctgctagtaaagcgaggagctgaagtgcacttagttccctggaaccatgatttcaccaagatggagtatgatgggattttgatcgcgggaggaccggggaacccagctcttgcagaaccactaattcagaatgtcagaaagattttggagagtgatcgcaaggagccattgtttggaatcagtacaggaaacttaataacaggattggctgctggtgccaaaacctacaagatgtccatggccaacagagggcagaatcagcctgttttgaatatcacaaacaaacaggctttcattactgctcagaatcatggctatgccttggacaacaccctccctgctggctggaaaccactttttgtgaatgtcaacgatcaaacaaatgaggggattatgcatgagagcaaacccttcttcgctgtgcagttccacccagaggtcaccccggggccaatagacactgagtacctgtttgattcctttttctcactgataaagaaaggaaaagctaccaccattacatcagtcttaccgaagccagcactagttgcatctcgggttgaggtttccaaagtccttattctaggatcaggaggtctgtccattggtcaggctggagaatttgattactcaggatctcaagctgtaaaagccatgaaggaagaaaatgtcaaaactgttctgatgaacccaaacattgcatcagtccagaccaatgaggtgggcttaaagcaagcggatactgtctactttcttcccatcacccctcagtttgtcacagaggtcatcaaggcagaacagccagatgggttaattctgggcatgggtggccagacagctctgaactgtggagtggaactattcaagagaggtgtgctcaaggaatatggtgtgaaagtcctgggaacttcagttgagtccattatggctacggaagacaggcagctgttttcagataaactaaatgagatcaatgaaaagattgctccaagttttgcagtggaatcgattgaggatgcactgaaggcagcagacaccattggctacccagtgatgatccgttccgcctatgcactgggtgggttaggctcaggcatctgtcccaacagagagactttgatggacctcagcacaaaggcctttgctatgaccaaccaaattctggtggagaagtcagtgacaggttggaaagaaatagaatatgaagtggttcgagatgctgatgacaattgtgtcactgtctgtaacatggaaaatgttgatgccatgggtgttcacacaggtgactcagttgttgtggctcctgcccagacactctccaatgccgagtttcagatgttgagacgtacttcaatcaatgttgttcgccacttgggcattgtgggtgaatgcaacattcagtttgcccttcatcctacctcaatggaatactgcatcattgaagtgaatgccagactgtcccgaagctctgctctggcctcaaaagccactggctacccattggcattcattgctgcaaagattgccctaggaatcccacttccagaaattaagaacgtcgtatccgggaagacatcagcctgttttgaacctagcctggattacatggtcaccaagattccccgctgggatcttgaccgttttcatggaacatctagccgaattggtagctctatgaaaagtgtaggagaggtcatggctattggtcgtacctttgaggagagtttccagaaagctttacggatgtgccacccatctatagaaggtttcactccccgtctcccaatgaacaaagaatggccatctaatttagatcttagaaaagagttgtctgaaccaagcagcacgcgtatctatgccattgccaaggccattgatgacaacatgtcccttgatgagattgagaagctcacatacattgacaagtggtttttgtataagatgcgtgatattttaaacatggaaaagacactgaaaggcctcaacagtgagtccatgacagaagaaaccctgaaaagggcaaaggagattgggttctcagataagcagatttcaaaatgccttgggctcactgaggcccagacaagggagctgaggttaaagaaaaacatccacccttgggttaaacagattgatacactggctgcagaatacccatcagtaacaaactatctctatgttacctacaatggtcaggagcatgatgtcaattttgatgaccatggaatgatggtgctaggctgtggtccatatcacattggcagcagtgtggaatttgattggtgtgctgtctctagtatccgcacactgcgtcaacttggcaagaagacggtggtggtgaattgcaatcctgagactgtgagcacagactttgatgagtgtgacaaactgtactttgaagagttgtccttggagagaatcctagacatctaccatcaggaggcatgtggtggctgcatcatatcagttggaggccagattccaaacaacctggcagttcctctatacaagaatggtgtcaagatcatgggcacaagccccctgcagatcgacagggctgaggatcgctccatcttctcagctgtcttggatgagctgaaggtggctcaggcaccttggaaagctgttaatactttgaatgaagcactggaatttgcaaagtctgtggactacccctgcttgttgaggccttcctatgttttgagtgggtctgctatgaatgtggtattctctgaggatgagatgaaaaaattcctagaagaggcgactagagtttctcaggagcacccagtggtgctgacaaaatttgttgaaggggcccgagaagtagaaatggacgctgttggcaaagatggaagggttatctctcatgccatctctgaacatgttgaagatgcaggtgtccactcgggagatgccactctgatgctgcccacacaaaccatcagccaaggggccattgaaaaggtgaaggatgctacccggaagattgcaaaggcttttgccatctctggtccattcaacgtccaatttcttgtcaaaggaaatgatgtcttggtgattgagtgtaacttgagagcttctcgatccttcccctttgtttccaagactcttggggttgacttcattgatgtggccaccaaggtgatgattggagagaatgttgatgagaaacatcttccaacattggaccatcccataattcctgctgactatgttgcaattaaggctcccatgttttcctggccccggttgagggatgctgaccccattctgagatgtgagatggcttccactggagaggtggcttgctttggtgaaggtattcatacagccttcctaaaggcaatgctttccacaggatttaagataccccagaaaggcatcctgataggcatccagcaatcattccggccaagattccttggtgtggctgaacaattacacaatgaaggtttcaagctgtttgccacggaagccacatcagactggctcaacgccaacaatgtccctgccaccccagtggcatggccgtctcaagaaggacagaatcccagcctctcttccatcagaaaattgattagagatggcagcattgacctagtgattaaccttcccaacaacaacactaaatttgtccatgataattatgtgattcggaggacagctgttgatagtggaatccctctcctcactaattttcaggtgaccaaactttttgctgaagctgtgcagaaatctcgcaaggtggactccaagagtcttttccactacaggcagtacagtgctggaaaagcagcatagagatgcagacaccccagccccattattaaatcaacctgagccacatgttatctaaaggaactgattcacaactttctcagagatgaatattgataactaaacttcatttcagtttactttgttatgccttaatattctgtgtcttttgcaattaaattgtcagtcacttcttcaaaaccttacagtccttcctaagttactcttcatgagatttcatccatttactaatactgtatttttggtggactaggcttgcctatgtgcttatgtgtagctttttactttttatggtgctgattaatggtgatcaaggtaggaaaagttgctgttctattttctgaactctttctatactttaagatactctatttttaaaacactatctgcaaactcaggacactttaacagggcagaatactctaaaaacttgataaaattaaatatagatttaatttatgaaccttccatcatgatgtttgtgtattgcttctttttggatcctcattctcacccatttggctaatccaggaatattgttatcccttcccattatattgaagttgagaaatgtgacagaggcatttagagtatggacttttcttttctttttctttttctttttttctttttgagatggagtcacactctccaggctggagtgcagtggcacaatctcggctcactgcaatttccgtctcccaagttcaagcgattctcctgctttagactatggatttctttaaggaatactggtttgcagttttgttttctggactatatcagcagatggtagacagtgtttatgtagatgtgttgttgtttttatcattggattttaacttggcccgagtgaaataatcagatttttgtcattcacactctcccccagttttggaataacttggaagtaaggttcattcccttaagacgatggattctgttgaactatggggtcccacactgcactattaattccacccactgtaagggcaaggacaccattccttctacatataagaaaaaagtctctccccaagggcagcctttgttacttttaaatattttctgttattacaagtgctctaattgtgaacttttaaataaaatactattaagaggtaa

SEQ ID NO: 43441 - DNA, 4770 bp, Artificial Sequence
  derived and/or modified sequence
gagaataaacagcagcaggagaaggaggggaagggtgttggaggggagagagggcatgcatgcacatacatagatgattcagacggcttcagaaaagaaccacaaggaatgcttagaggagttttgtatttaatctaaatatttttacttttttgtgtgtgagctcttagttcattgttcaaacccatctttccaaataaattcttctggtgatatccagaaaaatctgaagtctattgtgacttccccacacccaggggcctccagtagcaaatcttcattgtcagaactctcagaaaagacttcgagtacctgtttgattcctttttctcactgataaagaaaggaaaagctaccaccattacatcagtcttaccgaagccagcactagttgcatctcgggttgaggtttccaaagtccttattctaggatcaggaggtctgtccattggtcaggctggagaatttgattactcaggatctcaagctgtaaaagccatgaaggaagaaaatgtcaaaactgttctgatgaacccaaacattgcatcagtccagaccaatgaggtgggcttaaagcaagcggatactgtctactttcttcccatcacccctcagtttgtcacagaggtcatcaaggcagaacagccagatgggttaattctgggcatgggtggccagacagctctgaactgtggagtggaactattcaagagaggtgtgctcaaggaatatggtgtgaaagtcctgggaacttcagttgagtccattatggctacggaagacaggcagctgttttcagataaactaaatgagatcaatgaaaagattgctccaagttttgcagtggaatcgattgaggatgcactgaaggcagcagacaccattggctacccagtgatgatccgttccgcctatgcactgggtgggttaggctcaggcatctgtcccaacagagagactttgatggacctcagcacaaaggcctttgctatgaccaaccaaattctggtggagaagtcagtgacaggttggaaagaaatagaatatgaagtggttcgagatgctgatgacaattgtgtcactgtctgtaacatggaaaatgttgatgccatgggtgttcacacaggtgactcagttgttgtggctcctgcccagacactctccaatgccgagtttcagatgttgagacgtacttcaatcaatgttgttcgccacttgggcattgtgggtgaatgcaacattcagtttgcccttcatcctacctcaatggaatactgcatcattgaagtgaatgccagactgtcccgaagctctgctctggcctcaaaagccactggctacccattggcattcattgctgcaaagattgccctaggaatcccacttccagaaattaagaacgtcgtatccgggaagacatcagcctgttttgaacctagcctggattacatggtcaccaagattccccgctgggatcttgaccgttttcatggaacatctagccgaattggtagctctatgaaaagtgtaggagaggtcatggctattggtcgtacctttgaggagagtttccagaaagctttacggatgtgccacccatctatagaaggtttcactccccgtctcccaatgaacaaagaatggccatctaatttagatcttagaaaagagttgtctgaaccaagcagcacgcgtatctatgccattgccaaggccattgatgacaacatgtcccttgatgagattgagaagctcacatacattgacaagtggtttttgtataagatgcgtgatattttaaacatggaaaagacactgaaaggcctcaacagtgagtccatgacagaagaaaccctgaaaagggcaaaggagattgggttctcagataagcagatttcaaaatgccttgggctcactgaggcccagacaagggagctgaggttaaagaaaaacatccacccttgggttaaacagattgatacactggctgcagaatacccatcagtaacaaactatctctatgttacctacaatggtcaggagcatgatgtcaattttgatgaccatggaatgatggtgctaggctgtggtccatatcacattggcagcagtgtggaatttgattggtgtgctgtctctagtatccgcacactgcgtcaacttggcaagaagacggtggtggtgaattgcaatcctgagactgtgagcacagactttgatgagtgtgacaaactgtactttgaagagttgtccttggagagaatcctagacatctaccatcaggaggcatgtggtggctgcatcatatcagttggaggccagattccaaacaacctggcagttcctctatacaagaatggtgtcaagatcatgggcacaagccccctgcagatcgacagggctgaggatcgctccatcttctcagctgtcttggatgagctgaaggtggctcaggcaccttggaaagctgttaatactttgaatgaagcactggaatttgcaaagtctgtggactacccctgcttgttgaggccttcctatgttttgagtgggtctgctatgaatgtggtattctctgaggatgagatgaaaaaattcctagaagaggcgactagagtttctcaggagcacccagtggtgctgacaaaatttgttgaaggggcccgagaagtagaaatggacgctgttggcaaagatggaagggttatctctcatgccatctctgaacatgttgaagatgcaggtgtccactcgggagatgccactctgatgctgcccacacaaaccatcagccaaggggccattgaaaaggtgaaggatgctacccggaagattgcaaaggcttttgccatctctggtccattcaacgtccaatttcttgtcaaaggaaatgatgtcttggtgattgagtgtaacttgagagcttctcgatccttcccctttgtttccaagactcttggggttgacttcattgatgtggccaccaaggtgatgattggagagaatgttgatgagaaacatcttccaacattggaccatcccataattcctgctgactatgttgcaattaaggctcccatgttttcctggccccggttgagggatgctgaccccattctgagatgtgagatggcttccactggagaggtggcttgctttggtgaaggtattcatacagccttcctaaaggcaatgctttccacaggatttaagataccccagaaaggcatcctgataggcatccagcaatcattccggccaagattccttggtgtggctgaacaattacacaatgaaggtttcaagctgtttgccacggaagccacatcagactggctcaacgccaacaatgtccctgccaccccagtggcatggccgtctcaagaaggacagaatcccagcctctcttccatcagaaaattgattagagatggcagcattgacctagtgattaaccttcccaacaacaacactaaatttgtccatgataattatgtgattcggaggacagctgttgatagtggaatccctctcctcactaattttcaggtgaccaaactttttgctgaagctgtgcagaaatctcgcaaggtggactccaagagtcttttccactacaggcagtacagtgctggaaaagcagcatagagatgcagacaccccagccccattattaaatcaacctgagccacatgttatctaaaggaactgattcacaactttctcagagatgaatattgataactaaacttcatttcagtttactttgttatgccttaatattctgtgtcttttgcaattaaattgtcagtcacttcttcaaaaccttacagtccttcctaagttactcttcatgagatttcatccatttactaatactgtatttttggtggactaggcttgcctatgtgcttatgtgtagctttttactttttatggtgctgattaatggtgatcaaggtaggaaaagttgctgttctattttctgaactctttctatactttaagatactctatttttaaaacactatctgcaaactcaggacactttaacagggcagaatactctaaaaacttgataaaattaaatatagatttaatttatgaaccttccatcatgatgtttgtgtattgcttctttttggatcctcattctcacccatttggctaatccaggaatattgttatcccttcccattatattgaagttgagaaatgtgacagaggcatttagagtatggacttttcttttctttttctttttctttttttctttttgagatggagtcacactctccaggctggagtgcagtggcacaatctcggctcactgcaatttccgtctcccaagttcaagcgattctcctgctttagactatggatttctttaaggaatactggtttgcagttttgttttctggactatatcagcagatggtagacagtgtttatgtagatgtgttgttgtttttatcattggattttaacttggcccgagtgaaataatcagatttttgtcattcacactctcccccagttttggaataacttggaagtaaggttcattcccttaagacgatggattctgttgaactatggggtcccacactgcactattaattccacccactgtaagggcaaggacaccattccttctacatataagaaaaaagtctctccccaagggcagcctttgttacttttaaatattttctgttattacaagtgctctaattgtgaacttttaaataaaatactattaagaggtaa

SEQ ID NO: 43442 - DNA, 1542 bp, Artificial Sequence
  derived and/or modified sequence
atgacgaggattttgacagctttcaaagtggtgaggacactgaagactggttttggctttaccaatgtgactgcacaccaaaaatggaaattttcaagacctggcatcaggctcctttctgtcaaggcacagacagcacacattgtcctggaagatggaactaagatgaaaggttactcctttggccatccatcctctgttgctggtgaagtggtttttaatactggcctgggagggtacccagaagctattactgaccctgcctacaaaggacagattctcacaatggccaaccctattattgggaatggtggagctcctgatactactgctctggatgaactgggacttagcaaatatttggagtctaatggaatcaaggtttcaggtttgctggtgctggattatagtaaagactacaaccactggctggctaccaagagtttagggcaatggctacaggaagaaaaggttcctgcaatttatggagtggacacaagaatgctgactaaaataattcgggataagggtaccatgcttgggaagattgaatttgaaggtcagcctgtggattttgtggatccaaataaacagaatttgattgctgaggtttcaaccaaggatgtcaaagtgtacggcaaaggaaaccccacaaaagtggtagctgtagactgtgggattaaaaacaatgtaatccgcctgctagtaaagcgaggagctgaagtgcacttagttccctggaaccatgatttcaccaagatggagtatgatgggattttgatcgcgggaggaccggggaacccagctcttgcagaaccactaattcagaatgtcagaaagattttggagagtgatcgcaaggagccattgtttggaatcagtacaggaaacttaataacaggattggctgctggtgccaaaacctacaagatgtccatggccaacagagggcagaatcagcctgttttgaatatcacaaacaaacaggctttcattactgctcagaatcatggctatgccttggacaacaccctccctgctggctggaaaccactttttgtgaatgtcaacgatcaaacaaatgaggggattatgcatgagagcaaacccttcttcgctgtgcagttccacccagaggtcaccccggggccaatagacactgagtacctgtttgattcctttttctcactgataaagaaaggaaaagctaccaccattacatcagtcttaccgaagccagcactagttgcatctcgggttgaggtttccaaagtccttattctaggatcaggaggtctgtccattggtcaggctggagaatttgattactcaggatctcaagctgtaaaagccatgaaggaagaaaatgtcaaaactgttctgatgaacccaaacattgcatcagtccagaccaatgaggtgggcttaaagcaagcggatactgtctactttcttcccatcacccctcagtttgtcacagaggtcatcaaggcagaacagccagatgggttaattctgggcatgggtgccagacagctctga

SEQ ID NO: 43443 - DNA, 5647 bp, Artificial Sequence
  derived and/or modified sequence
agacctaggccacaaatcatcaaaatgacgaggattttgacagctttcaaagtggtgaggacactgaagactggttttggctttaccaatgtgactgcacaccaaaaatggaaattttcaagacctggcatcaggctcctttctgtcaaggcacagacagcacacattgtcctggaagatggaactaagatgaaaggttactcctttggccatccatcctctgttgctggtgaagtggtttttaatactggcctgggagggtacccagaagctattactgaccctgcctacaaaggacagattctcacaatggccaaccctattattgggaatggtggagctcctgatactactgctctggatgaactgggacttagcaaatatttggagtctaatggaatcaaggtttcaggtttgctggtgctggattatagtaaagactacaaccactggctggctaccaagagtttagggcaatggctacaggaagaaaaggttcctgcaatttatggagtggacacaagaatgctgactaaaataattcgggataagggtaccatgcttgggaagattgaatttgaaggtcagcctgtggattttgtggatccaaataaacagaatttgattgctgaggtttcaaccaaggatgtcaaagtgtacggcaaaggaaaccccacaaaagtggtagctgtagactgtgggattaaaaacaatgtaatccgcctgctagtaaagcgaggagctgaagtgcacttagttccctggaaccatgatttcaccaagatggagtatgatgggattttgatcgcgggaggaccggggaacccagctcttgcagaaccactaattcagaatgtcagaaagattttggagagtgatcgcaaggagccattgtttggaatcagtacaggaaacttaataacaggattggctgctggtgccaaaacctacaagatgtccatggccaacagagggcagaatcagcctgttttgaatatcacaaacaaacaggctttcattactgctcagaatcatggctatgccttggacaacaccctccctgctggctggaaaccactttttgtgaatgtcaacgatcaaacaaatgaggggattatgcatgagagcaaacccttcttcgctgtgcagttccacccagaggtcaccccggggccaatagacactgagtacctgtttgattcctttttctcactgataaagaaaggaaaagctaccaccattacatcagtcttaccgaagccagcactagttgcatctcgggttgaggtttccaaagtccttattctaggatcaggaggtctgtccattggtcaggctggagaatttgattactcaggatctcaagctgtaaaagccatgaaggaagaaaatgtcaaaactgttctgatgaacccaaacattgcatcagtccagaccaatgaggtgggcttaaagcaagcggatactgtctactttcttcccatcacccctcagtttgtcacagaggtcatcaaggcagaacagccagatgggttaattctgggcatgggtggccagacagctctgaactgtggagtggaactattcaagagaggtgtgctcaaggaatatggtgtgaaagtcctgggaacttcagttgagtccattatggctacggaagacaggcagctgttttcagataaactaaatgagatcaatgaaaagattgctccaagttttgcagtggaatcgattgaggatgcactgaaggcagcagacaccattggctacccagtgatgatccgttccgcctatgcactgggtgggttaggctcaggcatctgtcccaacagagagactttgatggacctcagcacaaaggcctttgctatgaccaaccaaattctggtggagaagtcagtgacaggttggaaagaaatagaatatgaagtggttcgagatgctgatgacaattgtgtcactgtctgtaacatggaaaatgttgatgccatgggtgttcacacaggtgactcagttgttgtggctcctgcccagacactctccaatgccgagtttcagatgttgagacgtacttcaatcaatgttgttcgccacttgggcattgtgggtgaatgcaacattcagtttgcccttcatcctacctcaatggaatactgcatcattgaagtgaatgccagactgtcccgaagctctgctctggcctcaaaagccactggctacccattggcattcattgctgcaaagattgccctaggaatcccacttccagaaattaagaacgtcgtatccgggaagacatcagcctgttttgaacctagcctggattacatggtcaccaagattccccgctgggatcttgaccgttttcatggaacatctagccgaattggtagctctatgaaaagtgtaggagaggtcatggctattggtcgtacctttgaggagagtttccagaaagctttacggatgtgccacccatctatagaaggtttcactccccgtctcccaatgaacaaagaatggccatctaatttagatcttagaaaagagttgtctgaaccaagcagcacgcgtatctatgccattgccaaggccattgatgacaacatgtcccttgatgagattgagaagctcacatacattgacaagtggtttttgtataagatgcgtgatattttaaacatggaaaagacactgaaaggcctcaacagtgagtccatgacagaagaaaccctgaaaagggcaaaggagattgggttctcagataagcagatttcaaaatgccttgggctcactgaggcccagacaagggagctgaggttaaagaaaaacatccacccttgggttaaacagattgatacactggctgcagaatacccatcagtaacaaactatctctatgttacctacaatggtcaggagcatgatgtcaattttgatgaccatggaatgatggtgctaggctgtggtccatatcacattggcagcagtgtggaatttgattggtgtgctgtctctagtatccgcacactgcgtcaacttggcaagaagacggtggtggtgaattgcaatcctgagactgtgagcacagactttgatgagtgtgacaaactgtactttgaagagttgtccttggagagaatcctagacatctaccatcaggaggcatgtggtggctgcatcatatcagttggaggccagattccaaacaacctggcagttcctctatacaagaatggtgtcaagatcatgggcacaagccccctgcagatcgacagggctgaggatcgctccatcttctcagctgtcttggatgagctgaaggtggctcaggcaccttggaaagctgttaatactttgaatgaagcactggaatttgcaaagtctgtggactacccctgcttgttgaggccttcctatgttttgagtgggtctgctatgaatgtggtattctctgaggatgagatgaaaaaattcctagaagaggcgactagagtttctcaggagcacccagtggtgctgacaaaatttgttgaaggggcccgagaagtagaaatggacgctgttggcaaagatggaagggttatctctcatgccatctctgaacatgttgaagatgcaggtgtccactcgggagatgccactctgatgctgcccacacaaaccatcagccaaggggccattgaaaaggtgaaggatgctacccggaagattgcaaaggcttttgccatctctggtccattcaacgtccaatttcttgtcaaaggaaatgatgtcttggtgattgagtgtaacttgagagcttctcgatccttcccctttgtttccaagactcttggggttgacttcattgatgtggccaccaaggtgatgattggagagaatgttgatgagaaacatcttccaacattggaccatcccataattcctgctgactatgttgcaattaaggctcccatgttttcctggccccggttgagggatgctgaccccattctgagatgtgagatggcttccactggagaggtggcttgctttggtgaaggtattcatacagccttcctaaaggcaatgctttccacaggatttaagataccccagaaaggcatcctgataggcatccagcaatcattccggccaagattccttggtgtggctgaacaattacacaatgaaggtttcaagctgtttgccacggaagccacatcagactggctcaacgccaacaatgtccctgccaccccagtggcatggccgtctcaagaaggacagaatcccagcctctcttccatcagaaaattgattagagatggcagcattgacctagtgattaaccttcccaacaacaacactaaatttgtccatgataattatgtgattcggaggacagctgttgatagtggaatccctctcctcactaattttcaggtgaccaaactttttgctgaagctgtgcagaaatctcgcaaggtggactccaagagtcttttccactacaggcagtacagtgctggaaaagcagcatagagatgcagacaccccagccccattattaaatcaacctgagccacatgttatctaaaggaactgattcacaactttctcagagatgaatattgataactaaacttcatttcagtttactttgttatgccttaatattctgtgtcttttgcaattaaattgtcagtcacttcttcaaaaccttacagtccttcctaagttactcttcatgagatttcatccatttactaatactgtatttttggtggactaggcttgcctatgtgcttatgtgtagctttttactttttatggtgctgattaatggtgatcaaggtaggaaaagttgctgttctattttctgaactctttctatactttaagatactctatttttaaaacactatctgcaaactcaggacactttaacagggcagaatactctaaaaacttgataaaattaaatatagatttaatttatgaaccttccatcatgatgtttgtgtattgcttctttttggatcctcattctcacccatttggctaatccaggaatattgttatcccttcccattatattgaagttgagaaatgtgacagaggcatttagagtatggacttttcttttctttttctttttctttttttctttttgagatggagtcacactctccaggctggagtgcagtggcacaatctcggctcactgcaatttccgtctcccaagttcaagcgattctcctgctttagactatggatttctttaaggaatactggtttgcagttttgttttctggactatatcagcagatggtagacagtgtttatgtagatgtgttgttgtttttatcattggattttaacttggcccgagtgaaataatcagatttttgtcattcacactctcccccagttttggaataacttggaagtaaggttcattcccttaagacgatggattctgttgaactatggggtcccacactgcactattaattccacccactgtaagggcaaggacaccattccttctacatataagaaaaaagtctctccccaagggcagcctttgttacttttaaatattttctgttattacaagtgctctaattgtgaacttttaaataaaatactattaagaggt

SEQ ID NO: 43444 - DNA, 1410 bp, Artificial Sequence
  derived and/or modified sequence
gatcgctgtgcagtcagccttaaacactgactgcacccctcccagatttcttttacattaactaaaaagtcttatcacacaatctcataaaatttatgtaatttcatttaattttagccacaaatcatcaaaatgacgaggattttgacagctttcaaagtggtgaggacactgaagactggttttggctttaccaatgtgactgcacaccaaaaatggaaattttcaagacctggcatcaggctcctttctgtcaaggcacagacagcacacattgtcctggaagatagagatgcagacaccccagccccattattaaatcaacctgagccacatgttatctaaaggaactgattcacaactttctcagagatgaatattgataactaaacttcatttcagtttactttgttatgccttaatattctgtgtcttttgcaattaaattgtcagtcacttcttcaaaaccttacagtccttcctaagttactcttcatgagatttcatccatttactaatactgtatttttggtggactaggcttgcctatgtgcttatgtgtagctttttactttttatggtgctgattaatggtgatcaaggtaggaaaagttgctgttctattttctgaactctttctatactttaagatactctatttttaaaacactatctgcaaactcaggacactttaacagggcagaatactctaaaaacttgataaaattaaatatagatttaatttatgaaccttccatcatgatgtttgtgtattgcttctttttggatcctcattctcacccatttggctaatccaggaatattgttatcccttcccattatattgaagttgagaaatgtgacagaggcatttagagtatggacttttcttttctttttctttttctttttttctttttgagatggagtcacactctccaggctggagtgcagtggcacaatctcggctcactgcaatttccgtctcccaagttcaagcgattctcctgctttagactatggatttctttaaggaatactggtttgcagttttgttttctggactatatcagcagatggtagacagtgtttatgtagatgtgttgttgtttttatcattggattttaacttggcccgagtgaaataatcagatttttgtcattcacactctcccccagttttggaataacttggaagtaaggttcattcccttaagacgatggattctgttgaactatggggtcccacactgcactattaattccacccactgtaagggcaaggacaccattccttctacatataagaaaaaagtctctccccaagggcagcctttgttacttttaaatattttctgttattacaagtgctctaattgtgaacttttaaataaaatactattaagaggt

SEQ ID NO: 43445 - DNA, 4521 bp, Artificial Sequence
  derived and/or modified sequence
atgccccagatcatcaagatgacccgcatcctgacagccttcaaggtggtgaggaccctgaagacaggcttcggcttcaccaacgtgacagcccaccagaagtggaagttcagccggcccggcatccggctgctgtctgtgaaggcccagacagcccacatcgtgctggaggatggcaccaagatgaagggctacagctttggccaccccagctctgtggccggggaggtggtgttcaacacaggcctgggcggctacccagaggccatcacagatcctgcctacaagggccagatcctgaccatggccaaccccatcattggaaatggaggagccccagacaccacagccctggatgagctgggcctgagcaagtacctggagagcaatggcatcaaggtgtctggcctgctggtgctggactacagcaaggactacaaccactggctggccaccaagagcctgggccagtggctgcaggaggagaaggtgcctgccatctacggcgtggacaccaggatgctgaccaagatcatccgggacaagggcaccatgctgggcaagattgaatttgagggccagcctgtggactttgtggaccccaacaagcagaacctgattgctgaggtgtccaccaaggatgtgaaggtgtatggcaagggcaaccccaccaaggtggtggccgtggactgtggcatcaagaacaacgtcatccggctgctggtgaagagaggagctgaggtgcacctggtgccctggaaccacgacttcaccaagatggagtatgatggcatcctgattgctgggggccctggcaacccagccctggccgagcccctcatccagaatgtgaggaagatcctggagagtgacaggaaggagcccctgtttggcatcagcactggaaacctgatcaccggcctggccgccggggccaagacctacaagatgtccatggccaacagaggccagaaccagcctgtgctgaacatcaccaacaagcaggccttcatcacagcccagaaccacggctacgccctggacaacaccctgcctgctggctggaagcccctgtttgtgaatgtgaatgaccagaccaatgaaggcatcatgcatgagagcaagcccttctttgctgtgcagttccaccctgaggtgaccccaggccccatcgacacagagtacctgtttgacagcttcttcagcctcatcaagaagggcaaggccaccaccatcacctctgtgctgcccaagccagccctggtggccagccgggtggaggtgtccaaggtgctgatcctgggcagcggcggcctgagcatcggccaggccggggagtttgactacagcggcagccaggccgtgaaggccatgaaggaggagaatgtgaagacagtgctgatgaaccccaacatcgcctctgtgcagaccaatgaggtgggcctgaagcaggccgacacagtgtacttcctgcccatcaccccccagtttgtgacagaggtgatcaaggccgagcagccagatggcctcatcctgggcatgggcggccagacagccctgaactgtggggtggagctgttcaagaggggcgtgctgaaggagtatggagtgaaggtgctgggcacctctgtggagagcatcatggccacagaagatcggcagctgttcagtgacaagctgaatgagatcaatgagaagatcgcccccagctttgctgtggagagcattgaagatgccctgaaggctgctgacaccatcggctaccctgtgatgatccgcagcgcctatgccctgggcggcctgggcagcggcatctgccccaaccgggagaccctgatggacctgagcaccaaggcctttgccatgaccaaccagatcctggtggagaagtctgtgacaggctggaaggagattgaatatgaggtggtgagagatgctgatgacaactgtgtgacagtgtgcaacatggagaatgtggatgccatgggcgtgcacactggagacagcgtggtggtggccccagcccagaccctgagcaatgctgagttccagatgctgcggaggaccagcatcaacgtggtgcgccacctgggcatcgtgggggagtgcaacatccagtttgccctgcaccccacctccatggagtactgcatcatcgaggtgaatgcccggctgagccgcagcagcgccctggccagcaaggccaccggctaccccctggccttcatcgccgccaagatcgccctgggcatccccctgcctgagatcaagaatgtggtgtctgggaagaccagcgcctgctttgagcccagcctggactacatggtgaccaagatcccccgctgggacctggaccgcttccacggcaccagcagccgcatcggcagctccatgaagtctgtgggggaggtgatggccatcggccgcacctttgaggagagcttccagaaggccctgaggatgtgccaccccagcattgagggcttcaccccccggctgcccatgaacaaggagtggcccagcaacctggacctgaggaaggagctgtctgagcccagcagcacccgcatctatgccatcgccaaggccattgatgacaacatgagcctggatgaaattgagaagctgacctacatcgacaagtggttcctgtacaagatgagggacatcctgaacatggagaagaccctgaagggcctgaacagcgagagcatgacagaggagaccctgaagagggccaaggagatcggcttcagtgacaagcagatcagcaagtgcctgggcctgacagaggcccagacccgggagctgcggctgaagaagaacatccacccctgggtgaagcagattgacaccctggccgctgagtaccccagcgtgaccaactacctgtatgtgacctacaacggccaggagcatgatgtgaactttgatgaccacggcatgatggtgctgggctgcggcccctaccacatcggcagctctgtggagtttgactggtgtgctgtgagcagcatccgcaccctgcggcagctgggcaagaagacagtggtggtgaactgcaaccctgagaccgtgtccacagactttgatgaatgtgacaagctgtactttgaggagctgagcctggagcgcatcctggacatctaccaccaggaggcctgtggcggctgcatcatctctgtgggcggccagatccccaacaacctggccgtgcccctgtacaagaatggagtgaagatcatgggcaccagccccctgcagattgacagagcagaagatagaagcatcttctctgctgtgctggatgagctgaaggtggcccaggccccctggaaggctgtgaacaccctgaatgaggccctggagtttgccaagtctgtggactacccctgcctgctgcggcccagctatgtgctgagcggcagcgccatgaatgtggtgttttctgaagatgagatgaagaagttcctggaggaggccaccagggtgtcccaggagcaccctgtggtgctgaccaagtttgtggagggcgcccgggaggtggagatggatgctgtgggcaaggatggccgggtcatcagccacgccatcagcgagcacgtggaggatgctggggtgcacagcggagatgccaccctgatgctgcccacccagaccatcagccagggcgccatcgagaaggtgaaggatgccaccaggaagatcgccaaggcctttgccatcagcggccccttcaacgtgcagttcctggtgaagggaaatgatgtgctggtgattgagtgcaacctgcgggccagccgctccttcccctttgtgtccaagaccctgggcgtggacttcattgatgtggccaccaaggtgatgattggagaaaatgtggatgagaagcacctgcccaccctggaccaccccatcatcccagctgactatgtggccatcaaggcccccatgttctcctggccccggctgagagatgctgaccccatcctgcgctgtgagatggccagcactggagaggtggcctgcttcggggagggcatccacacagccttcctgaaggccatgctgagcacaggcttcaagatcccccagaagggcatcctgattggcatccagcagagcttccggccccgcttcctgggcgtggccgagcagctgcacaatgaaggcttcaagctgtttgccacagaggccaccagtgactggctgaatgccaacaacgtgcctgccacccctgtggcctggcccagccaggagggccagaaccccagcctgagcagcatcaggaagctgatcagagatggcagcattgacctggtgatcaacctgcccaacaacaacaccaagtttgtgcatgacaactacgtgatcagaagaacagctgtggacagcggcatccccctgctgaccaacttccaggtgaccaagctgtttgctgaggccgtgcagaagagcaggaaggtggacagcaagagcctcttccactaccggcagtacagcgctgggaaggccgcctag

SEQ ID NO: 43446 - DNA, 1542 bp, Artificial Sequence
  derived and/or modified sequence
atgacccgcatcctgacagccttcaaggtggtgaggaccctgaagacaggcttcggcttcaccaacgtgacagcccaccagaagtggaagttcagccggcccggcatccggctgctgtctgtgaaggcccagacagcccacatcgtgctggaggatggcaccaagatgaagggctacagctttggccaccccagctctgtggccggggaggtggtgttcaacacaggcctgggcggctacccagaggccatcacagatcctgcctacaagggccagatcctgaccatggccaaccccatcattggaaatggaggagccccagacaccacagccctggatgagctgggcctgagcaagtacctggagagcaatggcatcaaggtgtctggcctgctggtgctggactacagcaaggactacaaccactggctggccaccaagagcctgggccagtggctgcaggaggagaaggtgcctgccatctacggcgtggacaccaggatgctgaccaagatcatccgggacaagggcaccatgctgggcaagattgaatttgagggccagcctgtggactttgtggaccccaacaagcagaacctgattgctgaggtgtccaccaaggatgtgaaggtgtatggcaagggcaaccccaccaaggtggtggccgtggactgtggcatcaagaacaacgtcatccggctgctggtgaagagaggagctgaggtgcacctggtgccctggaaccacgacttcaccaagatggagtatgatggcatcctgattgctgggggccctggcaacccagccctggccgagcccctcatccagaatgtgaggaagatcctggagagtgacaggaaggagcccctgtttggcatcagcactggaaacctgatcaccggcctggccgccggggccaagacctacaagatgtccatggccaacagaggccagaaccagcctgtgctgaacatcaccaacaagcaggccttcatcacagcccagaaccacggctacgccctggacaacaccctgcctgctggctggaagcccctgtttgtgaatgtgaatgaccagaccaatgaaggcatcatgcatgagagcaagcccttctttgctgtgcagttccaccctgaggtgaccccaggccccatcgacacagagtacctgtttgacagcttcttcagcctcatcaagaagggcaaggccaccaccatcacctctgtgctgcccaagccagccctggtggccagccgggtggaggtgtccaaggtgctgatcctgggcagcggcggcctgagcatcggccaggccggggagtttgactacagcggcagccaggccgtgaaggccatgaaggaggagaatgtgaagacagtgctgatgaaccccaacatcgcctctgtgcagaccaatgaggtgggcctgaagcaggccgacacagtgtacttcctgcccatcaccccccagtttgtgacagaggtgatcaaggccgagcagccagatggcctcatcctgggcatgggcgcccggcagctgtag

SEQ ID NO: 43447 - DNA, 4527 bp, Artificial Sequence
  derived and/or modified sequence
cggccccggccccagatcatcaagatgacccgcatcctgacagccttcaaggtggtgaggaccctgaagacaggcttcggcttcaccaacgtgacagcccaccagaagtggaagttcagccggcccggcatccggctgctgtctgtgaaggcccagacagcccacatcgtgctggaggatggcaccaagatgaagggctacagctttggccaccccagctctgtggccggggaggtggtgttcaacacaggcctgggcggctacccagaggccatcacagatcctgcctacaagggccagatcctgaccatggccaaccccatcattggaaatggaggagccccagacaccacagccctggatgagctgggcctgagcaagtacctggagagcaatggcatcaaggtgtctggcctgctggtgctggactacagcaaggactacaaccactggctggccaccaagagcctgggccagtggctgcaggaggagaaggtgcctgccatctacggcgtggacaccaggatgctgaccaagatcatccgggacaagggcaccatgctgggcaagattgaatttgagggccagcctgtggactttgtggaccccaacaagcagaacctgattgctgaggtgtccaccaaggatgtgaaggtgtatggcaagggcaaccccaccaaggtggtggccgtggactgtggcatcaagaacaacgtcatccggctgctggtgaagagaggagctgaggtgcacctggtgccctggaaccacgacttcaccaagatggagtatgatggcatcctgattgctgggggccctggcaacccagccctggccgagcccctcatccagaatgtgaggaagatcctggagagtgacaggaaggagcccctgtttggcatcagcactggaaacctgatcaccggcctggccgccggggccaagacctacaagatgtccatggccaacagaggccagaaccagcctgtgctgaacatcaccaacaagcaggccttcatcacagcccagaaccacggctacgccctggacaacaccctgcctgctggctggaagcccctgtttgtgaatgtgaatgaccagaccaatgaaggcatcatgcatgagagcaagcccttctttgctgtgcagttccaccctgaggtgaccccaggccccatcgacacagagtacctgtttgacagcttcttcagcctcatcaagaagggcaaggccaccaccatcacctctgtgctgcccaagccagccctggtggccagccgggtggaggtgtccaaggtgctgatcctgggcagcggcggcctgagcatcggccaggccggggagtttgactacagcggcagccaggccgtgaaggccatgaaggaggagaatgtgaagacagtgctgatgaaccccaacatcgcctctgtgcagaccaatgaggtgggcctgaagcaggccgacacagtgtacttcctgcccatcaccccccagtttgtgacagaggtgatcaaggccgagcagccagatggcctcatcctgggcatgggcggccagacagccctgaactgtggggtggagctgttcaagaggggcgtgctgaaggagtatggagtgaaggtgctgggcacctctgtggagagcatcatggccacagaagatcggcagctgttcagtgacaagctgaatgagatcaatgagaagatcgcccccagctttgctgtggagagcattgaagatgccctgaaggctgctgacaccatcggctaccctgtgatgatccgcagcgcctatgccctgggcggcctgggcagcggcatctgccccaaccgggagaccctgatggacctgagcaccaaggcctttgccatgaccaaccagatcctggtggagaagtctgtgacaggctggaaggagattgaatatgaggtggtgagagatgctgatgacaactgtgtgacagtgtgcaacatggagaatgtggatgccatgggcgtgcacactggagacagcgtggtggtggccccagcccagaccctgagcaatgctgagttccagatgctgcggaggaccagcatcaacgtggtgcgccacctgggcatcgtgggggagtgcaacatccagtttgccctgcaccccacctccatggagtactgcatcatcgaggtgaatgcccggctgagccgcagcagcgccctggccagcaaggccaccggctaccccctggccttcatcgccgccaagatcgccctgggcatccccctgcctgagatcaagaatgtggtgtctgggaagaccagcgcctgctttgagcccagcctggactacatggtgaccaagatcccccgctgggacctggaccgcttccacggcaccagcagccgcatcggcagctccatgaagtctgtgggggaggtgatggccatcggccgcacctttgaggagagcttccagaaggccctgaggatgtgccaccccagcattgagggcttcaccccccggctgcccatgaacaaggagtggcccagcaacctggacctgaggaaggagctgtctgagcccagcagcacccgcatctatgccatcgccaaggccattgatgacaacatgagcctggatgaaattgagaagctgacctacatcgacaagtggttcctgtacaagatgagggacatcctgaacatggagaagaccctgaagggcctgaacagcgagagcatgacagaggagaccctgaagagggccaaggagatcggcttcagtgacaagcagatcagcaagtgcctgggcctgacagaggcccagacccgggagctgcggctgaagaagaacatccacccctgggtgaagcagattgacaccctggccgctgagtaccccagcgtgaccaactacctgtatgtgacctacaacggccaggagcatgatgtgaactttgatgaccacggcatgatggtgctgggctgcggcccctaccacatcggcagctctgtggagtttgactggtgtgctgtgagcagcatccgcaccctgcggcagctgggcaagaagacagtggtggtgaactgcaaccctgagaccgtgtccacagactttgatgaatgtgacaagctgtactttgaggagctgagcctggagcgcatcctggacatctaccaccaggaggcctgtggcggctgcatcatctctgtgggcggccagatccccaacaacctggccgtgcccctgtacaagaatggagtgaagatcatgggcaccagccccctgcagattgacagagcagaagatagaagcatcttctctgctgtgctggatgagctgaaggtggcccaggccccctggaaggctgtgaacaccctgaatgaggccctggagtttgccaagtctgtggactacccctgcctgctgcggcccagctatgtgctgagcggcagcgccatgaatgtggtgttttctgaagatgagatgaagaagttcctggaggaggccaccagggtgtcccaggagcaccctgtggtgctgaccaagtttgtggagggcgcccgggaggtggagatggatgctgtgggcaaggatggccgggtcatcagccacgccatcagcgagcacgtggaggatgctggggtgcacagcggagatgccaccctgatgctgcccacccagaccatcagccagggcgccatcgagaaggtgaaggatgccaccaggaagatcgccaaggcctttgccatcagcggccccttcaacgtgcagttcctggtgaagggaaatgatgtgctggtgattgagtgcaacctgcgggccagccgctccttcccctttgtgtccaagaccctgggcgtggacttcattgatgtggccaccaaggtgatgattggagaaaatgtggatgagaagcacctgcccaccctggaccaccccatcatcccagctgactatgtggccatcaaggcccccatgttctcctggccccggctgagagatgctgaccccatcctgcgctgtgagatggccagcactggagaggtggcctgcttcggggagggcatccacacagccttcctgaaggccatgctgagcacaggcttcaagatcccccagaagggcatcctgattggcatccagcagagcttccggccccgcttcctgggcgtggccgagcagctgcacaatgaaggcttcaagctgtttgccacagaggccaccagtgactggctgaatgccaacaacgtgcctgccacccctgtggcctggcccagccaggagggccagaaccccagcctgagcagcatcaggaagctgatcagagatggcagcattgacctggtgatcaacctgcccaacaacaacaccaagtttgtgcatgacaactacgtgatcagaagaacagctgtggacagcggcatccccctgctgaccaacttccaggtgaccaagctgtttgctgaggccgtgcagaagagcaggaaggtggacagcaagagcctcttccactaccggcagtacagcgctgggaaggccgcctag

SEQ ID NO: 43448 - DNA, 4521 bp, Artificial Sequence
  derived and/or modified sequence
atgccccagatcatcaagatgacccggatcctgaccgccttcaaggtcgtgcgcacactcaaaaccgggtttggtttcaccaacgttactgcccaccagaagtggaaattttcaagacctggcatcaggctgctatcggtgaaggctcagactgctcacattgttttggaggatgggactaaaatgaaaggatactcatttggacatcccagctctgttgccggagaagtcgtctttaataccggactgggaggctacccagaagccatcactgatcctgcgtacaaggggcaaattctgacaatggcaaatcctatcattggcaacggcggggcccctgatactacggccttagacgagctaggactctctaagtacctcgagagcaacggcattaaggtatcgggccttttagtgctcgactactccaaggactacaaccactggctggccactaagtctctagggcagtggctgcaagaggaaaaagttcctgccatatacggtgtggatacaaggatgctgactaaaatcatccgggataaaggcacaatgctcggcaagattgagttcgaaggacagccggtagattttgtggatcctaataaacagaacctcatcgctgaggtatcgaccaaggatgtgaaagtgtacggcaaagggaacccgactaaagttgtggcagtcgactgcgggattaagaacaatgtcataaggctgctggtaaagagaggcgcagaggtccacctcgtgccatggaaccatgatttcaccaaaatggagtacgatggaatcctcattgctggcggcccaggtaatccggcattggccgaaccattgattcagaacgtacggaagatactggagtccgatcggaaagaacccctatttgggatcagcaccggcaacctgattaccggccttgctgccggggccaagacctacaagatgagtatggctaaccgtggacagaatcaacctgttctcaatatcactaacaagcaggccttcatcaccgcgcaaaaccacgggtacgccctggacaataccttgcccgccggctggaaacctttgttcgtgaatgtgaatgaccaaaccaacgaaggcattatgcatgaatccaaacccttcttcgcagtccagttccacccggaagtgacccccggacccatcgacacagagtaccttttcgatagcttcttttctctgattaagaaggggaaggccacaacgatcacttctgtacttccgaaaccagcgctagttgcctccagagtggaggtgtctaaggtcttgatcctgggaagtggcggcctgtcaattggccaagcaggagagtttgattactcaggatctcaagctgtgaaagccatgaaggaggagaacgtaaagactgtacttatgaaccctaacatagcctcagttcagacaaacgaagtgggcctgaagcaggcggacactgtgtactttttacccataacacctcaatttgtgacagaggttataaaagctgaacagccagacggtctgatcttgggaatgggcggccagaccgccctgaattgcggagtggagctctttaaaagaggagtgctaaaagaatacggagtgaaagtgcttggaacgtcagtagaatcaatcatggctaccgaggatagacagctctttagcgataagctaaacgaaatcaacgagaagattgctccatcatttgctgtcgagtcaattgaagacgccctgaaggctgctgataccatcggctatcccgttatgatccgtagtgcttacgccttgggcggcctgggaagcggaatctgtccgaatcgggagactctcatggacctgagtaccaaagccttcgctatgacaaatcagattctggttgagaaaagcgtcaccgggtggaaggaaatcgaatatgaagtcgtccgggacgccgacgacaactgcgtgacagtgtgcaacatggagaatgttgacgcgatgggagtgcacaccggggatagcgtcgtagtggcacctgcgcagactctttctaatgcggaatttcagatgctgcgtaggacctcaatcaacgtcgtgcggcatctgggaatcgtaggggaatgcaatattcagtttgccctgcaccccacatcaatggagtattgcattattgaggtgaacgccagattatctcggtccagtgccctggccagtaaggccaccggctaccccctcgccttcattgccgccaagatcgcactaggcatcccactgccggaaattaaaaacgttgtgtctgggaagaccagcgcctgttttgaaccaagtttagactacatggtgacgaagattccaaggtgggaccttgatcggttccacggcactagttccagaattggatccagtatgaaatcagtaggggaagtgatggcgatcggtcgaacatttgaggaatcctttcaaaaggcacttcgaatgtgccaccctagcatcgaaggcttcacgccccgcctccccatgaataaggagtggccctcaaatctcgatctacgaaaagaacttagcgagccaagcagtacacgcatatacgccattgccaaagcgattgacgacaacatgtccctcgacgaaatcgaaaagctcacctacatagacaaatggttcttgtacaaaatgagagatatccttaatatggaaaagacgttgaagggactgaatagtgagagcatgactgaagaaaccctgaagcgcgcgaaagaaatcggattcagtgacaagcaaatctccaaatgccttggactaacagaggcacaaacccgggaactccgtctgaagaagaatattcacccctgggtgaagcagattgatacacttgccgctgaatacccttccgtaaccaactatctgtatgttacatataacggacaagagcacgacgtcaactttgacgaccacggaatgatggttttaggctgcggaccctatcatattggaagcagcgtagagttcgactggtgtgctgttagtagcatacggactttaagacagcttggaaagaagacagtagtggtcaattgcaaccctgaaacagtgagcacagatttcgacgagtgtgacaagctgtattttgaggagttgagtttggaacgaatcctcgacatttatcaccaagaagcctgcggcggatgcataatcagtgttggcgggcagattcctaacaacctcgcagtgcccctttacaagaatggcgtgaagataatgggcacaagccccctgcaaatcgatcgcgccgaagatcgctccatttttagcgcagtgttggatgagctgaaggtggcacaggccccgtggaaggccgtgaatactctcaatgaggccctggagttcgctaaatctgttgactatccctgcctactaaggcccagctatgtactaagcggcagtgccatgaacgtagtgttctcagaggatgagatgaaaaaattcctggaagaggcgactagggtttcccaggaacacccagtggttttgacaaagttcgtcgagggtgcacgggaagttgaaatggacgccgtggggaaagacggaagagtgatttctcacgccatatctgaacacgttgaagatgcaggcgtgcacagtggcgatgctaccctgatgttgccaacacagacgatcagccagggtgcgattgagaaggtgaaagatgccacaaggaagatagcaaaagccttcgccatttcaggcccgtttaatgtacagttcttggttaaaggcaatgacgttctcgtcattgagtgtaatctaagggcctcgcgctcattcccctttgtaagtaagacactgggcgtcgacttcattgatgtggctaccaaggtgatgattggtgagaatgtggacgagaagcaccttcccaccctggatcatcccattattccagctgactatgttgcaatcaaggcacccatgttttcttggccccgcctgcgggatgccgatcctatacttagatgcgagatggccagcaccggcgaggtggcctgcttcggcgaagggatccacaccgcatttttgaaggccatgctcagtactggatttaagatcccccaaaaaggcatattaataggaattcagcagtcgttccggccacggtttctcggagtcgccgagcaactccacaatgaaggcttcaagctattcgctacggaggcaacctctgattggctgaatgctaataacgtcccagcaacaccagtcgcttggccaagtcaggaaggtcagaatccaagtttgtcgagtatacggaaactcatccgggatgggtctatcgatctcgttatcaacctccctaacaacaacacgaagttcgttcatgacaattatgtcattcgtcgcacagccgttgatagcggcataccacttctcactaatttccaggttaccaagctgttcgctgaagcagtgcagaaatctcgaaaagtcgatagcaagagtctctttcattatagacagtatagtgcgggaaaagctgcctag

SEQ ID NO: 43449 - DNA, 1542 bp, Artificial Sequence
  derived and/or modified sequence
atgacccggatcctgaccgccttcaaggtggtgcggaccctgaagaccggattcgggttcaccaatgttactgctcaccaaaaatggaagttctctcgccctgggattagactgctgtccgtcaaagcacaaactgcgcacatcgtactggaggatggtacgaagatgaaggggtactcatttgggcaccccagttctgtcgctggagaggtagtatttaacaccggattgggaggttaccccgaagcaattacggacccagcatacaaaggtcagatcctgaccatggcaaacccgatcattggcaatggcggtgctcctgacacgactgctcttgatgaactaggcctcagcaagtaccttgagtctaatggcattaaagtttctggtctcctcgtgttggactatagcaaagactataaccactggctagccaccaaatccctagggcaatggttgcaggaggagaaggtccccgccatttacggcgtggacacaaggatgctgacaaagattattcgggataaaggtaccatgctgggaaagatcgaatttgaaggccagcctgtcgactttgttgacccgaataaacagaacctaatcgccgaagtcagtactaaggacgtgaaggtgtatggcaaagggaaccccacgaaggtggtggctgtcgattgcggcataaagaataacgtgattcgactcctggtgaaacggggcgccgaagtgcacctcgtcccttggaaccacgacttcaccaagatggaatatgatggtatcctcatagcagggggccctggaaaccccgccttagctgaacctctcatccagaacgtccgtaaaattctcgaatccgaccggaaggagcccctttttgggattagcacaggcaacctaatcacaggcctagctgcaggggccaagacttacaaaatgtccatggccaataggggccaaaatcagccagtcttgaatatcaccaacaagcaggcgtttatcactgcccagaaccacgggtacgccttagataatactctcccagccggctggaagcccctgtttgtgaatgtaaacgatcagacgaacgagggaataatgcacgagtccaagccgttcttcgccgttcagttccaccctgaagttactcctggcccgattgacactgagtatttgttcgacagttttttttccctgatcaaaaaggggaaagctactacaattacctccgtattgcctaagccagccttagtggcatctcgcgtggaggtgtcaaaggtgctgattctcggatccgggggtttgtcaattgggcaggccggtgagtttgattattccggctctcaagctgtgaaagcaatgaaggaggagaatgtaaagacggttttgatgaatccaaacatcgccagcgttcaaacaaacgaagtgggcctcaagcaggctgataccgtttattttctacccataactccccagttcgttaccgaggtcattaaagccgagcagcctgatggcctcatactgggtatgggagccaggcaactctag

SEQ ID NO: 43450 - DNA, 4527 bp, Artificial Sequence
  derived and/or modified sequence
cggccccggccccagatcatcaagatgacccggatcctgaccgcctttaaagtcgtgaggacactgaagacggggtttgggttcaccaacgttactgcccatcagaaatggaagttttcacggcctggaatcagactgttaagcgtgaaggctcagacggcacacatagtgctcgaagacgggactaagatgaaaggatacagcttcggtcacccaagttctgttgccggagaagtggttttcaatactgggctgggcggctatccggaggcgattacggatcccgcgtacaagggccagattttgactatggctaatccaataatcggaaatggtggagccccagacacaaccgctctcgacgagctgggactgagcaagtacctggagtccaatgggatcaaagtctccggccttctcgtgctagactactccaaggattacaatcattggttggcgaccaagagcctcggacaatggttacaggaggagaaagtccctgccatatacggtgtggatacccggatgctgacaaagatcattcgtgataagggcacaatgcttggtaagatagagtttgagggccagcctgtggactttgtggatcctaacaagcagaacctgatagcagaggtgtctacaaaggacgtcaaggtgtacggaaagggcaatcctacgaaagtcgtggccgtggactgtgggataaaaaataatgtgattcggcttctcgtgaagagaggagccgaggtgcatttagtgccctggaatcacgactttacaaagatggaatacgatggcatcctgatagcgggaggcccagggaaccccgccctggctgaaccactgatccagaatgtgcgtaaaattctggaaagcgaccgtaaagagcccctctttgggatttccacagggaatttgatcacaggtttagcagcaggagcaaaaacctacaaaatgtctatggccaaccgcggacagaatcaaccagttttaaacattacaaataaacaagcttttattacagctcagaaccacggctacgcgcttgacaacaccctgccagccggttggaagcctctctttgtaaatgtgaatgaccagacaaacgaaggaattatgcatgaaagcaagcccttctttgctgtgcagttccaccctgaagttactcctggccctattgacactgagtacctgtttgactccttcttttctttaattaagaagggaaaagcaacgaccatcacgtccgtgttgcccaagcctgccctagtggcctcaagagtcgaagtgtcgaaggtcctgattttagggtcaggcgggctcagcatcgggcaggccggcgaatttgactacagcggaagccaagccgtcaaagctatgaaagaggaaaatgttaagactgtcttgatgaaccccaacatagcttctgttcagacaaacgaggtgggcctgaagcaagctgataccgtatacttcctcccaattaccccccagtttgtcactgaggtcattaaggctgagcagcctgacggactcattcttggaatgggggggcagacggcccttaattgcggggtggaactgtttaagagaggcgttttgaaagagtacggagtaaaagttctgggaacatccgtggaaagcatcatggccactgaagatcgccagttatttagcgataagctgaatgagattaacgaaaaaatcgcaccaagctttgccgtcgaatcaattgaagacgctctcaaggctgctgataccatcggctacccagtcatgatccggtctgcatatgccctcggaggcttgggctccgggatctgtcccaatcgcgagaccctgatggatttgagcactaaagctttcgccatgaccaatcagattttggtggagaaatctgtgacaggttggaaagagatagagtacgaggtggtgcgcgatgcagacgataattgtgtcacagtgtgcaatatggagaatgtcgacgctatgggggtgcacactggagattccgtggtggtggcgcccgcacagacgctctccaatgcagaatttcagatgctgcgacgcaccagcatcaatgtcgtcaggcatctaggcattgtcggggaatgcaacatccagttcgcactccatcccacttctatggagtactgtataatcgaggtgaatgctcgattgagtcggtcaagcgccctggcctccaaagctaccggttaccccttggcttttatcgccgcaaagatcgccctggggataccgcttccagagatcaaaaatgtagtctctggcaaaacctctgcctgttttgagccctccctggactatatggtcacgaaaatcccacggtgggacctcgatcgttttcatggaactagctcccggataggctcctcaatgaagagcgtgggtgaggtcatggcgataggaagaacattcgaggagagcttccagaaagcgttaagaatgtgtcacccttcaattgagggctttacgccacgcctacctatgaataaagaatggccttcgaatctggacctgcggaaagaactcagtgaaccaagcagcactcgaatttatgcaatcgccaaggccatagacgacaacatgtcacttgatgagatcgagaagctgacgtacattgacaagtggtttctatataaaatgcgggatatactgaatatggagaagaccctcaaaggcctgaacagcgagtccatgacagaggagaccttaaagagagctaaggaaatcgggttctctgataagcagatcagtaagtgtctgggactgaccgaggcccagacgcgtgagctcagactaaagaagaatatccatccttgggtcaaacagattgacacattagctgccgagtacccttctgtcactaactacctgtacgtgacctataatggccaggagcatgatgtgaatttcgacgatcatggaatgatggtactgggctgcgggccgtatcacatcggcagttctgttgagtttgactggtgcgcagtgagcagtattcgcaccttgagacaactcggtaaaaaaacagtcgtggtcaattgtaaccccgagactgtgtcaaccgatttcgacgaatgcgataaattgtactttgaagaactttccttggaacgcatcctggacatctaccatcaagaggcgtgcggaggctgcatcatcagtgtgggcggacagatccctaacaatctggcagttcccctgtataagaatggagtgaagattatgggaacctcaccactccaaattgatcgggctgaagatcgctcaatctttagcgccgtgctagatgagctcaaggtggcacaggcaccttggaaagcagtaaatacgcttaatgaggctctagaatttgctaagagtgtagactacccatgtctgctccggcccagttacgtgttgagcggtagcgccatgaatgtggtgttcagtgaagacgaaatgaagaagtttttggaggaagctacgcgagtgtcgcaggaacatcccgttgtacttactaagtttgttgagggcgctcgggaggtcgaaatggacgcagttggtaaggacgggagagtaatctcccacgcaattagtgagcatgtcgaggacgccggtgttcatagcggtgatgcgaccctcatgcttcctacccaaacaatctcacaaggggcaatcgagaaagttaaggacgccacgcgtaagatagccaaggctttcgcaatcagcgggccattcaatgtccagtttctggtgaaaggaaatgacgtgctggttatcgagtgcaatttgcgcgctagtcgttcatttcccttcgtctccaagaccctgggtgttgacttcatcgatgtcgccaccaaggtgatgattggggagaatgtagacgaaaaacacttaccaaccctcgaccatcccatcattcccgctgactacgtggccattaaggcacccatgtttagttggcctcgactccgcgatgccgatcccatcctgcgctgcgaaatggcaagcaccggtgaagtcgcctgcttcggggaaggcattcacaccgctttcctgaaggctatgttgagcaccgggttcaaaatacctcagaaagggattctgatcggcatacaacagagcttcagaccccgctttctgggcgtcgccgagcagctccataacgagggctttaagctgttcgcaacggaggctacaagcgactggctcaatgctaataatgttccagccactcctgtggcgtggccatcacaggagggacaaaatccctcactgagctccattcgcaaactaatcagggacggatcaatcgaccttgtgattaatctccccaataacaataccaagtttgtgcacgacaactatgttatacgaagaaccgccgttgattctggtattccgcttctgacgaacttccaggtcactaaactgtttgctgaagctgtgcagaaatccaggaaagtggacagtaaatccctctttcactataggcagtattccgcgggaaaggcagcatag

SEQ ID NO: 43451 - DNA, 4521 bp, Artificial Sequence
  derived and/or modified sequence
atgccacagatcattaaaatgactagaattctgactgccttcaaagtagtccggacccttaagaccgggtttggtttcactaatgtaacagcacatcaaaaatggaaattttctcgacccggaatccggctgctctctgttaaggcccagacagcccacattgtgttggaagacggaaccaagatgaaaggatactctttcgggcacccatcaagtgttgccggagaggtcgtattcaatacaggactgggagggtaccccgaagccattactgatcccgcatataaaggccagattctgaccatggcaaatccaatcataggaaatggcggagctccagatactacggcactagatgaattgggacttagtaagtaccttgagtcaaacggtattaaggtgtcaggattactggtcctcgattattcaaaagattataatcactggctcgcgaccaagagtcttgggcagtggctgcaggaagaaaaagtgcctgccatttacggagtggacactagaatgctgacaaaaataattagagacaaaggcaccatgcttggtaagattgaatttgagggacagcccgtcgatttcgtcgatcccaacaaacagaatctcatcgctgaggtcagcaccaaggacgtaaaggtgtacgggaaaggaaaccctacaaaggtggtcgctgtggactgcggaattaaaaacaatgtcattcgcctactggtgaaaagaggcgctgaggtccatttggtaccatggaaccatgacttcactaaaatggagtacgatggcatcttaattgccggaggtcctggtaaccccgctttagccgagcctctgatccaaaacgtgaggaagatcctagaatccgatcgaaaagaacccctctttggcatctctacaggcaacttgataactgggttggcagcgggagctaagacctacaagatgagcatggctaaccgtgggcaaaatcaacccgtgctgaacataaccaataaacaggccttcataaccgcacagaaccacggctacgcattggacaacaccttaccggctggatggaaacctctgttcgtgaatgtgaacgatcagaccaatgaaggaatcatgcacgagagtaaaccctttttcgctgttcagttccatcctgaagtcacccctggcccaattgatacagagtacttgtttgacagcttcttttccctaatcaaaaagggtaaggcaaccactataacctcagttctccccaagccggcattggtggcatcccgcgtagaagtttcgaaagtgctgattcttggcagcggaggcctgtctatcggccaggcgggtgagtttgattactccggatcacaggccgtgaaggctatgaaggaggaaaacgtcaagacagtcctgatgaatccaaacatcgcgtccgtgcagaccaatgaggtcggactgaagcaagccgatacagtatacttccttcccatcaccccacagtttgtcactgaagtgattaaggccgagcagcccgatggcttgatattaggaatgggcggacagaccgcacttaattgcggggtcgagctgttcaagaggggtgtcttgaaagagtatggagtcaaagtcctaggaacgtccgtggaatccatcatggcaacagaggatcgacagttgtttagcgacaaactcaacgaaatcaacgaaaagattgcaccatcattcgctgtggagagcatcgaggatgcccttaaagcagccgacacgatcggctatcctgtgatgatcagaagcgcttacgccctgggcggtctgggctctgggatttgtcccaaccgggaaacattgatggacctcagcacaaaagcctttgccatgaccaatcaaattcttgtcgaaaaatccgtcactggttggaaggaaatcgaatacgaagtcgtgagggacgccgacgacaactgcgtcacagtctgcaatatggaaaacgtggacgcaatgggggttcataccggggactctgtggtagtggcccctgcccagacactttcaaacgctgagtttcagatgctccggagaacttcaatcaatgtcgtcagacatctggggatcgtgggcgaatgtaacatacagttcgccttgcacccaacctctatggagtactgtattattgaagtgaatgccagactgtcccgatctagcgcccttgcttcaaaagcaacagggtatcccttggccttcatcgctgcaaagatcgccctgggtattcctctgcctgagatcaagaatgtggtgtccggaaagacatcggcgtgtttcgagccatcactggattacatggtgactaagatcccacgctgggacctggatcgctttcacgggactagctcacggatcggtagcagcatgaagtctgtcggcgaagttatggctatcggacgcacattcgaggaatcctttcagaaagcgctgaggatgtgtcatcccagcattgaggggttcacaccacgactgcccatgaataaggagtggccaagtaatttggacctgagaaaggaactgagcgagcctagctctaccagaatctacgctatcgcaaaggccatagacgataacatgtctctggatgagattgagaagctaacttatatagataagtggtttctgtataagatgagagatatcctgaatatggaaaaaactctcaaggggctcaacagcgagtccatgacagaggagacattaaaacgcgctaaggagatcggattctcagacaaacaaatctccaagtgtttgggcctcacagaggctcaaacgcgggagctgcgcctgaagaagaacatccacccatgggtgaaacaaatagacacactggctgccgagtacccttcggtgactaactatctttacgtgacctacaacggccaggagcatgatgtcaactttgatgaccacggtatgatggtactcggttgcggaccatatcacattggatcaagtgtagaatttgattggtgtgctgtgagctctatcaggactcttcgccaactcggaaagaagacagtggtggtcaattgtaatcctgaaacagtgagtacggacttcgacgaatgtgacaaattgtattttgaggaactgagcctggaacggattctggacatttatcaccaggaagcttgcggtgggtgtatcatatctgtgggaggccagatccctaacaacctcgccgtgcctctctacaagaacggtgtaaagattatgggtacctcaccgctccagatcgatcgtgccgaagaccggtctatcttctccgccgtgctcgacgaactaaaagtggcccaggctccctggaaagcagttaatactctcaatgaagcgctggaattcgccaagtctgtggactatccttgcctgctgaggcccagctacgtcttaagcggttcagctatgaatgttgtgttctcagaggacgaaatgaaaaagttcttggaggaggcgaccagggtttcacaggagcaccccgttgtgttgacaaagttcgttgagggtgccagagaagtcgaaatggacgcagtgggtaaggatggacgggtcatatcacacgccatcagcgaacatgtagaggacgcaggagtgcacagtggggatgctacactgatgctgccaacacagaccatctctcaaggagccattgaaaaggtgaaggacgccactcgcaaaattgctaaagccttcgccatttcaggcccatttaatgtccagtttctagtgaagggaaacgacgttttggtaatcgagtgcaatttacgagcctcccggtccttccccttcgtaagcaaaaccctcggtgtcgacttcatagacgttgccacaaaagtaatgattggtgaaaacgtcgacgaaaagcatctcccgaccctggaccatccaattatacctgccgattacgtagcaatcaaggcgccaatgttctcctggcccagattaagggatgctgatcctatccttcgatgtgagatggcctctacaggggaagtagcctgctttggcgaagggatccacactgcatttctcaaggccatgcttagcactggatttaaaatcccacagaagggcattctcatcggtattcagcagtcattccgtccgcgattcctcggtgttgctgaacagctgcacaacgagggatttaagctcttcgcaacagaagctacctccgattggctcaacgcaaacaatgtgcctgccactcctgttgcttggccttcccaggaaggacaaaatccatccctgagttccattagaaaactgattcgcgatggctctattgacctggtgattaacctgccaaacaacaatactaagtttgtacatgacaactatgtgatcagacgcacagcagttgactcagggattcccctcctgacaaattttcaggtgaccaagctgttcgctgaggcagtacaaaagtctaggaaagtagattccaaaagcctgttccactatcggcaatatagcgcgggtaaggctgcttag

SEQ ID NO: 43452 - DNA, 1542 bp, Artificial Sequence
  derived and/or modified sequence
atgacaaggattctcacagcctttaaagtcgtccgaaccctcaaaacagggttcggcttcaccaatgtaacagcacaccagaagtggaagttcagtagaccaggaatccgcctcctttccgtgaaagcccaaactgcccatatcgtacttgaagacggcaccaagatgaagggttactcatttgggcatccttcgtccgtcgccggagaggtcgttttcaacacaggtctgggaggatatcctgaagccataacggaccccgcttacaagggccagattcttaccatggcgaatccaattatcggtaacggcggagctcccgatactaccgctttagacgaactgggactgagcaaatatcttgaatcaaacggaatcaaagtcagcggactgttggtgttggattatagcaaggactacaatcactggctagccaccaaaagcctggggcagtggctgcaggaggaaaaggtcccagcaatctatggcgttgacacccgcatgctcactaagatcattcgtgacaaaggcactatgcttgggaaaatagagtttgagggtcagcctgtggatttcgtcgacccaaacaagcagaacctcattgctgaggtgtcaacaaaggatgtaaaagtctatggaaaaggaaatcccacaaaagtggtggcagtggattgtggcatcaagaacaacgtgatccgtctgcttgtcaaacgaggcgcagaggtgcatctggtaccctggaatcacgacttcacaaaaatggaatacgatgggatactgatcgccggtggacctgggaatcccgcactggccgaaccactgatccagaatgtcagaaaaatcctcgagtccgatcgcaaggaaccactgtttggcatttccaccggaaatctgatcaccggcctggctgccggtgcgaagacatacaagatgtctatggcaaaccgcggacagaaccagcctgtcctgaatatcacaaacaagcaggctttcattaccgctcaaaaccacggatacgctctagataacacactgccagcaggctggaaaccactctttgtgaatgtcaacgatcagactaatgagggcattatgcatgagtccaaacctttctttgctgtgcaattccatcctgaggttacccctggaccgatcgacacagagtacctgttcgactccttcttctcactcattaaaaagggcaaggcgaccaccatcacgtctgtgctgccaaagcccgctctggtcgcttcaagggtggaggtctccaaagtactgattttgggcagtggcggtctgagcatcggccaggctggcgagtttgactattcgggctcccaggccgtgaaggcaatgaaggaggagaatgtcaaaacggtgctgatgaacccaaacattgcttctgttcaaacaaacgaggtgggcctcaagcaagctgataccgtgtatttccttcctatcacccctcagtttgtcactgaagtcattaaagcagaacaaccggatggactcatcctaggcatgggcgctaggcaactttag

SEQ ID NO: 43453 - DNA, 4527 bp, Artificial Sequence
  derived and/or modified sequence
cgtcctcggccacagatcatcaagatgactcgcattctgactgcgtttaaagtcgtccggacgctgaaaacgggatttgggttcacaaacgtaactgcgcaccagaaatggaaattttctaggccaggcataaggcttttgtccgtgaaggcgcagaccgcacacatagtgctggaggatggcaccaagatgaagggctactctttcggacatccttcgtccgtcgctggcgaggtggtttttaacactgggctcgggggatatcccgaggccatcactgacccagcatacaagggccagattttaaccatggccaatcccataattggcaacggcggtgctccagacactacagccctggacgagctgggactcagtaaatacctcgaatccaacggtattaaggtgagcggattgctggttttagactactcaaaggattacaatcactggttggcgacaaaaagtttgggacaatggttacaagaggagaaggtccctgctatttatggcgttgacacaagaatgttgactaagattattcgggacaagggcacaatgcttggcaagatagagtttgagggtcagccagttgattttgtggatccgaacaaacagaatcttattgctgaggtcagcactaaggatgtcaaggtctatgggaagggcaaccccacaaaagttgtggccgtggactgtggcatcaagaacaacgtcattagacttctagtgaagcggggagctgaggtccacctagtgccatggaatcacgacttcaccaaaatggagtatgatggaattctcattgccggtggtccgggaaatccagctctggctgagcctctaatccagaacgtcaggaagattctagagagtgatagaaaggaacccctatttggtatcagcaccggaaacctgattacaggcctggccgctggagccaagacttataaaatgtctatggcaaatcgtggacagaatcagcccgtcctgaatattaccaacaagcaggcttttatcacagctcagaatcatggttatgctctggataacaccctccctgctggttggaagcctctgtttgttaatgtgaacgatcaaaccaacgaggggataatgcacgaaagcaagccattttttgccgtacaatttcacccagaagtcacccctgggccaatagacactgaatacctttttgattctttcttcagtctgatcaaaaagggcaaggctaccaccatcacgtcagtcctcccaaaacctgcgttggtcgcctcccgagtggaagtgagcaaggtattaattttgggctcagggggattatcaatcggtcaggcaggcgaattcgactattcaggtagccaggccgtaaaagcaatgaaggaggagaacgtaaaaacagttctgatgaaccctaacattgcatccgtgcagacaaacgaggtggggttgaagcaggcagacaccgtgtacttccttcccatcactcctcagtttgttaccgaagtgatcaaagccgaacagcccgatggtctgatattaggaatggggggtcagactgccctcaattgtggagtagagctctttaagaggggcgtgctcaaagaatacggcgtcaaggtcctggggacttctgtcgagtcaattatggctactgaagatagacagctgttcagcgataagttaaacgagataaacgagaagatcgcacccagctttgccgtggaatcgattgaagatgccctgaaggcggcagacacaatcggttatccagtcatgatccgcagtgcttacgcactcggaggtctgggaagcgggatatgccccaatcgtgaaacacttatggacctgtccactaaggcattcgccatgacgaaccagatcctggtggaaaagtctgttactggctggaaagagatcgagtacgaggtcgttcgggacgcagatgacaactgtgtcacagtgtgtaatatggagaatgtggatgcaatgggcgtccacaccggcgactcggttgtagtggcaccagctcagacactgagtaatgccgaattccagatgttgcggcgtacgagtatcaatgtggtgagacaccttggcatcgtcggtgagtgtaacatccagtttgccctgcatcctactagcatggagtactgcatcatagaggtcaatgcgaggctgtctcggtcatcagccctcgcctccaaagcaactggttacccgctcgcctttattgcggctaaaatagccctggggattccgctgccagagattaagaatgtggtatccgggaagacttccgcttgctttgagccaagtctcgattatatggtcactaagatcccacgctgggacttggatcgatttcacggcacctcatctcgcatcggcagctctatgaaatcggtgggggaggtgatggccattggcagaaccttcgaggaaagtttccagaaagcgcttcggatgtgccatccctctatcgaaggcttcaccccgagactgcccatgaataaggagtggccttctaatctcgatctgcggaaggagctctctgaaccatccagtactcgtatctacgccatcgctaaagccattgatgacaatatgtctctggacgaaatagagaaacttacctacattgacaagtggtttttgtacaagatgagggatatactcaatatggagaagacactgaagggtctgaactccgaatctatgaccgaggaaacactgaaaagagctaaggagattgggttctcagataagcagatcagcaagtgcctcggtttgacggaggcccaaacccgggagctcagattaaagaagaacattcacccatgggttaagcagattgatacgctggccgctgagtatcccagtgtgactaattacctgtatgttacttataacggccaggagcatgacgtgaatttcgatgaccacggcatgatggtgctggggtgtgggccataccatattggttcatctgtagagttcgactggtgcgccgtgtcgagtatacggacacttaggcagctgggcaaaaagaccgtggtcgtcaactgcaaccctgaaaccgtatccacagatttcgatgagtgtgacaagttgtactttgaggaactgtctctggagaggattctggatatctatcatcaagaggcttgcgggggatgcattatatcagtgggaggtcagattcctaacaacctggccgtgccactttataagaatggtgtgaaaatcatggggacttccccgctgcagatcgatcgggcagaagatagatccattttctctgcggtgttggatgagctcaaagtcgcccaggcaccctggaaagctgtgaacactctcaacgaggccctcgagttcgcaaagagcgttgattatccttgcctcctcaggccttcatatgtcctgagcgggagcgcaatgaacgtcgtgttttccgaggatgagatgaagaaattcctggaggaggccacccgcgtgtcccaggaacacccggtcgtgttaactaaattcgtggagggcgcaagggaagtggagatggacgctgtgggaaaggatggtcgcgtcatttcccatgccatttccgaacatgtggaggatgccggtgtgcatagcggtgatgctacactgatgctccccactcagacaattagtcagggcgctatagaaaaagtgaaggatgctactcgtaagattgccaaggccttcgccattagtggccctttcaacgttcagttcctggtgaagggcaatgacgtgctggtaatcgaatgtaacctcagagcatcccggtcctttccattcgtgagcaagacactgggagttgatttcatcgatgttgccactaaagtgatgattggcgaaaacgtcgacgaaaagcatctacccactttggaccatcctataattcctgcagactacgtggccattaaagctcctatgttctcttggccacgattgagggatgccgacccaatcctcaggtgcgagatggcaagcaccggcgaagtcgcctgtttcggtgaaggcattcacacagcattcctgaaagccatgctgtccactggctttaaaataccccaaaagggaattctgatcggcatccaacagtccttcagaccacgatttctgggcgtggctgaacaactgcacaatgaggggttcaagttgttcgcaacagaagccaccagcgactggctgaacgccaataatgtaccagcaaccccagtggcctggccatctcaggaaggtcagaaccccagtctatctagtatccgcaaactgattagggacggtagcatcgatctggtgatcaacctccccaacaacaataccaagtttgtgcatgacaactacgtgatccgccgaaccgcagtggactccggcatcccccttctcaccaatttccaggtgacaaaattattcgccgaagcggttcagaaaagccggaaggtggactctaagtctttgtttcattaccgccagtattccgcaggcaaggctgcttag

SEQ ID NO: 43454 - DNA, 4500 bp, Artificial Sequence
  derived and/or modified sequence
atgactagaatacttactgcattcaaagtggtgcgcaccctgaaaaccgggttcggctttacgaatgtgacggcacatcaaaagtggaaattctccagacctggtataagactgctgtcggtcaaagcccagactgctcatattgtgttggaggacggtaccaagatgaagggatattcgtttgggcatccaagcagcgtcgcaggtgaagtcgttttcaatactggactgggtggatacccagaagcaatcactgatcctgcgtacaagggtcagattctgaccatggcgaaccccattattggtaacggaggtgctcctgacactacggcactggatgagctgggcctgtcaaagtacctcgaaagcaacggtattaaggtgtccggccttctggtgctcgattacagcaaagactataatcactggttggcaactaagtccctgggccaatggctccaagaagagaaggtgcctgcaatctacggagtggataccagaatgcttaccaagattatacgagataaaggtactatgctgggtaagatagaattcgaaggccagccagtggatttcgtcgatccgaataaacaaaacctgattgctgaagtgagcaccaaagatgtgaaggtgtacggaaagggaaaccctaccaaagtggtggctgtggactgcggcattaagaataacgtgattcggctgctcgtgaagcgaggtgccgaggtacatcttgtcccctggaaccatgacttcactaagatggaatacgatggcatcctgattgcaggtggcccgggcaaccctgccctggccgaacccttgatccagaatgtgcgcaagatactcgaatcggatagaaaggaaccactttttgggatctcgaccggaaacctgattactggattggccgctggggcaaagacctacaagatgtctatggcaaatagaggacaaaaccaacctgtcctgaacattaccaataaacaggcgttcataaccgcacaaaatcatggttacgccctcgacaacactctgccagcgggatggaaacctctgttcgtcaacgtgaatgaccagaccaacgagggtattatgcatgagtcgaagcccttttttgcagtccaatttcatcctgaggtgacgccaggacccattgatactgaataccttttcgactccttcttctcgttgataaagaaggggaaggccactacgatcacttcagtgttgcctaagcccgcactggtggcttctcgggtggaagtctcaaaagtgctgatcctgggctccggcggactgtcaatcggacaagccggtgagttcgattacagcggttcacaagcagtgaaggccatgaaggaagaaaacgtcaaaaccgtgctgatgaacccgaacattgcttctgtgcaaactaatgaagtcggtcttaagcaggcagacaccgtgtacttccttccaattaccccgcaatttgtgaccgaagtgatcaaggccgagcagccggacggactcatccttggcatgggtggtcaaactgcccttaactgtggtgtcgaactgttcaaacgaggggtcctgaaggaatacggcgtgaaggtgcttggaacttcggtggaatccattatggctaccgaagataggcaattgttttccgataaactcaatgaaatcaacgagaaaatcgcaccatcattcgcagtggagtcgatcgaagatgccctgaaggcagctgacaccattggttaccctgtcatgatccgcagcgcatacgcactgggaggcctgggaagcggaatctgtccaaatagagagactcttatggatttgtcgactaaggcatttgcaatgactaatcaaattctggttgaaaagtctgttaccggctggaaggaaattgaatacgaagtggtgagggacgccgatgacaactgcgtcaccgtctgtaatatggaaaacgtggacgcaatgggggtgcatactggtgattcggtggtggtggcaccagcacagaccctgtcgaatgcagagtttcagatgctgcgcagaacttccattaatgtcgtgcgtcatcttggaattgtgggagagtgtaacatacagttcgcactccatcctacttcgatggaatattgtatcattgaggttaacgcaagactgtctcgctcctcggcacttgcgtccaaggcaaccggatacccacttgcattcattgcagcaaagattgcactgggtattccactccccgaaatcaagaacgtcgtctcgggtaagacgtccgcttgctttgagccatctttggattacatggttaccaagataccccggtgggacctggataggtttcacggaacctcgagcagaatcgggagcagcatgaagagcgtgggggaagttatggcaattggtcgtacctttgaagagagctttcaaaaggctctccgcatgtgtcatcctagtattgaaggtttcacccctcgccttccaatgaacaaggaatggccatcaaacctggatcttagaaaggagctgtccgaacctagctcaactcgtatatacgcgatcgcaaaggcaatcgatgacaacatgtcccttgacgagattgagaaacttacctatattgataaatggtttttgtacaagatgagggatatcctcaacatggaaaaaaccctgaagggtctgaattccgaatcgatgaccgaggagacgcttaagcgcgccaaggaaataggcttttccgacaagcagatatcgaagtgccttggtctgaccgaagcacagacccgtgaacttcgtctgaagaaaaacatccacccatgggttaagcaaatcgataccctggcagcggaatacccctcggtgaccaactacctttatgtcacttataacggacaggagcatgatgtcaattttgacgaccatggaatgatggtccttggctgtggaccgtaccacataggcagcagcgtcgaatttgactggtgtgcagtgtcctcaatcagaactctccggcagctggggaaaaagactgtggtggtgaactgtaaccccgagacggtgagcaccgatttcgatgagtgcgataagctctactttgaggaactctcacttgaacgcatcctcgatatctaccatcaggaagcatgcggaggttgcatcatatcagtgggcggccaaatcccaaacaatttggccgtgcccctctacaagaatggagtgaagattatgggcacctcccctctccaaatcgatagggctgaggatagatcgatcttttccgctgtgctggatgagctcaaggtggcccaagcaccctggaaggctgtgaacactcttaatgaagccctggagttcgcgaagagcgtggattacccttgcctgctgcggccgtcttacgtgttgtcgggctcggcgatgaatgtggtgttttctgaggacgagatgaaaaagttccttgaagaggcaactagagtgtcgcaggagcacccggttgtcctgacgaagttcgtcgaaggggcccgggaagtggaaatggacgccgtcggtaaggacggacgggttatttcccatgcaatttccgagcatgtggaagatgccggtgtccactctggggacgcaacccttatgctgccgacccagaccatatcgcaaggcgcaatcgaaaaggtcaaggatgcaacgcgtaaaatcgcaaaagcattcgcaatctccggcccctttaacgtgcagtttctggtcaagggaaatgatgtgctcgtcattgagtgcaatctgagagcatcccggagctttccgttcgtgagcaagacgttgggagtggactttattgacgtggctactaaggtgatgattggagaaaatgtcgacgaaaaacatctccccaccctcgatcatcctattatcccagcggactacgtggcaatcaaggcacctatgttttcctggccacgacttcgggatgcagacccaatcttgaggtgtgagatggcatcgactggggaagttgcttgctttggagagggcatacacactgcgtttcttaaggcaatgttgtccaccggatttaagatcccgcaaaagggtatcctgatcggaatccaacagtcctttcggccacgttttcttggcgtggccgaacaactgcataatgaaggcttcaaactttttgcaaccgaggcgacttccgactggctgaacgccaacaacgtgcctgcaacccctgtggcatggcctagccaggaggggcagaatccaagcctttcatccatccggaagctgatccgcgacggctcaattgacctcgtgattaacttgcctaacaataacacgaaattcgtgcacgataactacgtgatcagaaggactgcagtcgactcaggcattccactcctcactaactttcaggtgactaagttgtttgcagaagcagtgcagaaatcgagaaaggtggattccaaatcactttttcactaccgacaatactccgcaggcaaggcggcg

SEQ ID NO: 43455 - DNA, 4500 bp, Artificial Sequence
  derived and/or modified sequence
atgacccgcatactgaccgcgttcaaagtcgtccggaccctaaagacaggcttcggattcactaacgtgactgctcaccagaaatggaagttctccagaccaggaataagattacttagtgtcaaggctcaaacagcgcatatcgtgcttgaagatggaactaagatgaaaggatatagcttcggtcacccatcctctgtggccggcgaagttgtgttcaacaccggcctaggagggtatcctgaagcaattacagacccagcttacaagggacagatactcacgatggcgaatcccattatcgggaacggcggggcacctgacacaacagccctggacgaactggggttgtcaaagtacctggagtccaacggcatcaaagtctccggcctgctcgtgctcgattacagcaaggattacaatcattggttggcaacgaagtccctaggtcagtggctgcaagaggagaaagtccccgccatatacggcgtggacacacgcatgctgacgaagatcatccgcgacaagggaaccatgttgggtaaaattgagttcgagggccagcctgtcgacttcgtggaccctaataagcaaaacctgatcgctgaagtcagcacaaaagacgtgaaagtttacgggaagggcaatcccaccaaggtcgtggccgtcgattgcggcatcaaaaataacgtcatcagactattggttaagaggggcgccgaggtacatctcgttccctggaaccacgacttcaccaagatggaatacgatggaattctgatcgcgggcggtcctggaaaccccgcactggcagagcctctcatccaaaatgtacggaaaatcttggaaagcgatcgcaaggaaccactgtttggcatttctacagggaacctgattaccggcttagctgctggggcaaaaacttacaagatgtcgatggccaaccgcgggcagaatcaacctgtactgaatattacaaataaacaagcctttattactgcacagaaccatggctatgcgctggacaacaccctccctgctggatggaaaccccttttcgttaacgtgaatgaccaaactaatgagggcatcatgcacgagagcaaaccattcttcgccgtgcagttccatcctgaagtcactcccggacctattgataccgaatatctttttgattcttttttttctcttattaagaaaggaaaagccaccacaatcactagtgtactgcccaagcccgcactagttgcttcacgtgtggaagtgagcaaagtgctgatactcggcagcgggggtctttcaattgggcaggcaggcgaattcgattactcaggctcacaggccgtgaaagctatgaaagaagagaatgtaaagactgttctgatgaaccctaacatagcgtctgtgcagacaaatgaagtgggcctaaaacaagcagatactgtgtatttcctgccaatcactccacagttcgtcacagaagtgatcaaggcggagcagccagacgggctgattctcggaatgggcgggcagaccgccctcaactgcggcgtcgaactctttaagcgtggcgtgttgaaggaatatggcgtgaaagtactgggcaccagtgtggagtctatcatggctaccgaagaccggcaactgttcagcgacaagttgaacgagattaacgagaagatcgcaccatcctttgcagtagaaagcatcgaggacgcactgaaagctgccgataccatcggctaccctgttatgatccgctcagcgtatgctttagggggcctcgggagcggaatctgtccgaacagagagactctgatggacttgtccacaaaggcatttgcaatgactaaccagattctagtagagaagagcgttacaggctggaaagaaatcgagtatgaagtagttcgggacgctgacgacaattgcgtgacagtttgcaatatggagaacgtggacgctatgggcgtacacacaggagattccgtcgttgttgcaccagcccagaccttgagtaatgcagaattccaaatgctgcgaaggacctccatcaacgtggtgaggcatctaggtatagtgggcgagtgtaatattcaatttgctctccatcctacaagtatggagtactgtatcatcgaggttaacgcacggctgagtcgaagcagcgccttggcctccaaagccacaggataccctctcgcctttatcgctgcaaaaattgcgctcgggatcccattgcccgagattaagaatgttgtgtctggcaagacaagtgcgtgttttgagcctagtctggattacatggtcaccaaaatacctcgctgggacttagacagatttcacggcacgagcagccggatcggctcttcaatgaaatcagttggagaggttatggcaatcggacggaccttcgaggaaagcttccaaaaggccttgcgcatgtgccatccgtcaattgagggtttcacccctcgcctcccaatgaataaagaatggcctagcaacctggatttacgaaaagaactgagtgaacccagctcgactcgcatctacgcaatcgctaaggcaatagatgataatatgtctctcgacgagatcgagaagttgacatatatcgataaatggtttctgtacaaaatgagagacatcctaaatatggagaaaacactgaagggactgaactcagagagtatgactgaggagacactgaaacgggctaaggagatcggcttttccgataaacagatatctaaatgtttagggctgaccgaggcgcagactcgtgagctgcgccttaagaagaacatccatccctgggtcaaacagattgacactcttgccgccgagtatccttctgtgactaattacctgtatgtgacctataatgggcaggaacacgacgtcaactttgatgatcacggcatgatggtactggggtgtggaccttatcatattgggagctccgtggaatttgactggtgcgccgtgagcagcattagaactctaaggcagctgggcaagaagaccgtggtcgttaattgtaacccagagaccgtgtcgaccgacttcgatgagtgtgataagttatacttcgaagaattgtccctggagcgcattctcgatatttatcaccaggaggcatgcggggggtgcattatttctgtaggaggacagattcctaacaacctggccgtacctctgtacaagaatggggtcaaaattatggggacatcccccctgcaaatcgatcgcgctgaagacagaagcatattctctgctgtcctggacgagcttaaggtggcccaggctccatggaaggccgtaaacacactgaatgaagctctagaattcgccaaaagcgtagattacccctgtctccttagaccctcctacgttctgtctggctctgcaatgaatgtggtgtttagtgaggacgaaatgaaaaagttcctggaggaagccacaagagtgtctcaggagcacccagtcgttctgacaaagtttgttgaaggcgctcgcgaggttgaaatggatgcagtgggaaaagacggccgagtgattagtcacgccatcagcgagcacgttgaagacgcaggggtgcactccggcgacgcaaccctgatgctgccaactcagaccatctcccagggcgcaatcgaaaaagtcaaggacgcaacaaggaaaatagcaaaggcctttgcaatctcgggaccgttcaacgtccagtttttagtgaaagggaacgatgtcttggtgattgaatgcaatttacgggcgtcgaggagctttccatttgtgtctaagaccttgggagtggactttatagacgtggcaaccaaggtgatgatcggagagaacgtggatgagaagcacttaccgacgctggaccatccaatcatacctgccgactacgtggctatcaaagcgccgatgttttcatggccgcgtctgcgcgacgcagacccgatcctcagatgcgaaatggccagtacaggcgaagtagcttgtttcggcgaaggaatccataccgctttcctaaaggcgatgctgagtacaggcttcaagatccctcagaagggtatacttatagggatccagcaatcctttaggccccgcttcctgggcgttgccgagcagctacacaacgaaggcttcaaactgttcgccactgaggctacatctgattggctgaacgcaaacaacgtgcctgctacccctgtcgcctggccatcccaggagggacaaaatccaagtctcagttccataagaaagttaatacgagacgggtctattgacttggttataaacctgcctaacaataatacgaaattcgttcacgacaattacgtaattcggcgcacagctgtggactccgggattcctctgctaactaatttccaggtgactaagctgtttgccgaggctgtgcagaaaagtagaaaggttgattccaaatcactgttccactaccggcagtactctgcagggaaggccgct

SEQ ID NO: 43456 - DNA, 4500 bp, Artificial Sequence
  derived and/or modified sequence
atgacaagaatcttaaccgcatttaaggtggtgcgaacactgaagactggattcggcttcaccaacgtcactgcacaccagaagtggaaattttctagaccagggattcggctgttgtcagtcaaggctcagaccgcccacatcgtgcttgaggatggaacaaagatgaaggggtactcattcggccacccgagctctgtcgcgggggaggtggtgttcaacactggcctcgggggttatcctgaggctataaccgacccagcttataaggggcagatcctgacaatggctaacccgattattgggaacggcggcgccccagatacgacagccctggacgaactgggcctatcaaagtaccttgagtctaatggcatcaaggtgagcgggttgcttgtgctagattactccaaggattacaaccattggctcgccaccaagtcgctgggccagtggctgcaggaggagaaggtccccgccatctacggcgtagatacccgaatgcttaccaaaatcatacgtgacaaaggcacgatgcttggcaagatcgagtttgaagggcagcctgtggattttgtagatcccaataagcagaacctgatagccgaggtatctactaaggacgtgaaggtgtatggtaaaggcaatcctacaaaagtggttgcggtggattgtggaatcaaaaataacgtgattagactgctcgtgaagcggggtgccgaagtgcatctggtcccctggaaccatgacttcaccaagatggagtacgatggtattttgatcgccggaggccccggcaacccagctctggccgaacccctgattcagaatgtgagaaaaatcctagaaagcgaccgcaaggaacccctgtttggcatatccactgggaacttgattacagggctggcagcaggcgccaagacgtacaagatgtctatggcgaaccgaggccagaatcagcccgtgctgaatatcacaaacaagcaggctttcatcacagctcagaatcacggatacgcattagacaacacactgcccgcaggatggaagccactgttcgtaaatgttaacgatcagactaatgaaggcatcatgcacgagagcaaaccattttttgccgtgcagtttcacccggaggtgactcctggccccatcgatacagaatacttgttcgatagtttcttcagcctgatcaaaaaagggaaggcaacgacaataactagtgttcttcccaagccagccctcgtcgccagtcgagtcgaagtgagcaaagtgctcattcttggatctgggggcctgagtattggccaggccggtgaattcgactattccggtagccaggcagttaaagcgatgaaggaggagaatgtgaaaaccgttctgatgaatcctaacatcgcctccgtgcagaccaatgaggtgggtcttaagcaggctgatacagtgtatttccttccaatcacaccacaattcgtgacagaagtgattaaggccgagcagcccgacggcctgattctaggcatgggcggacaaacagctctcaattgcggcgtggagctgttcaagcgaggcgttctgaaggaatacggcgtgaaagtgctgggcactagtgtcgaatctatcatggccaccgaagatagacagcttttctccgacaagcttaacgaaatcaacgaaaagatcgctccttctttcgccgtcgaaagcattgaggacgccttgaaagccgccgatacaattggctatccagtaatgattaggagcgcttacgcgctaggcggacttggctccgggatctgccccaaccgcgagacgctcatggacctttcaaccaaagccttcgccatgacaaatcagatactcgtggaaaagtctgtgaccggctggaaggaaattgagtacgaggtcgtaagggatgccgatgacaattgcgtgacagtgtgcaacatggagaatgtagacgctatgggagttcatacaggagattcagtggtagtagcgcctgcccagaccctatctaatgctgagttccagatgttgaggcgcacatctatcaatgttgtgagacacctgggaatagtgggagagtgcaacatccagttcgccctgcaccctaccagcatggagtactgtattatcgaagtcaacgcacggctgagccgctcaagcgcgcttgcctctaaggccactggataccccctggccttcattgccgccaaaattgcactcggaatccctctgcccgagattaagaatgtggtctctggcaaaactagtgcatgctttgaaccgagcctggactatatggtgacaaagattccacgctgggacctggaccggttccatggcacctcatcacgcattggttcatctatgaagagcgtcggcgaagttatggccataggcagaacattcgaggagagtttccaaaaggccctgcggatgtgccatccctctatcgaaggcttcaccccccgactgcctatgaacaaggagtggccatctaacctggatcttagaaaagaactgtccgagccatcatcgactaggatatacgcgattgctaaggcaattgatgacaatatgagtctggatgagatagagaagttgacctacatcgacaaatggtttctgtacaagatgcgggatatcctaaatatggagaagacgttaaaaggcttgaactccgagtcaatgacagaagagacccttaagcgggctaaagagataggattttcagacaagcagatcagcaagtgtcttgggctcaccgaagcacagactagggaactccgcctgaagaagaacatacacccttgggttaagcagatcgataccctggctgctgagtatccttcagtaactaattatctgtacgtgacttacaatggccaggaacacgatgtgaacttcgatgaccatggaatgatggttcttgggtgcggcccataccacattggcagtagcgtggagtttgattggtgcgccgtttcttcaatccgaacccttcggcagctgggcaaaaaaacggtggttgtaaactgtaaccccgagactgtttcgactgatttcgatgagtgtgacaagctgtacttcgaggagctgagcttagaacggatcctggatatttatcatcaggaggcctgcggcggatgtattatctcggttggaggacagattcccaacaacctagccgttccattgtataaaaacggggtaaagattatgggtacttcgcccctgcagattgacagggctgaagatagaagcatattctccgcagtgctggacgagctgaaagtggcccaggcaccctggaaggctgtgaacactctgaacgaagccctggagttcgcaaaatctgtggattatccttgcctcctccgaccttcctatgtcctgtctggctcagcaatgaatgtggtgttctctgaggatgagatgaagaaattcctcgaggaagcaacccgtgtcagccaggagcatcctgttgtgctgaccaagttcgtggagggcgctcgagaggtcgagatggacgcagtagggaaggatggcagagtgatcagccatgcgataagcgagcatgtcgaggacgccggggttcacagcggtgacgctactctaatgctgcctacacaaactatatcacagggcgccattgagaaagtgaaggatgcgacacgcaaaatagctaaggcgtttgctatcagtggaccttttaacgttcagtttctggtgaaaggaaacgacgtgctggtaattgagtgtaacctgcgcgcaagcagatcttttcccttcgtatcgaaaacactcggcgtagatttcatcgacgttgcaactaaggtgatgattggggagaatgtggacgagaaacatcttcctacgctggaccatccaattatccccgcagattatgtggctatcaaagctccaatgttttcttggcctcgcttgcgcgatgcagatcccattctgcgttgtgaaatggcctcaactggagaagtcgcctgtttcggcgagggaatccacaccgccttcctgaaagctatgctgtccacaggcttcaaaataccccagaaaggaatcctgatcgggatccagcagtccttccggccccgcttcctgggggttgcagagcagctgcacaacgaaggctttaagctgttcgctacagaagctacctccgactggctgaacgctaataatgtgccagctacgcccgtggcatggccttctcaggagggccagaatccttctctcagctcaatccgtaagctgattcgagatggaagcatcgacctcgtgatcaacctgccaaacaacaacaccaaattcgttcacgataactatgtgatcagacgcactgctgtcgattcaggcatcccactccttacgaactttcaggtcactaagctgttcgcggaggccgtgcagaagtctcgcaaggtcgactcaaagagtctttttcactaccgtcagtatagcgctggaaaggcagca

SEQ ID NO: 43457 - DNA, 4500 bp, Artificial Sequence
  derived and/or modified sequence
atgacccggattcttaccgctttcaaagtcgtgaggacccttaagactgggtttggttttactaacgttactgcacaccagaaatggaagttttcgcgacctggaatcagactgctttcggtgaaggctcaaacggcgcatattgtgcttgaagatggaactaagatgaaaggatactcgtttggacacccttcatcggtggcgggggaggtcgtgttcaacactgggctcggagggtacccggaggctattacggaccctgcatacaagggacaaattcttaccatggcaaacccaatcattggcaacggtggagcacctgacacgaccgcgcttgacgaactcggacttagcaaatacttggaaagcaacggtataaaggtgtctggactgctggtccttgattacagcaaggactacaatcattggctggcgactaagtcccttggacaatggctgcaggaagaaaaggtgccggccatttacggagtggacaccagaatgctgaccaagattattcgggacaaggggaccatgttgggaaagatcgaatttgagggtcaacctgtggatttcgtggatccaaataagcagaacctgattgcagaagtgtcgactaaggatgtaaaggtgtatggtaaaggaaacccaacgaaggtggtggcggtcgactgcggaattaagaataacgtgattcgacttctggtgaaacggggtgcagaagtgcacctggtgccgtggaaccatgatttcaccaagatggagtacgatgggatcctgatcgcaggtggtccaggtaacccagcacttgcagaaccccttatccagaatgtgaggaagatcctcgaaagcgatcgcaaagaaccactgttcgggatctcgactggcaaccttattaccggactcgcagcaggtgcaaaaacctacaagatgtccatggcgaaccgtggacaaaaccaaccagtgctgaacatcaccaacaaacaagcgttcataaccgcccagaaccatggatatgcacttgataatactcttcccgccgggtggaagccccttttcgtgaacgtgaatgatcagactaacgaaggaattatgcatgaatcgaaacctttcttcgcagtgcaatttcacccagaggttactccaggccctattgataccgaatacctctttgactcattcttttcacttatcaagaaaggaaaagccaccactataaccagcgtgcttcctaagcctgccctggtggcgtcacgagtcgaagtgtcgaaagtcttgattctgggatcgggaggactgtccattggacaggccggtgagtttgactactcgggatcgcaggcggtaaaagcgatgaaggaagagaatgtgaaaacggtgcttatgaaccccaacattgcatcggtgcagaccaacgaggttggactgaaacaggccgatactgtgtacttccttccaatcacgccgcagttcgtcactgaggtgattaaagcagaacaacctgatggactcatcctgggcatgggaggccaaactgctctcaactgcggtgtggagctgtttaagcggggtgtgctcaaggaatatggtgtcaaagtgctgggaacgagcgtggagtcaattatggcaactgaggatcggcaactcttttccgataagctgaatgaaatcaacgagaaaatcgccccttcttttgcagttgaatcgattgaagatgctttgaaggcagccgataccatcgggtacccggtcatgattagaagcgcatacgccctgggcggattgggatccggaatatgcccaaatagggagacgctgatggacctcagcacgaaagcatttgcgatgacgaaccagattcttgtggagaagagcgtcactggatggaaggaaattgagtacgaagtcgtgcgggatgcagacgacaattgtgtgaccgtgtgtaacatggagaacgtggacgcaatgggtgtgcatacgggagatagcgtggtggtggcacccgcgcagacgctgtccaacgctgagtttcagatgttgcggcgaacctcgataaatgtggtgcgccatcttggaatagtcggcgaatgcaacatacaatttgccctccatccaactagcatggagtactgcattatcgaagtcaacgccaggttgtcgagatcctccgccctggcatccaaggcaactgggtaccctctcgcattcattgccgcaaaaatcgcgttggggatccctctgccagaaatcaagaatgtggtgtccggcaaaacttccgcttgtttcgaaccatctcttgattacatggtgaccaagattccacgctgggatcttgataggtttcatggtacttcatcgcgcattggatcatcgatgaagagcgttggagaagtgatggcaattggaagaacgttcgaagaatcctttcaaaaggcacttaggatgtgtcatccatccatcgagggattcactccaaggcttcctatgaacaaagaatggccatcgaacttggacctgcgtaaggagctgagcgaaccctcatccacccgcatctacgctatcgccaaggcaatcgacgacaacatgagcttggacgaaattgagaagctgacctatattgacaaatggttcctgtacaagatgagagacattttgaatatggaaaaaactctgaaggggcttaattcagaatcgatgactgaagaaacgctgaaaagagcaaaagaaatcggcttttccgacaagcaaatctccaagtgtctgggacttaccgaggctcaaacccgcgagctgagactgaagaaaaacatccacccttgggtgaaacagattgataccctggccgccgagtacccttcggtcaccaactacctgtacgtgacttacaacggacaagagcacgatgtgaattttgatgaccacggaatgatggtgttgggatgcggcccttaccatatcggctcgtccgtggaatttgactggtgtgctgtgtcctcaattcgaactcttcgtcaactgggtaaaaagaccgtcgtcgtgaactgtaatccagaaactgtcagcaccgatttcgatgaatgtgataagttgtactttgaagagctgtccctggaaagaatccttgacatttaccatcaggaggcatgcggggggtgcatcatctcggtgggaggacagattcccaacaatctggccgtgcctctctacaagaacggcgtcaagattatgggtacctcgccactgcagatcgatcgcgcagaggacagatcaatcttttcggcagtgctggatgaacttaaagtggcccaagccccttggaaagcagtgaatactctgaacgaagcccttgaattcgcaaagtccgtcgattacccctgtttgctgcggccatcctacgtgctcagcggttctgcgatgaatgtggtcttttccgaagatgaaatgaagaagtttctcgaggaagcgacccgagtgtcccaggagcatcctgtcgtgctgaccaagtttgtcgagggtgctcgggaagtggagatggatgcggtcgggaaagacggtagagtgatctcacacgcgatctcggagcacgtggaagatgctggagtgcattcgggcgacgccaccctgatgcttcctacccaaactatttcgcaaggagctatagagaaagttaaagacgcgacccggaagatagccaaggcctttgccatttccggaccctttaatgtccaatttctcgtgaagggcaacgatgtccttgtgattgaatgtaacctgcgcgcaagtagatcatttccttttgtgtccaagactcttggggtggatttcattgatgtggcaactaaggtgatgattggagaaaacgtggatgaaaaacacctgcctaccctcgatcaccctatcattcccgctgattacgtcgccattaaagcgcctatgttttcgtggccccgccttagagacgccgatccaatactccgctgtgaaatggcaagcactggagaggtggcatgcttcggagagggtattcataccgcttttcttaaagcaatgcttagcaccggttttaagatcccacagaaaggcattcttataggcatccagcaatcattccgcccacgattccttggcgtggcagaacagctgcataacgaaggcttcaagctctttgccaccgaagcaacctcagattggcttaacgcaaacaatgtgcctgcgacccctgtggcttggccatcccaggaagggcagaatccctcactgtcatccattcggaagttgatcagagatggctctatcgatctggtgataaaccttcctaacaacaacactaagtttgtccatgacaattatgtgattagacgcactgctgtcgattccggaattccgcttttgactaatttccaagtgaccaaactttttgcagaagcagtccagaagtcgagaaaggtggattcgaagtcgcttttccattaccgtcagtactccgcaggcaaggctgcg

SEQ ID NO: 43458 - DNA, 4500 bp, Artificial Sequence
  derived and/or modified sequence
atgacgaggattctgacggcatttaaggtggtgaggacactgaagaccggatttgggtttacaaacgtgactgcccaccagaagtggaagttttcacggcccggtatcaggttgctgtccgtgaaagcccagacggcacatatcgtcttagaggatggcaccaaaatgaagggatactcttttgggcacccctcttcagtggccggcgaggtggttttcaataccggccttggggggtacccagaggcaattaccgaccccgcgtataagggccagatcttgaccatggcaaatcccattattggcaacgggggggcccctgacaccacggcacttgacgagctggggcttagcaagtacctagaaagcaatggtataaaggtgtccgggctcctcgtcctcgattattctaaggactataatcactggctagccacaaaatcgctaggccaatggctgcaagaagagaaagtgccagccatctacggggtggatacacgcatgctaaccaaaatcatcagagataaagggacaatgctggggaaaatcgagttcgaaggacagccagtcgacttcgtagatcctaacaagcaaaacctaattgccgaagttagcacaaaggatgttaaggtttatggcaagggtaacccaacaaaagtagtcgccgttgactgcggcattaagaataatgttatccgactgctagtgaagcggggtgccgaggtgcacctggtcccctggaaccatgacttcactaagatggagtacgatggaatcctcattgctggcgggcccggcaatccagcattggctgaacccctgattcagaacgtgaggaaaatccttgaatcggacagaaaagagcctttgttcggtatcagcaccggtaacttgattacaggactggcagctggcgccaagacctacaagatgtccatggccaacagaggccaaaaccagccagtgctcaacatcacgaacaagcaagcattcatcacagcgcaaaaccatgggtatgccctggacaacaccttgcccgccgggtggaaaccattatttgttaacgtaaatgatcagaccaatgaggggataatgcatgagtccaagccgttctttgccgttcaattccaccctgaggttacacctggacctatcgacaccgagtatttgtttgatagttttttctcgcttatcaaaaagggcaaggccacaacaattacaagcgtgttacctaagcccgccctggtggcctctagggttgaggtttctaaagtgttgattcttggatcaggcggcctgtccatcgggcaggccggggaatttgactactccggctcacaggcagtgaaggctatgaaggaggaaaatgtcaaaactgtcctaatgaacccaaacatcgctagcgttcaaactaacgaggtgggtctgaagcaggctgacacggtatacttcctccccatcacgccccagttcgtgactgaagtcattaaagctgagcagccagatggcctaatcctcggcatgggtggtcagacggccctgaactgcggggtcgagctcttcaagaggggagtgctcaaagagtatggtgttaaagttctcggaacctctgtcgaaagtatcatggctactgaagacaggcagctgttctcggacaagctgaacgaaattaacgaaaaaattgcgccttcattcgccgtggaaagcatagaagacgcattgaaggcggccgacaccatcggatatccagttatgatcaggtcagcgtatgcgctcggagggttgggtagtgggatttgtcccaatcgcgaaacactaatggacttatcgacaaaagctttcgccatgaccaaccaaattctcgtggagaagagcgtcacaggatggaaagagattgaatacgaagtggtaagggacgcggacgacaactgcgtgacagtgtgcaatatggagaatgttgatgcgatgggagtgcacacaggagattccgtggtggtcgcgcccgcccagacactgtcaaatgccgagtttcaaatgctgcgccgcaccagcatcaatgtggtccgtcatcttggcattgtcggtgaatgcaacatccagtttgccctacatcccacttccatggaatactgcatcattgaggtcaacgcccggctgagcagatcgagtgcacttgccagcaaagccacgggatacccgcttgcttttatagccgccaagatcgcactgggcatcccccttcccgaaataaaaaatgtggtttctgggaaaacgtccgcctgcttcgagccatcacttgactatatggtaaccaagattccaaggtgggacctggacaggttccacggcacatctagtcgtatcgggtctagtatgaagagcgtgggcgaggtcatggctataggacgcacgttcgaagaaagttttcagaaggccctgcgaatgtgccacccttccattgagggatttaccccaagactaccgatgaataaggagtggcctagtaatctggatctgagaaaagagttgtccgagccatcatcaactaggatctacgcaatagccaaagccatagacgacaatatgtcactcgacgagatagagaaactcacttatatagataaatggttcctttataaaatgcgggacattcttaatatggagaaaactctcaagggcttgaacagcgagtccatgactgaggaaaccctcaaacgcgctaaagagataggattctctgacaaacagatcagcaaatgtctgggcttgaccgaggcacagactagggagttgcgcctcaaaaagaacattcatccatgggtgaaacagatagatactctggcagctgagtatccctcagtgacaaattacctttacgtcacctacaacggacaggagcacgacgtgaattttgatgatcacggtatgatggttctgggttgcggaccttatcacattgggagctcagtggaattcgactggtgcgccgtgtcatcgattcgaacacttcgtcagttaggcaagaaaacagtagtcgttaactgtaatccggaaaccgtttctactgatttcgacgagtgcgataaactgtattttgaagagctttccctggagcggatcctggatatctaccaccaggaggcctgtggcggttgtattatatcggttggcggtcagatccccaacaatcttgctgtaccactctataaaaatggggtgaaaataatgggcaccagccccctgcagattgaccgcgcagaggataggtctatcttctctgctgtgcttgatgaactcaaggtcgctcaagcaccttggaaagcagtgaatacgttaaatgaagcgctggagttcgccaagtccgtggactacccttgtcttctgaggccttcatacgtgttgtccggtagcgccatgaacgttgtttttagcgaggacgagatgaaaaaatttctggaggaggctaccagagtgtcccaagaacacccggttgtgttgacgaaattcgtggaaggcgctcgcgaagtggaaatggatgctgtgggaaaggacggaagggtgatcagccacgctatcagcgagcatgtggaagacgctggcgtccattccggtgatgcaactctcatgctgcccacacagactatctcgcaaggcgccatagagaaagtgaaggacgcaaccagaaagatcgctaaagctttcgctatctccggaccttttaatgtgcagttcttggtgaaaggaaacgacgtgttagttatagaatgcaatcttagggcaagccgttctttcccattcgtttcaaagactctgggcgtggacttcatagatgtggctaccaaagtgatgatcggcgaaaatgtggacgagaagcatctgcccacgcttgatcacccaatcataccagctgattatgtcgctatcaaagctccaatgttttcttggccgaggcttagggacgccgatccaatattgagatgcgagatggcaagtactggcgaggtggcatgctttggcgaaggaattcacaccgcattcctgaaagctatgctgagtacaggtttcaagattccccagaagggaattcttattggaatccaacagtcattcaggcctcggttccttggcgtcgcagagcagttacacaacgaggggtttaagctgtttgcaacagaggctacttccgattggctgaacgccaataatgtcccagcgacaccagttgcttggccatcccaggaggggcaaaacccttccctgtcttcaattcggaagcttatcagagatggaagcattgacttagtgatcaacctgccgaataacaacaccaagtttgtgcacgacaactatgtcatacgtcgaacagctgtggattcagggatccctctgctcaccaactttcaagtgaccaagttattcgcagaggcagtccagaagagccgaaaagtggattctaaatcactgtttcactatcgacagtattctgctggcaaggccgca

SEQ ID NO: 43459 - DNA, 4500 bp, Artificial Sequence
  derived and/or modified sequence
atgactcgcatactcacggcttttaaagttgtgcgtacgttgaaaacaggctttggatttactaatgttacagcacatcagaaatggaagttctcaaggccaggaatccggctgttgtcagttaaagcgcaaactgcgcacatagttctcgaagatggcacaaagatgaaaggatatagttttggtcatccctcttcggtggcaggcgaggtagtgtttaacacgggcctggggggatatcctgaggccattacggacccagcgtataaaggccaaatacttaccatggcaaaccctatcatcggaaatgggggagcacctgacacgacggcacttgatgaattaggattaagtaaatacctggaaagcaatgggatcaaagttagcgggttgttggtccttgattattcaaaagattataatcattggttggctacgaaatcccttggacagtggcttcaagaagaaaaagtcccggccatctatggcgtcgatacgcggatgcttacaaaaatcatccgcgacaaaggaacgatgctgggaaagattgaatttgagggccagccagttgattttgtagacccgaataaacaaaatctgattgccgaggtcagtacgaaagatgttaaagtatatggcaaagggaatcctacaaaagtcgtggcggttgactgcggaattaaaaataacgtaatccgccttctagtaaaacggggcgcggaggtacacctggtcccgtggaatcatgattttactaaaatggaatatgatggcattcttattgccggcggacctggcaatccggccttagctgaacctctgatacagaacgttcggaaaattttggaatctgatcgaaaggaaccactgtttggaataagcacgggaaatcttatcactggacttgcagctggtgctaaaacatataaaatgtctatggcgaatcgcggacaaaaccaacctgttttaaatataacaaataagcaagcctttatcacagcacaaaaccatgggtatgctcttgataatacgttaccggcgggttggaagcctctgtttgttaacgttaatgatcagacaaacgagggtataatgcatgaatcgaagccgttttttgcagtacaattccaccccgaagtgaccccgggtccgatcgacaccgagtatttatttgatagcttttttagcctcattaaaaaaggcaaagccacaacgattacaagtgttcttccgaaaccggctctggtggcgagccgggttgaggtaagcaaagtgctgattttgggaagtggaggtttgagcatagggcaggcgggtgaattcgattattcggggtcacaggccgtaaaggcaatgaaagaagagaatgttaaaactgtgcttatgaatccgaatatcgcaagcgtccaaaccaacgaagtaggtctaaaacaggcggacaccgtgtacttcctccctatcacgccgcaatttgtcaccgaagttattaaggctgaacagccggatggacttattttggggatggggggacaaacggctttaaactgcggtgttgaattatttaagcgcggtgtactcaaggagtacggggtgaaagtcctcggcacatccgtggagagcatcatggcgacagaagatcgtcagcttttttctgacaagctgaatgaaattaacgaaaaaatcgccccgtcttttgccgtggaaagcattgaggatgcgcttaaggcagccgatacaatcggctatcctgtcatgatacgtagcgcatatgcactggggggcttagggtcagggatctgtcctaaccgcgaaacattaatggatctgtcaacgaaagccttcgctatgaccaaccagatcctcgtagaaaagagcgttactggctggaaggaaatagaatatgaagtggtgagagatgccgatgataactgtgtgaccgtatgcaatatggagaacgtggacgcaatgggtgtccatacgggcgatagcgttgtagtagctccggctcaaactctttctaatgcagaatttcagatgcttagaagaacatctatcaatgtggttcgtcacttggggattgtaggtgaatgtaatatacaatttgcgttgcatcctacatctatggaatattgtattatcgaagtcaacgcgagactcagcaggtcatcggctctggcaagcaaagctactggatatccgttggcctttattgcagctaaaatcgccttggggattcctctaccggaaattaaaaatgtcgtgtcggggaaaacatctgcctgcttcgagccgtcactcgattatatggttactaaaatccctaggtgggacctggatcggtttcatggaacgtcctcgagaattggaagcagcatgaaatcagttggggaagtcatggctattgggcgaacatttgaagaatcctttcagaaagcactccgcatgtgccatccttcaattgaaggctttaccccgcgacttcctatgaataaggagtggccctcaaacttggaccttagaaaagagctgtcagaaccttcgagtacacgcatttatgcgatcgctaaagcaatcgatgataatatgtctttagatgagatcgaaaaattgacatacatagataagtggttcctttacaaaatgcgtgacatcctgaatatggagaaaaccctgaaaggtttaaattctgaatctatgacggaagaaacccttaaacgtgccaaggagattggctttagcgacaagcagataagtaagtgcctcggattgactgaggcgcagacacgtgagttgaggttaaaaaaaaacattcacccttgggtaaaacaaatagatacacttgcagcagaatatcctagtgtgactaactatctctatgttacgtacaatggacaggaacacgatgtcaattttgatgatcatggcatgatggtattaggctgcggtccgtatcatatcgggtccagcgttgagtttgattggtgtgcagtcagtagcattcgaacgttgcgacaactgggtaagaaaactgtcgtggtcaactgtaatccagaaacagttagcacggattttgacgagtgcgataaactttattttgaagaactgtcgcttgaacggatcttggatatttaccatcaagaagcatgtggcgggtgcattataagtgtggggggccagattcccaacaatcttgcggtacctttgtataaaaatggcgttaaaattatgggcacaagcccactgcagattgatagagctgaagataggtctattttctcagccgttctagacgaattaaaagttgcgcaagcaccctggaaagctgtgaatacattaaatgaagctctggagtttgcaaaatcagtagattacccatgcttattaagaccgtcttacgtcttgtctgggtctgcgatgaatgtagtttttagcgaagatgaaatgaaaaagtttctggaggaagccacacgcgtgtcacaagaacatccggtagtattaacgaaattcgtggagggagcccgcgaagtggagatggatgccgttggcaaggatgggagagtgatatctcatgctatttcggaacacgtggaggacgccggggttcattctggtgatgctaccttaatgctgccgacacagacaatttcacaaggggctatcgagaaagtgaaagatgctacacggaaaatagctaaggcgtttgcgatatctggaccgttcaacgtgcaatttctagtaaaaggaaacgatgttcttgttatcgaatgcaaccttcgtgcctctcgctccttcccgtttgtctcaaaaacgcttggagttgacttcattgatgtagccacaaaagtaatgatcggtgaaaacgttgacgagaaacatttgccaacacttgatcacccgatcataccggccgattatgtggccattaaagcaccgatgttctcttggccgcggctgcgcgatgcggatcctattctacgttgtgaaatggcatcaacaggggaagttgcgtgctttggagagggcattcacacggcatttttaaaagctatgttatcgacagggtttaagattcctcaaaaaggaattcttattggaattcaacagtccttccgtccgagattcctgggagtcgcggaacagcttcataacgaaggttttaaactctttgctacggaggccacgagtgactggcttaacgcgaataacgttccggcgacaccggtagcatggccgtcacaagagggtcagaatccctctctctcttcgatcagaaaacttatcagagacggctcgatcgacctcgttattaacctccctaacaacaatacaaagttcgttcatgacaattatgtaatccggcgcacagcagttgactctggcattcctttactaacgaattttcaagtcacaaaattattcgctgaagcagtacaaaaaagccgtaaagtcgatagcaaatctctttttcattacaggcaatactcagcagggaaagcggcc

SEQ ID NO: 43460 - DNA, 4500 bp, Artificial Sequence
  derived and/or modified sequence
atgacgcggatcttgaccgcctttaaggtggtccggaccttgaaaaccggcttcggattcaccaatgtgacggctcaccaaaagtggaagttctcccgcccaggaatccggctgctctccgtgaaggcccagactgctcacatcgtgctcgaagatggaaccaagatgaagggttactcattcggccacccttcgagcgttgcgggagaggtggtgttcaataccggactcggcggatacccggaagcgatcaccgaccccgcttacaaggggcaaattctcactatggcgaatccgatcatcggtaacggaggagctccggacacgactgcgcttgacgagttgggattgtcgaagtacctcgagtcgaatggaatcaaggtgtccggcctgcttgtgctggattactcaaaggattacaaccactggttggctaccaagtcgttggggcagtggctgcaggaagaaaaggtgccagccatctacggcgtggacactcgcatgttgactaaaatcatccgagacaaggggaccatgctcgggaagatcgagttcgagggtcagcctgtggatttcgtggacccgaacaaacaaaacctcatcgcggaagtgtcaacgaaggatgtcaaggtgtacggaaagggaaatccgactaaggtggtggccgtcgactgcgggatcaagaacaatgtcattagattgttggtgaagcgcggtgctgaggtccatctcgtgccctggaaccatgacttcactaagatggaatacgacggaatcttgattgcgggaggaccgggaaatccggccctggcggaaccactcatccagaacgtgcggaaaatcttggaatcggaccgcaaagagccgctgtttggcatttcgaccggaaacctgatcactggactggccgccggagcaaagacctacaaaatgtcgatggcgaaccgcggtcagaatcagccggtcctgaatatcactaacaagcaggctttcattacggcccaaaaccacggctacgccctggacaacaccctgccggccggctggaagccactgttcgtcaacgtgaatgaccaaactaacgaaggcattatgcacgaatccaagccgttcttcgccgtccaatttcacccggaggtgactccggggccgatcgacactgagtacctcttcgattcgttcttctcgctgatcaagaaaggcaaagccacgaccatcactagcgtgctgccgaagccagctctggtcgcctcgcgcgtcgaggtgtccaaggtcctcatccttggatccggaggactcagtatcggacaggctggcgaattcgactacagcggatcgcaagccgtgaaggcaatgaaagaagagaacgtcaagacggtgcttatgaaccccaacatcgcatccgtgcagaccaacgaagtcgggctgaagcaggccgacaccgtgtacttcctgccaattactccacagtttgtcactgaggtgatcaaggcagagcagccagacggcttgatcctgggaatgggaggccaaaccgcgctgaactgtggtgtggagttgttcaagagaggggtgctgaaggaatacggagtgaaagtgttggggacctccgttgagtccatcatggcgaccgaggaccggcaactcttttcagataagctgaacgaaatcaatgagaagatcgctccgtcgtttgccgttgagtcgattgaggacgctttgaaggcagcagacacgattggatacccagtgatgatcaggtcagcctacgcactcggcggcttgggatccggaatttgtccgaaccgcgagactctcatggacctgagcactaaggcgtttgccatgaccaaccaaattctggtcgaaaagagcgtgactggatggaaggagatcgaatacgaagttgtgcgggacgccgacgataattgcgtgactgtgtgcaacatggaaaacgtcgacgcaatgggagtgcataccggagactccgtggtcgtggctccagcgcaaaccctttcgaacgcagaattccaaatgctgcggcgcaccagcatcaacgtcgtgagacacctgggaatcgtcggggagtgcaacatccaattcgccctgcaccccacttctatggaatactgcatcattgaagtgaatgctagactgtcgcgcagctcggctctggcctcaaaggccactggctacccactggctttcatagctgctaagatcgccctgggaatccctttgcctgaaatcaagaacgtggtgagcggaaagaccagcgcctgcttcgaaccgtccctggactacatggtgactaaaatcccacgctgggacctggacagattccacggtacctctagccgcatcggatcgagcatgaaatccgtgggcgaagtcatggccattggacggaccttcgaagaatcattccaaaaggccctgcgcatgtgtcacccgagtatcgagggatttaccccccggctgccgatgaacaaggagtggccaagcaacctggacctcagaaaggaactttcagaaccttcctccacgagaatctacgcgattgcgaaggctatcgacgacaacatgagccttgatgaaatcgaaaagctcacttacattgacaaatggtttctgtacaaaatgagagacattcttaacatggaaaagactctcaagggactgaatagcgaatcaatgaccgaagagacgctgaagcgggccaaggaaatcggatttagcgacaagcagatcagcaaatgcctgggacttaccgaagcgcagacccgcgaactgcgtctgaaaaagaacatccatccgtgggtgaagcaaatcgacaccctggcagctgagtacccgtcagtgactaactacctgtacgtcacctacaacggacaggaacacgatgtgaacttcgacgaccatggtatgatggtcctcgggtgcggaccttaccacatcggttcgagcgtcgaatttgattggtgcgctgtgtcctccatcaggactctgcggcaactcggaaaaaagactgtggtggtgaattgcaacccggaaacggtgtcaactgacttcgatgagtgcgacaaactgtatttcgaagagctgtcgctggaaaggatcctcgatatctaccatcaagaggcctgtggcggctgcataatctccgtggggggtcagattccgaacaacctggccgtccctctgtataagaatggagtgaagattatggggacttccccgttgcaaatcgaccgcgccgaagatcggtccatcttctcggcggtgctggatgaactgaaagtggcgcaggcgccgtggaaagcggtgaataccctgaatgaagcgttggagttcgccaagtctgtggactacccgtgtctgcttcggccatcttacgttctgtccggctctgctatgaatgtggtattttccgaggacgagatgaaaaagttcctggaagaggctactcgtgtgtcacaggagcaccctgtcgtgctgaccaaattcgtcgagggagcaagggaggtggaaatggacgcggtcggaaaggatggccgggttatttcgcacgccatttccgagcacgttgaggacgctggagtgcattccggagatgccaccctcatgctcccaacccagactatctcccagggagcgatcgaaaaggtgaaggacgccactcgcaagatcgcgaaagcctttgccatctcgggaccgttcaatgtgcaattcctggtgaaggggaacgacgtgctggtcatcgagtgcaatctccgagccagccggtcctttccatttgtgtcaaaaaccctgggagtggactttatcgacgttgccactaaagtcatgattggagaaaatgtggatgaaaaacacctgcccactctggaccacccgattatcccggccgactacgtcgctataaaggctccgatgttttcatggccgagactgagggacgcggacccaatcctgcggtgcgaaatggcgagcacgggtgaggtggcgtgcttcggagaaggcattcatactgccttccttaaagctatgttgtccaccgggttcaaaattccacagaaggggatcctcattggcatccagcagtcgtttcgcccgagattcttgggtgtggccgaacaacttcacaacgagggattcaaactgtttgccactgaagcaacctctgactggctcaatgcgaataacgtgccggctacccctgtggcatggccgtcccaggaaggacaaaacccttcactctcatcaatccgcaaactgatcagagatggctcgatcgacctcgtgatcaacctgcctaacaacaacaccaagttcgtgcatgataactacgtgatcagacgcactgcggtggattcggggatccctctgctgaccaacttccaggtgaccaagctgttcgctgaagcagtgcaaaagagccgaaaagtggattccaagtccctgttccattaccgccagtacagcgctggtaaagcggca

SEQ ID NO: 43461 - DNA, 4500 bp, Artificial Sequence
  derived and/or modified sequence
atgactaggattctgaccgcgtttaaggtcgtcaggactttgaaaactggttttgggttcaccaacgtgactgcacatcaaaaatggaagttttcgcggccaggtatacggctcctttcggttaaggcccagaccgcgcacatcgtgctcgaagatggaactaaaatgaaaggctactcgttcgggcatccatccagcgtcgcaggtgaagtggtgttcaacaccgggctgggaggatatcccgaagcaataactgatcctgcatacaaaggacaaattctcactatggctaaccctataatcggaaatggtggggcaccagatactactgccctggacgaactgggactgtcgaagtaccttgaatcaaacggaatcaaggtgagcgggctgcttgtcctcgactattcgaaagactacaaccactggcttgcaaccaaatccctgggccaatggctgcaagaagagaaggtaccagcaatctacggtgtggacaccaggatgctgaccaaaatcatccgagacaagggcaccatgctcggaaagatcgaatttgaaggacaaccggtcgattttgtcgatcccaacaaacagaatctgattgccgaggtgagcaccaaagacgtgaaggtgtacggaaaaggtaatccaactaaggtggtggcagtggattgtggtattaagaataatgtgattcgtcttttggtgaagagaggggccgaggtccatcttgtgccttggaaccatgacttcactaaaatggagtacgacggaatcctgatagcaggaggccctgggaatcctgcactggcagaacccctcattcagaacgtgagaaagattctcgagagcgatcggaaggaacctctgtttgggattagcaccggtaatctcatcactggactggcagcaggtgccaagacctacaagatgtcgatggccaaccggggccagaaccaacctgtgttgaacattacgaataagcaggcctttatcaccgcacagaaccatggatacgccttggataacaccctgcctgcaggctggaaaccactctttgtgaacgtgaacgatcaaactaatgaaggaattatgcatgagagcaagccattctttgcagtgcagtttcatcctgaagttactccgggacctattgacaccgagtacctgtttgattcctttttctccctcattaagaagggaaaggcgactacgattacctcagttcttcccaagccggcgttggtggcaagccgggtggaggtgtccaaggtgctcattcttggatccggtgggctgtcgattggacaagctggggagtttgactacagcggttcacaagccgtcaaagcaatgaaggaggaaaacgtcaaaacggtgcttatgaaccctaacatcgcatctgtgcaaaccaacgaagtggggctcaaacaagccgacacggtctactttcttcctatcactcctcaattcgtgaccgaagtgatcaaggccgaacagcctgatgggctgattcttggcatgggtggacaaactgcactgaactgtggggtcgagctgttcaaaaggggagtgcttaaagaatacggtgtgaaagtgctgggaacttccgtcgaatcgatcatggcaacggaagatcgccagctgttctccgacaaactgaacgagataaacgagaagatagcaccgagcttcgccgtggaatcaatagaggatgcccttaaggccgcagacactattgggtaccccgtcatgatacggagcgcatacgctttgggtggtctgggatccggtatctgtcctaaccgagaaacccttatggatctgtcaaccaaggcatttgccatgacgaaccaaatcctggtggaaaaatccgtgaccggttggaaggaaattgagtacgaagtcgtgcgggacgctgacgacaactgcgtgaccgtgtgtaatatggaaaacgtcgatgcaatgggagtgcacaccggtgatagcgtggtcgtcgcacccgcccagactctgagcaatgctgaatttcagatgcttcgaagaacttcaattaacgtcgtccgacaccttggtattgtgggcgagtgcaacatacaattcgcattgcatcctacctccatggaatactgcattatcgaagtaaacgcaagactttcgcgatcgtcggcactggcaagcaaggcaaccggataccctctggcgtttatagcagcgaagatcgcgctggggattccactcccagaaatcaaaaacgtggtgtctggtaagacttccgcatgttttgaaccctccctcgattacatggttaccaagattccccgctgggatctggatagattccatgggacgtcctcccgaattgggagttccatgaagtcggttggcgaggtgatggcaataggcaggactttcgaagaatcgttccagaaagcgctgagaatgtgccatccatctatcgagggatttaccccacgattgcctatgaacaaggaatggccttcaaacctggatctccgcaaagagctgtctgagccgtcaagcaccagaatttacgcaatagcgaaggccatcgatgacaatatgtcacttgatgaaattgaaaaacttacttacatcgataaatggtttctgtacaagatgagagacattcttaacatggaaaagactcttaagggactgaactccgaatcgatgaccgaagaaaccctgaagcgggcgaaagaaattgggttctcagacaagcagattagcaaatgcctgggattgactgaggcccagaccagagaactgaggctgaagaagaatatccatccttgggtcaagcaaattgacaccctcgcggccgagtacccctccgtgaccaactatctttacgtgacttacaacggtcaagaacatgacgtgaacttcgacgatcatggaatgatggtgcttggctgcggtccataccatattggttcgagcgtcgagtttgactggtgtgccgtgtcctcaatccgcactctgcgtcagctgggtaaaaagactgtcgtggtgaattgtaatcctgaaactgtgtcgaccgatttcgatgaatgtgacaaactctactttgaagaactgtccttggaaagaattctggatatctaccatcaggaggcctgtggcggctgcatcatttcggtcggtggacaaatacctaacaacctcgcagttccattgtacaagaacggagtcaagattatgggcacctcacctctccagattgaccgggcagaggatcggagcatctttagcgcagtgctggatgaattgaaagtcgcacaagctccatggaaagccgtgaacactctgaatgaggcactggagtttgccaaatcggttgattacccttgtctgcttcgtccttcctatgtgctctcgggttcggcaatgaacgtcgtgttctcggaagatgagatgaagaagttcttggaagaggcaacccgtgtgtcccaagagcatccggtggtgctgactaaattcgtggagggtgcacgggaggtggagatggatgcagtcggaaaggatggacgtgttatttcgcacgcaattagcgaacatgtggaagatgcgggagtccattcgggtgacgccactcttatgctgcctactcagaccatctcgcagggggccatcgagaaggtgaaggacgccactcgaaagattgccaaggcctttgcaatctcaggaccattcaacgtgcagtttctcgtgaaaggcaatgatgtccttgtcattgagtgcaacctgagagcgtcgagatcttttccttttgtgtccaagactcttggagtggactttattgatgtggcaaccaaagtcatgataggtgaaaacgtggacgagaaacatttgcccaccttggaccatcctattatccccgcagattacgtggccatcaaagcgccaatgttttcttggcccagactgcgtgatgcggacccaatattgcgctgcgagatggcatcaactggggaagtggcgtgtttcggagaggggattcataccgcatttcttaaagcaatgctttcgactggttttaagataccacaaaagggaatcctgattggaatccagcaatcatttagaccccgctttcttggggtcgcagagcagctccataatgaagggttcaagctctttgccaccgaggccactagcgattggcttaatgctaacaacgttcctgcaacccctgtcgcctggccctcacaagaagggcaaaacccatccctgtcgtccatcagaaaacttattcgcgacgggagcatagatctggtgataaatctccctaacaacaataccaagtttgtgcatgataactacgtgatcaggcgcaccgccgtggattcaggcattcctctgttgaccaatttccaggtgactaaactctttgccgaagcagtgcaaaagtcgcggaaggtggattcgaagtccctgtttcactaccgtcagtacagcgctggtaaggcagca

SEQ ID NO: 43462 - DNA, 4500 bp, Artificial Sequence
  derived and/or modified sequence
atgacccgaatcttgacagcttttaaggtagtgcgtacacttaagacagggttcgggtttaccaacgtgactgctcaccagaaatggaaattcagtaggccaggaatccgactactttccgttaaggctcagaccgcccacattgtgcttgaggacgggaccaagatgaagggttactcgttcgggcacccttccagtgtggcaggcgaagtggtgttcaatactggactgggtggataccccgaggccatcaccgacccggcttacaagggacaaattctgacaatggctaaccccattattggcaatggcggggcccctgacaccactgcactggatgagcttggactctccaagtacctcgaaagtaacggtattaaggttagcggcctgctggttctcgactacagcaaagactataaccactggctcgctacaaagtccttgggacagtggctacaagaagaaaaggtcccagccatctatggtgtagatacaaggatgttaaccaagatcatacgagataaggggaccatgctggggaagatagaatttgaaggacagcccgtcgactttgtcgatccgaacaagcagaatctgattgccgaagtaagcacaaaggatgtcaaagtgtatggcaaggggaatccaaccaaggtggtggcagtggactgcggcattaagaacaatgttatccgcttgctggtcaaaagaggtgctgaggtgcacctggtaccatggaaccacgactttactaaaatggaatacgacggcatcctaattgcgggcggacccggcaacccggccctggccgagcctctgatacaaaatgtaagaaagatcctggaaagtgataggaaggagccactatttggcatttctactggtaacctgatcacaggccttgctgcaggggcgaaaacatacaaaatgagcatggccaataggggccaaaaccaaccagttttaaacatcaccaacaaacaggcattcataacagcacagaaccatgggtacgcacttgacaacaccctccccgcggggtggaagcctctattcgtcaatgtaaacgatcagaccaacgagggcattatgcacgagagtaagccattctttgctgtgcagtttcatcctgaggtcaccccaggcccaattgacactgagtacctctttgacagcttcttctccttgattaaaaaagggaaagccactacaattacctccgttctacccaagcctgcgctggtcgcttcccgggttgaggtgtccaaggtgctaatccttggatctggtgggctttcaattggccaggctggagagtttgactatagtggcagccaggcggtaaaagctatgaaagaagaaaacgtgaagaccgtcctgatgaacccaaacatcgcttctgtgcagactaacgaggtcggtctgaagcaagcagacactgtctacttcctgccaattaccccccagttcgttaccgaggttattaaggccgaacaacctgacggcctgatactgggcatggggggtcagacagcgcttaattgtggagttgaactgtttaagaggggagttctgaaggaatacggagtgaaggtactgggcacctcggttgagagcattatggctacagaggatagacagcttttctccgacaagttgaacgagatcaacgaaaaaattgctcccagctttgccgtggaaagcatcgaagacgcactgaaagccgcagacacaataggttacccggttatgatcagaagtgcctatgcgctgggaggcctgggcagcggcatttgcccgaacagagaaactctgatggacctctccaccaaagcatttgccatgactaaccagattctagtggagaagtcagtaacgggctggaaggaaatagagtacgaagtcgttagagacgcagacgataactgtgtgacggtgtgcaacatggagaatgttgacgctatgggggtacatacaggggacagtgtggtggtcgcgccagcccagaccctgtctaacgccgaatttcagatgctgaggcggacaagcataaacgtcgtgagacaccttgggattgtgggagaatgcaatatccagttcgccttacaccctacctcaatggagtattgtattatagaagtcaacgctcggctgagtcgctcttcggccctggcttccaaggctaccggataccccttggcattcatcgccgccaagatcgccctgggcattccactcccagagattaagaatgtggttagcggaaagaccagcgcatgcttcgaaccaagtcttgactatatggtgaccaagatacccaggtgggacctcgaccgatttcacggaacttccagtcgaattggcagctccatgaagtccgtcggcgaggtgatggccatcgggcgaacttttgaggagtccttccagaaagcgctcaggatgtgccatccctcaatcgagggttttaccccccggctccccatgaacaaagagtggccaagcaacctggatctcagaaaggaactgagcgaacctagctccaccaggatctatgctatagcaaaggccattgacgacaacatgagcctcgacgaaattgaaaaactcacatacatcgacaagtggtttctttataaaatgcgagatatcctcaacatggaaaaaactctgaaggggttgaattcagagtcaatgactgaagaaacgctcaagcgggccaaagagatcgggttctcagacaagcagataagcaagtgtctgggcttgaccgaagctcagacacgagaactgcgcctgaaaaagaatattcacccctgggtgaaacagatcgatacactggccgcagagtacccatctgtgaccaactacctttacgtgacctataacggccaagaacacgacgtgaactttgacgaccacgggatgatggtgctaggatgtggcccataccatattggcagcagtgtagagttcgactggtgtgcggtgtcaagcatccgtaccctccgacagctcggcaaaaagacagtggtagtaaactgcaatcctgagaccgttagtactgatttcgacgagtgtgataagctgtacttcgaagagctcagcttggaaaggattctggacatctatcaccaggaagcctgcggcgggtgcattatcagcgtaggggggcagatccccaataaccttgctgtgcccctgtacaagaatggggttaagattatgggcacgtcccctctgcagatcgatagagcagaagatcgctccatctttagcgccgtgttagacgaacttaaggtagcccaagcaccctggaaggccgtcaacacgcttaatgaagcactggaatttgccaaaagcgtggattatccatgtctgctacgaccctcttacgttctcagtgggtccgctatgaacgtggtattctccgaggatgagatgaagaagtttctggaagaggcaacaagggtgagtcaagaacatcccgtagtgctgacaaaattcgtcgaaggcgcccgagaggttgagatggatgctgtcggcaaggatggtagagtcatttcccatgctattagtgagcacgtcgaagacgccggggttcacagcggcgacgcaacactgatgcttcccacacagaccatctcccaaggcgcaatcgaaaaggtcaaagacgctaccaggaagatcgccaaggcattcgcaatatcggggccgttcaatgtgcagttcttggtaaagggtaacgacgttctcgtgatcgagtgcaatttgagggcctctcgctcctttccttttgtgagtaagacactgggggtagactttatcgatgtagctactaaggtgatgattggcgagaacgtcgacgagaagcatctgccgaccttggatcatcctatcattcccgcagactatgtggcaattaaggcccccatgttctcatggccacgactgcgcgacgcggaccccatcctgagatgcgaaatggcaagcaccggcgaggtggcttgttttggtgaaggaatccatactgcatttcttaaggccatgctatcaaccggttttaaaatcccacaaaaaggaattctgattggaatccagcagtcatttcgaccccggttcctcggtgtagcagagcagctgcacaacgaagggttcaagctgttcgctaccgaggccacctccgactggttgaatgccaataacgttcctgccactcccgttgcgtggccctcacaggaggggcagaacccatctcttagctctatacgcaaactcattcgagacgggagcattgatctcgtgataaatctgccgaataacaacacaaagttcgtgcacgacaactatgttatccggcgaacagcagttgactccggtatcccactcctgactaattttcaggtgaccaagttgttcgctgaagccgtgcaaaaatcccgaaaggtggactcaaagagcctgtttcattaccgacagtactccgcaggtaaagctgct

SEQ ID NO: 43463 - DNA, 4500 bp, Artificial Sequence
  derived and/or modified sequence
atgaccaggatcctgacggcatttaaggtggtgcgtactctgaaaaccggattcggctttaccaacgtcaccgcacatcaaaagtggaagttttcccgtcctggcattcgcctgcttagcgtgaaagctcaaaccgcccatattgtgctcgaagatggtactaagatgaagggttactcatttggacacccttcttcagtggcaggagaagtcgtgttcaatactggacttggtggctacccagaggcaattactgaccctgcctacaagggtcaaattctgactatggccaacccaattatcggcaacgggggtgcacctgacaccactgcccttgatgagctcggactgtcgaaataccttgaatcaaacggaattaaggtgtcggggcttcttgttttggattatagcaaggactacaaccattggcttgcaactaagtcacttggacaatggcttcaagaggagaaagtgccagccatatatggagtggacactagaatgctgaccaagatcatccgggataaaggaactatgttgggaaagattgaatttgaaggacaaccggtggactttgtggatcctaacaagcaaaaccttattgcagaggtgtcaactaaggatgtcaaggtctacggtaagggtaatcctaccaaggtggtggcagtggactgtggaatcaagaataatgtgatccggcttcttgttaaacgcggagcagaggtgcaccttgtcccttggaatcacgattttaccaagatggagtacgatggaatactgattgcaggagggcctggaaatcccgccctcgcagaacctctgattcaaaacgtgcgaaagattctcgagtctgacagaaaagaaccgctttttggaatatcgactggcaaccttatcaccggtctggccgcaggtgccaagacttacaagatgtccatggcaaaccgaggccaaaaccaaccagtgcttaacataaccaataagcaggcattcattactgcacaaaatcatggttacgccctcgataacactctgcccgcagggtggaagcctcttttcgtgaacgtgaacgatcagaccaatgagggaattatgcatgagagcaagccctttttcgcggtccaatttcatccagaggtcaccccaggacctatcgacactgagtatctttttgattccttcttctcgctgattaagaagggaaaggcaacgactattacttcggtgctgccaaagccagcccttgtggcgagcagggttgaggtttccaaggtccttattctggggtcgggcggcctttctatcggccaagccggagagtttgattattcggggtcgcaggcagtgaaggccatgaaggaagaaaacgtcaagaccgtgcttatgaaccctaacattgcctccgtgcagactaatgaagtcggtctgaaacaggctgatactgtgtactttctcccgatcactccacagtttgttaccgaagtgattaaggccgaacaacctgacggtcttatccttggaatgggaggtcaaacggcgcttaactgcggagtggagcttttcaagagaggagtgctgaaggaatacggggtgaaggtgcttggaacctccgtggaatcgatcatggcaaccgaggataggcaattgttttcggacaagctgaacgaaatcaatgagaaaattgctccctcgttcgccgtggagagcattgaagatgcacttaaagcggctgacaccattgggtacccagtgatgatcagatcggcatacgctcttggtggcctgggatcaggtatttgtcctaacagagaaaccctgatggacctttcgacgaaggcatttgcaatgacgaaccagatcctcgtcgagaagtcggtgactggatggaaggaaattgaatacgaagtggtgcgtgatgcagacgataactgtgtgactgtgtgcaacatggaaaatgtggatgccatgggtgtccataccggagactccgtggtggtagcccccgcccaaaccctgagcaacgctgaattccagatgcttagacgaacttcgattaacgtcgtgaggcatttgggaattgtgggagagtgcaatatccagttcgctctgcatcctaccagcatggaatactgcattattgaagttaacgcccgcctctccaggtccagcgcacttgcaagcaaggccacgggatacccgctggcctttattgcagcaaagattgcacttggaattcctcttcctgaaatcaagaacgtggtgtcgggtaagacttcggcctgttttgagccaagccttgactacatggtcaccaaaatacctagatgggatcttgaccggtttcacgggacttcctcaaggattgggtcgtcgatgaagtccgtgggagaggtgatggcaatcggcagaactttcgaagagtctttccagaaggcactccggatgtgtcatcctagcatcgagggatttactcctaggctccctatgaataaggaatggccatccaacctggacctgcgaaaagaactcagcgaaccttcgagcaccagaatttacgcaattgcaaaagcaatcgatgacaacatgtctcttgacgaaattgagaagctgacgtacattgataagtggtttctctataagatgcgggacattttgaacatggaaaaaacccttaagggactgaactcggagtccatgactgaagagacgcttaagcgggcgaaggaaattggcttttccgacaaacagatttccaaatgtcttggtctgactgaagctcagaccagggagctgcgccttaagaagaatatacatccttgggtgaagcaaattgacacccttgcagcagaatacccatcggtcactaactacctgtacgtcacctataacggtcaggaacacgatgtgaattttgatgaccatggtatgatggtccttggctgtggcccctaccatattggttcatcggttgaatttgattggtgtgcagtgagctcaatacgtaccctgaggcagctcggaaaaaagacggtggtggtgaactgtaatccagaaaccgtgtcaaccgattttgatgaatgtgataaactctactttgaggaattgtcacttgagcggattcttgacatataccatcaagaagcatgcggtggttgtataatctcagtgggagggcaaatcccgaacaatctggcagtgccgctctacaagaacggggtcaagattatggggacgagccctcttcagatagatagggcggaagatagatcgatcttctccgcggtgttggatgagctgaaggtggctcaagcaccttggaaggcagtgaatacgctcaatgaagctcttgagtttgcaaagtcggttgattacccatgtctgctccggccaagctacgtcctttcgggatcggcaatgaatgtcgtctttagcgaagatgagatgaagaagtttctcgaagaagccaccagagtgagccaggaacaccccgtcgtgcttaccaaatttgtcgaaggagcaagggaagtggagatggatgcagtgggcaaggacggacgcgttatatcgcatgcaatttccgagcacgttgaggatgccggtgtgcactcgggcgacgcaacgctgatgcttcctacccagaccatatctcaaggcgccatagaaaaggtgaaagatgccactcgcaagatcgcaaaggcattcgccatatcaggaccctttaatgtccaattcctggtgaagggaaacgacgtcctggtgattgaatgcaacctcagagcaagccggtcctttccattcgtgtcaaagaccctcggagtggatttcattgacgtggctactaaggtcatgatcggtgaaaatgtggacgaaaagcatctgcctaccctggatcaccccatcatacccgcagattacgtggcaatcaaggcacctatgttctcctggccaagacttcgcgatgcagatcctattctgaggtgcgaaatggcctcaactggtgaagtggcttgctttggagaaggcatccatactgcatttcttaaagcaatgctctcgactggtttcaagattccgcagaagggaatccttattggaattcagcagtcatttcgcccaagatttcttggtgtggccgaacagttgcacaatgagggtttcaagctgtttgcaactgaagcgacttccgattggctgaacgccaacaacgttccagcgactccagtggcctggccatcgcaagaaggacaaaacccatcgttgagctccattcggaagctcattcgggacggatcgattgatctggtgatcaacctccctaacaacaacactaagtttgtgcacgataactatgtgatccgcaggaccgccgtggatagcggaattccactcctgactaacttccaggtcaccaaactgttcgccgaagcggtccagaagtcccgtaaggtggatagcaaatcgctctttcactacagacaatactccgcaggaaaggcagca

SEQ ID NO: 43464 - DNA, 4500 bp, Artificial Sequence
  derived and/or modified sequence
atgaccagaattttgaccgcattcaaggtggtccgcaccctcaagactggatttggattcaccaacgtgaccgcgcatcaaaagtggaagttttcccggcccggaatcagactgctgtcagtgaaagcccagacggctcacatcgtcttggaggacggaactaagatgaagggatactccttcggccacccatcctcagtcgcgggagaggtcgtgttcaacacgggacttggagggtaccctgaagctattacggatccagcgtacaaggggcagatcctcactatggctaatccgatcattggaaacggaggcgccccggacaccaccgcgcttgatgagctgggactttcaaagtacctcgagtcaaatgggatcaaagtctccggactgctggtcctggattacagcaaggactacaatcactggctggctactaaatccctgggacagtggctgcaagaagaaaaggtgcccgccatctacggagtggataccaggatgcttactaaaatcatcagggataagggaactatgctgggcaagattgagttcgaaggtcagccggtcgattttgttgatcctaacaagcagaatctcatcgctgaagtgtccaccaaagatgtgaaagtctatggcaagggcaatccaaccaaagttgtcgctgtggattgcggaatcaagaacaatgtgatccggcttctcgttaagcggggcgcggaagtgcacctggtcccgtggaaccacgactttaccaagatggagtatgacggaatcctgattgcggggggcccaggaaacccggccctggccgaaccactgattcagaatgtccggaagattcttgagtcggatcgcaaggaaccattgttcggcatctcgactggtaacctgatcactgggctcgccgcgggggccaaaacttacaagatgtcgatggcaaatcggggacagaaccaaccggtgttgaatatcactaacaagcaggcgtttatcactgcccaaaatcacggatacgccctggacaacactctgccagcgggctggaagcctctgtttgtgaacgtcaacgatcagactaatgagggcattatgcacgaatccaaaccatttttcgccgttcagttccacccggaagtgactccggggccgattgacactgaatacctgttcgacagcttcttcagcctcatcaagaaagggaaggccactaccatcacgtctgtgctccccaagcccgccctggtcgcttcaagggtcgaagtgagcaaggtgttgatactgggctccggtggactgagcatcgggcaggcaggagaatttgattactcggggtcgcaggcagtgaaggcgatgaaagaagagaacgtgaaaacggtgctgatgaacccgaacatcgcctcggtccaaactaatgaggtgggcctgaagcaggccgacaccgtttacttcctcccaatcacccctcaatttgtgaccgaagtcatcaaagctgagcaaccggacggacttattctgggcatgggtggacagaccgccctgaactgcggggtggaacttttcaaacgtggcgtgttgaaagaatacggcgtgaaagtgctgggaacctcggttgaaagcatcatggcaaccgaggaccgccagctgttttcagacaagctcaatgagattaatgagaagatcgcgccgtccttcgcggtggagtccattgaggacgccctcaaagcagcggacactatcggatacccagtgatgatccgatcggcctacgccctgggcgggctgggatcgggaatctgtcctaacagggaaactttgatggatctctctaccaaagcgttcgcaatgaccaaccagatccttgtcgagaagtcagtcactggctggaaggaaatcgaatacgaggtggttcgcgatgccgatgataactgtgtcactgtgtgcaacatggaaaacgtggatgcaatgggagtgcacaccggcgacagcgttgtggtggccccggcccagactctgtctaatgccgagttccaaatgctccgacgaacctccatcaacgtcgtgagacatctgggaatcgtcggcgagtgtaatatccagttcgctcttcatcccactagcatggagtactgcatcatagaggttaatgccaggctgagccggtcgagcgcactggcaagcaaagctaccgggtaccctctggctttcatcgccgccaagatcgccctcggcataccgctccctgaaatcaagaacgtcgtgtccggcaagacttcggcatgcttcgagccttccctggactatatggttactaagattccgcgctgggacctggaccggtttcacggaaccagctcacgcatcggctcgagcatgaagtcagtgggggaagtcatggccatcggacgtactttcgaggaatcgtttcagaaggctcttaggatgtgccatccgagcatcgagggattcactcctcggctgcccatgaataaggagtggccgtctaacttggacttgcggaaggaactctccgaaccgtcgtccacccggatctacgcaatcgcaaaagcgatcgatgacaacatgtcactcgatgaaatcgagaaactcacttacatcgacaaatggttcctctataagatgcgcgacatcctcaatatggaaaagacccttaaaggactgaatagcgagtccatgacggaagagactctcaagcgcgccaaggaaatcggcttctcagacaaacagatctcaaagtgcctcggactgaccgaagctcaaacccgcgagctgagactgaagaagaacattcacccctgggtgaagcagattgacacgttggccgccgaatacccaagcgtcaccaattacctgtacgtgacctataacggccaggaacacgatgtgaacttcgatgaccacggtatgatggtcctgggatgtggaccctatcacatcggtagctcggtggaatttgactggtgcgctgtgtcgtcaatccggaccctcagacagctgggaaagaaaacggtggtggtgaactgtaaccctgaaaccgtctccactgacttcgatgaatgcgacaaactttactttgaagaactgtcgctggagcggatcttggacatctaccatcaagaggcgtgtggaggctgcatcatcagcgtcggtgggcaaattcctaacaatctggctgtcccgctctataagaacggagtcaaaatcatgggaacttctcctctgcagatcgatcgcgcagaggaccggagcatcttcagcgcagtgctggatgaactcaaggtggcccaagctccgtggaaggccgtgaataccctgaacgaggccctcgagttcgcgaagtcggtcgactacccatgcctgcttagaccctcctacgttttgtcaggatcggcgatgaacgtcgtgtttagcgaagatgagatgaagaaattccttgaggaagcgactcgcgtgtcgcaggagcatcctgtggtcctgaccaagttcgtggaaggcgcgcgggaagtcgagatggatgcagtcggaaaagacggaagggtgatttcccacgccatctcagagcacgtggaagatgcgggggtgcactcgggagacgccacgctcatgctgccaacccaaaccatcagccaaggagccatcgaaaaagtcaaggacgcgacccggaagatcgccaaggcatttgcaatcagcggcccttttaacgtgcagttcctggtgaaggggaatgacgtcctggtgattgaatgcaatcttagagcttcacggtcgtttccgttcgtctcgaaaactctgggtgttgactttatcgatgtggcgactaaagtcatgatcggagaaaatgtggacgaaaaacacctccctaccctggaccaccctataatcccagctgactacgtggccatcaaggcgccgatgttttcctggccgagactccgcgatgctgacccgattttgagatgtgagatggcttccaccggagaggtggcctgtttcggagaaggaattcacactgccttcttgaaggcaatgctgtcaaccggattcaagatcccacagaagggcatcctcatcggcatccaacagtcattccgcccgagatttctgggtgtcgctgaacagttgcacaacgagggattcaaactgttcgccaccgaagcaacttccgactggctcaacgccaacaacgtgccggcgacgccggtcgcatggccttcacaagagggccagaacccatcgttgtcctccatccgcaagctgattcgcgacggttctatcgacctcgttatcaacctgccgaacaataacactaaattcgtccatgataactacgtgattcggcggactgccgtcgattcaggcatcccgctgctgaccaatttccaagtcaccaagctgtttgccgaggccgtccagaagagccgcaaggtggactccaagtcgctctttcactaccgacagtactccgctgggaaagccgcc

SEQ ID NO: 43465 - DNA, 4500 bp, Artificial Sequence
  derived and/or modified sequence
atgacacgcattcttacagcgtttaaagtggtgcggactcttaagacaggctttggcttcaccaacgtcacagctcaccagaagtggaagtttagtaggccgggaattaggttgttgtctgtaaaggcccagactgcacacatcgtacttgaggatgggacaaaaatgaaggggtactctttcggacacccttcctccgtggctggcgaagttgtgtttaatactggacttgggggctaccccgaggccataaccgatcctgcttacaaaggccagatattaacgatggccaacccgatcatcggaaacgggggcgcaccagatactaccgcgctcgatgagctgggcctcagtaaatacttggagagcaatggtatcaaagtcagcgggctgctcgttctcgactattccaaagactataaccattggctcgccacaaagtctctcggccagtggctgcaggaagaaaaggtaccagctatatacggagtcgacactagaatgctgacaaaaatcatcagggataagggcaccatgctggggaagattgaattcgaaggacaacctgtggatttcgtggatcccaacaagcagaatctgattgcagaggttagcactaaggatgtgaaggtttacggaaagggcaatcctacaaaggtcgtggctgttgattgtggaatcaagaacaatgttattaggctgctagtgaagaggggagccgaggtacatctggtcccttggaaccacgactttactaagatggaatacgatgggatactgattgccggaggtcctggcaacccagcccttgcggagcccctgatacagaacgtgaggaagattctggagtcggataggaaagagccgctgtttggcatttctacaggcaatttaattaccggactggccgctggcgcaaaaacctacaaaatgtcaatggccaatcggggccagaatcagcccgtactcaacatcaccaataaacaagcttttattaccgctcagaaccatggctacgctctcgataacaccctgcctgccgggtggaaaccactttttgtaaacgttaatgaccagactaatgaaggcattatgcacgaatccaagccattctttgcagtgcaattccacccggaggtcacaccggggccgatcgataccgaatatctattcgactcctttttctcactgattaagaaaggaaaggcgactacaattaccagcgtactcccaaagccagcactcgtggcttcccgggtggaagtgtccaaagtgctaatcttaggatcaggcgggctcagtattggccaagcaggcgaattcgactactcaggtagtcaggcagtgaaagccatgaaggaagaaaatgtaaagaccgtgcttatgaatcctaatatcgcaagtgttcaaacaaacgaggtgggacttaaacaagcagacaccgtgtactttctgcccatcactccgcagttcgtgacggaagtgatcaaagccgagcaaccagatggcctgatcttgggaatgggcggtcagactgctttgaattgtggcgtggagctttttaagaggggcgttctgaaggaatatggggtgaaagtgctagggacaagtgtcgaatccataatggcaaccgaagaccggcagctgttctcagataagcttaacgagattaatgaaaagatcgcgccttctttcgctgtcgagagtatagaggacgccctgaaagcagccgacacaattggttaccccgtgatgatccgatccgcttacgcactcggtggtttaggttcggggatttgtccgaacagggagactctgatggatcttagtactaaagcctttgcgatgacaaaccagatccttgttgagaagtccgtaaccggttggaaggaaatcgaatatgaagtcgtgcgggacgccgacgacaattgcgtgactgtatgtaatatggaaaacgtcgacgctatgggagtgcatactggcgactcggtagtggtggccccggcacagacactttccaatgcagaattccaaatgctccgtagaacatccatcaacgtggttaggcacctcggtattgtcggagagtgcaatatacagtttgcactgcatcctacaagcatggaatactgtatcatcgaggttaatgctagactcagtcggtcttccgcactcgcctcaaaagcaaccggataccctcttgcttttattgcagctaagatcgcgcttgggattcccctgccagaaatcaagaatgtcgtctccggtaagaccagcgcttgttttgaacccagcctagattatatggtcacgaagatcccgcgctgggatctggataggttccacgggacctcttctagaatagggtcctctatgaaatccgtgggagaagtcatggcaatcgggaggaccttcgaggagtccttccaaaaggccttgcgaatgtgtcacccctcaatagaaggatttaccccccggttgccaatgaacaaggagtggccttctaacttagacttgcgtaaggagctgagtgagcccagctcgacaagaatttatgccatcgcaaaggcaatagatgataacatgagtcttgacgagatcgagaagctgacctacatcgataagtggttcctgtacaagatgcgagacatactcaatatggaaaagactctaaaaggccttaactccgaatctatgacggaggagacactgaaacgggccaaagagattggcttttcagataagcagatctccaaatgtctgggactcaccgaggcacagaccagagagctgaggctgaagaaaaacatccacccctgggtgaagcagatagacacattggcagctgagtatccgagcgttactaactatttgtacgttacctataacggacaggagcatgacgtgaatttcgatgatcatggcatgatggtcctcggctgcggaccgtatcatatcggatccagtgtcgagttcgactggtgtgccgtgagcagcattagaacgctcagacagctgggtaagaagaccgtggttgtaaactgcaacccggagacagtctctactgatttcgacgagtgtgacaagctctacttcgaagaattgtcgctggaacggattctagacatttatcaccaagaggcttgtggtggatgtataatctctgtggggggccagatccctaataacctggccgttccactgtacaaaaatggagtgaagataatgggaacatcccccctgcagatcgaccgcgctgaggaccggagtattttttccgccgtgctggacgagttgaaggtcgcccaagcaccttggaaggccgtgaataccctgaatgaggcgctggaattcgccaaatctgtggattatccatgtctcctccgcccctcttacgttctcagcggcagtgccatgaacgtggtctttagcgaggacgaaatgaaaaagttcctagaggaggcaacccgggtgtctcaggagcacccagtggtcctgacaaagttcgtagagggagccagggaagttgagatggatgccgtgggtaaagacgggagagttatttctcacgctattagtgagcacgtagaagatgcaggagtccactccggagatgctacacttatgctgcctacgcaaacgattagtcagggggccatcgaaaaggtgaaggacgccactcggaaaatcgccaaggcatttgcgatcagtgggcctttcaacgtgcagttcctagtgaaggggaatgatgtgttggtgattgagtgcaatctaagggcttctcgcagcttcccgttcgtctcaaaaactcttggagtggatttcattgatgtggcaacaaaggtcatgatcggcgagaatgtcgacgagaaacacttgcctaccctggaccatcctattattccagctgactacgtggctattaaggctcctatgttttcatggccccgcctgagagatgcggatcctatccttcgatgtgaaatggcatcaactggcgaggtagcttgctttggtgaaggcatccatactgccttcctcaaggctatgctgtctaccggtttcaagatcccgcagaagggcatcctgatcgggatccagcagtcttttcgccccagattcctgggcgtcgcggagcagctgcacaatgaaggatttaagctctttgctacagaagctacctctgactggctcaatgccaacaacgtcccagcgacacccgtggcctggcccagccaggagggacagaaccccagtctgagttctatcaggaaactcattcgagacggctccatcgatctcgtcataaacctccctaacaataacactaaattcgtgcatgataactatgtaatccggagaacggcagtcgacagcggaatacctctgctaaccaactttcaagtgacaaagttgttcgccgaggctgtgcaaaagtccaggaaagtagactccaaatcactcttccactatcgtcagtactccgctggcaaggccgcc

SEQ ID NO: 43466 - DNA, 4500 bp, Artificial Sequence
  derived and/or modified sequence
atgaccaggatccttactgctttcaaggtcgttcgcacgctgaaaaccggattcggtttcactaatgtgacggcacaccagaagtggaagttctcgcggcctggcattcgcctcctctccgttaaggcgcagaccgctcacatcgtgctggaagatggaactaagatgaagggatactctttcgggcatccgtcgagcgttgccggcgaagtggtgttcaacactggactcggaggttacccagaagctattactgacccggcgtacaagggacaaatcttgactatggccaacccgataatcggaaacggcggcgcgccagataccaccgcgctggacgaactggggctctccaaatacctcgaaagcaacgggatcaaggtcagcggcctcctggtcctcgactactcgaaggattacaaccattggctggctacgaagtccctggggcagtggctccaagaggaaaaggttcctgcgatctatggagtcgacactcgcatgcttactaagatcatccgggacaaaggcacgatgctggggaaaatcgaatttgaaggccagcccgtggacttcgtggacccaaacaagcagaatcttatcgcggaagtgagcaccaaggacgtgaaggtctacggtaagggaaatcctaccaaggtcgtggcggtcgactgcggaatcaagaataatgtgatccggctcctggtgaaaagaggggccgaagtgcatcttgtcccgtggaaccatgattttacgaagatggaatacgacggaatcctgatcgcaggaggaccaggaaatcctgccctggcggaaccgctcattcaaaacgtgcgcaagattctcgagtcggatcgcaaagaaccacttttcgggatatctaccggcaacctgattactggcctcgccgctggagccaagacttacaagatgtctatggcaaaccggggtcaaaaccagccagtcctgaacatcaccaataagcaggcctttatcaccgcccagaaccacggatacgctctggataatacgctgccggcaggctggaaaccgctgttcgtgaatgtcaatgatcagacgaacgagggaattatgcacgagtccaaacccttctttgcggtgcagttccaccctgaagtgaccccgggaccgatcgacactgagtatttgttcgattcctttttctcccttatcaaaaagggaaaggctaccactattacttccgtcctgccgaagcctgcccttgtggctagcagggtggaagtgagcaaagtgctcatcctgggatcaggaggactttcaatcggacaagcgggtgaattcgactacagcggatcgcaggcggtgaaggctatgaaggaggaaaacgtgaaaactgtgctgatgaatccaaatatcgcttcggtccagaccaacgaggtcggactgaagcaggccgatacggtgtatttcctgcctataacccctcaattcgtgaccgaggtgattaaggccgaacagccggatggactgatcctgggcatgggcggacaaaccgcactcaactgtggagttgaactgttcaagcgcggggttcttaaggaatacggggtgaaagtgcttggtacctcggtggaatcgatcatggcgactgaagataggcagctgttttcagacaaattgaacgagatcaatgagaagatcgcgccctccttcgcggtggaaagcattgaggatgcacttaaggccgcggacactatcggctaccctgtcatgatacgatcagcatatgcccttggaggcctcggtagcggaatctgcccgaacagagaaacgcttatggacctgtccaccaaagccttcgcgatgaccaatcaaatcctcgtggagaaaagcgtcactggttggaaggaaattgagtacgaagtggtgcgcgacgccgacgacaactgcgttacggtgtgcaacatggagaacgtggatgctatgggggtccacaccggagactccgttgtggtcgcgccggctcaaactctgtcgaacgccgaatttcagatgctccgtcgcacctcaatcaatgtggtgaggcatctgggtattgtcggcgaatgtaatatccagttcgccctccacccgacttcaatggagtactgcatcatcgaagtgaacgcgcgcctctcgcggtcgtcagccttggcatccaaggccactggatacccgctggccttcatcgctgcgaagatcgcactcggcatcccactcccagaaatcaagaacgtggtgagcggtaagacttcagcatgcttcgagccctccctggattacatggtcacgaaaatcccgagatgggacctggaccggttccacggcacctcgagcagaatcggttcgagcatgaaatcggtcggcgaggtgatggccatcggaaggacctttgaggagagcttccagaaggccctgcgcatgtgccatccgtcaatcgaagggtttacgccgcggttgccgatgaacaaagagtggccgtcgaacttggatctgagaaaggagctgtcagaaccgtcgtccaccaggatttatgcaatcgcgaaagcgattgacgataacatgtcgttggatgagattgaaaagttgacctacatagacaaatggttcctgtacaagatgcgggacatcctcaacatggaaaagactctcaagggactgaactcggagtccatgactgaggagactctcaaaagagcgaaggaaatcggattctctgacaagcagatctcgaagtgcctgggccttaccgaagcacagactcgggagctgcggctgaagaagaacatccacccttgggtgaagcaaatcgatacgctcgccgctgagtacccttccgtgacgaactacctctacgtgacctataacggccaggaacacgacgtgaattttgatgaccacggaatgatggtgctgggttgcggaccgtaccacatcggctcgagcgtggaattcgactggtgcgccgtgtcgagcatcagaacccttagacagctgggcaaaaagaccgtcgtggtgaactgcaaccccgagactgtctcaactgacttcgatgagtgtgacaaattgtacttcgaagaattgtccctcgagcggattctcgatatctaccaccaggaagcgtgcggaggatgtatcatctccgtcggaggacaaatcccgaataacctggcagtccctctctacaagaacggtgtgaaaatcatgggaacttccccgctgcagatcgaccgggcggaagatcgaagcatcttttccgccgtcctcgacgaactcaaagtcgcccaggccccgtggaaagcagtcaatacgctcaacgaggcactcgaattcgctaaatctgtcgactacccatgtctgctgcgccctagctacgtgctgtcgggttcggccatgaacgttgtgttttcggaagatgagatgaagaaatttctggaggaggcgacccgggtgtcccaagagcatcctgttgtccttaccaagtttgtggaaggtgcaagggaagtggaaatggacgctgtgggcaaggatggccgcgtgatctcacacgcaatctcggagcacgtcgaagatgcaggagtccattcgggggacgccactttgatgctgcccacccagactatctcccaaggcgccattgaaaaggtcaaagatgcgactcgcaagattgccaaggctttcgcaatctcaggaccattcaacgtgcaattcctcgtgaaaggcaatgacgtgctggtgatcgagtgcaatctccgagctagcaggtccttcccgtttgtgtcaaagactcttggagtggatttcatcgacgtggcaacgaaggtgatgatcggagagaatgtggacgaaaagcacctgccgacgctcgaccacccaatcatcccagctgactacgtcgccattaaggcaccaatgttctcatggcctaggctgcgcgacgcggatccgatcctgagatgcgagatggcctccaccggggaggttgcctgtttcggagaaggtatccataccgccttcctcaaggcaatgctgtccacggggttcaagatcccacagaagggcatcctgataggcattcagcaatccttccgcccccggttcctgggcgtggcggagcaattgcataatgaggggttcaagctgttcgctactgaagccacctcagactggctgaacgcgaacaacgtgccggccaccccggtggcttggccatcccaagagggacaaaatccttccctgtcgtcgatcagaaaactgattcgcgatggaagcatcgacctggtgatcaatctgccgaacaacaatacgaagttcgttcacgataactacgtgatccgccggaccgccgtcgactccggcatcccgctgttgaccaattttcaagtgactaagctgtttgcggaggccgtccagaaatcgcgaaaggtcgattccaagtcgctcttccattacaggcagtactcagccggaaaagccgcg

SEQ ID NO: 43467 - DNA, 4500 bp, Artificial Sequence
  derived and/or modified sequence
atgacacgtatactgacagcttttaaggtggtgcggactcttaagaccgggttcggattcaccaatgtgacggcgcatcaaaagtggaagttctccagaccagggatccgcttgctgagtgtgaaagcacagactgcccacatcgtgctggaggacggtacaaagatgaagggttacagttttggacacccgtcctcggtagctggagaagtcgtatttaataccgggctggggggataccccgaggccataacagatcctgcctataaaggccaaatcctgaccatggcaaatccaataattggaaacggcggcgcccccgacacaacggccttagatgagctgggattaagcaagtacctggaatcaaacgggattaaggtgtctggtctcctggttctggactattccaaggattacaatcactggctggccaccaaatcactgggtcagtggctccaggaggaaaaagttcccgcaatctacggagtagacacacgcatgttgaccaagatcatcagggataaaggaaccatgctgggaaaaatcgaattcgagggtcagcccgttgacttcgtcgatcccaacaagcagaacctgattgcagaggtgtcaacaaaggacgtcaaggtgtacgggaagggcaatccgaccaaggtggtcgccgtggactgcggaatcaaaaacaacgtgattcggctgctggttaaaaggggcgccgaagtccatctggtaccgtggaatcatgatttcaccaaaatggagtacgatggcattctaattgccggaggcccgggaaatccagcattagccgagccattgattcagaatgtgcgaaagatcctcgaatctgatagaaaagaaccgctctttggaatatccaccggtaatctcatcaccggactggccgccggcgccaaaacctacaagatgagcatggcgaatcgcggtcagaatcaaccggttctgaatatcacaaacaagcaggcctttatcacggcccagaaccacgggtacgccttggataatacgttgcccgccggctggaagcctctgtttgtcaatgtgaatgaccagaccaacgagggaatcatgcacgagagcaaaccattctttgccgtgcagtttcatcccgaggtgaccccagggccaattgatacggaatacttattcgactctttcttctccctgattaagaaaggaaaggcgacgaccattaccagtgtgctgccaaagccagcgctagtggcatcccgcgttgaagttagtaaagtgctgatcctgggaagtggtgggctgagcattggtcaggccggggagtttgattacagtggctctcaagccgtcaaggccatgaaggaagagaacgtgaagacagtcctgatgaacccaaacatcgcgtcggttcaaacgaatgaggtgggactgaagcaagcagatactgtctatttcctgccaattacaccacaattcgtaacagaagtaattaaggcagaacagcccgacggtttgatcctcggcatgggtgggcagaccgcgctcaactgtggcgtcgaactattcaagcgaggtgtgctgaaagaatatggtgtgaaggtgctggggaccagcgtggagtccattatggccactgaagatcggcagctgttttccgacaagctgaatgagatcaatgagaagatagccccttcgtttgccgtggaatcaatagaggatgctctgaaagccgcggacacaatcggatatccggtgatgatccgctcagcttacgcactcggaggcctcggatcagggatctgcccaaaccgagagactctcatggacctgtctacaaaggcatttgccatgactaaccaaatccttgtggaaaaatccgtcaccggatggaaggagatcgaatacgaggtcgtccgagacgccgatgacaactgcgttaccgtgtgtaacatggagaacgtggatgcaatgggcgtgcacaccggcgactctgtagtcgtggccccagcgcaaactttatcgaacgctgaatttcagatgctcagaaggacctccattaacgtggtcaggcacttaggtattgtcggcgaatgcaacatccagttcgcactccaccccacgagcatggagtactgtatcatagaggtgaacgcccggctctctcgatcctccgcattagcatccaaggccacaggttacccgctggccttcattgccgctaagattgcactcggcatcccgcttccagaaatcaaaaacgtggtgtccgggaagacgtctgcctgtttcgaaccttctttggattatatggtcaccaagatcccacggtgggatctggacaggtttcacggtaccagctcccgaatcgggagctcaatgaaatcggtcggcgaggtgatggctataggccgcacatttgaggagtcttttcagaaggccctcaggatgtgtcatcctagcatcgaaggattcacgccacgtcttcccatgaataaggaatggccgtccaatctagacctgcggaaagagctttccgagccttctagcacacggatctatgccatcgctaaggccatcgatgataacatgtcactagacgaaatcgagaagctcacatacatcgacaagtggttcctttataagatgagagatatcttgaacatggagaaaacgctgaagggactgaacagtgagtcgatgaccgaggaaactctgaagagggccaaggaaatcggcttctctgacaagcagatcagcaaatgcctggggctgacagaggcccagaccagagagctacggctgaaaaagaatatccatccttgggtgaagcagatcgacaccttggcggccgaatacccctctgtgacaaattacctgtacgtgacctacaacggccaggagcacgatgttaatttcgatgaccacggtatgatggtgctgggatgcggaccctatcatatcggcagcagtgttgagtttgactggtgtgccgtatcatcaattcgtacactgagacagctgggaaagaagaccgtggtggtcaactgtaatcctgagaccgtgtcgacagactttgacgagtgtgataaactgtacttcgaggagctcagtctggaacggattctggatatctatcatcaagaggcctgcggaggttgtatcatttctgtcggtggacagattcccaacaatctggctgtgcccctatacaagaacggcgtcaagataatggggacctcccccctgcagatagaccgggccgaagatcggtcgatcttctctgcagtgctggatgagctgaaggtggctcaagcaccttggaaggcagtaaatacccttaacgaggccctcgagtttgccaagtcagtcgactacccatgcctgctgagaccaagctatgtgctgtccggtagcgcaatgaatgtagtctttagcgaagacgagatgaagaagtttctcgaggaagcaacgcgagtgagccaggagcacccagtagtactgactaagttcgttgaaggagcccgcgaggtagagatggacgctgttggaaaggatgggcgggtcatttcgcacgcaatatccgagcatgtcgaggatgcaggcgtgcatagtggagacgcgacactgatgctacccacacagacaatcagccaaggcgctatcgaaaaggtcaaggacgccactaggaaaatcgccaaagcctttgcgatcagtgggcccttcaacgtacagtttctggtcaaaggtaatgacgtcctggtgatcgagtgcaatttgcgtgcatcccgctccttcccctttgtgtctaagaccctcggagtggattttattgacgtagcaacgaaggtgatgatcggagagaacgtggacgaaaaacaccttccaacactggaccacccaatcatccctgccgattacgtggctattaaggctcccatgttttcctggccacgactgcgtgacgccgaccccattttacggtgtgagatggctagcaccggggaggtggcatgtttcggtgagggaattcataccgccttcctgaaggctatgctaagcaccgggttcaagatcccgcaaaagggcattctcattggtatccaacagagctttcgaccacgctttctgggggtggcagaacagttacacaacgaaggattcaagctattcgcgaccgaggctacatctgactggctcaacgccaacaatgtccctgcgaccccagtcgcctggccctcccaggagggccagaatcctagcctctcatctattcgaaagctcattcgagacggctcaattgatttggtgatcaacctgcctaacaacaatactaaatttgtccacgataattatgtgatacgtcgcactgcagtcgacagcggcatccccctgctaacaaatttccaggtgacaaagctctttgcagaagccgtccagaagagccggaaagttgacagcaagagtctctttcattatagacaatacagcgcagggaaagctgct

SEQ ID NO: 43468 - DNA, 4500 bp, Artificial Sequence
  derived and/or modified sequence
atgactcgaatcctcactgccttcaaagtggtgcgcaccttgaaaaccggattcggtttcaccaacgtgaccgcacaccaaaagtggaagttctcaagacccggtatccgcctcctgtccgtgaaagcccagaccgcgcacattgtgctcgaggacggaaccaagatgaaaggatactcgtttgggcacccgtccagcgtcgcaggagaggtcgtgttcaataccgggctcggggggtaccctgaggctatcaccgatccggcatacaaaggtcagatccttaccatggctaaccctatcattggcaacggaggagccccagacactaccgcgctggatgagctgggcctgtcgaagtacttggaatcgaacggtatcaaggtttcaggactccttgtgctggattactcaaaggactacaaccactggctggccactaagtcgctgggacaatggctgcaggaagagaaggtgccggccatctacggggtcgacaccagaatgctcaccaagatcatccgggataaagggaccatgctgggaaaaatcgagttcgaggggcagccggtcgactttgtcgaccccaataagcaaaatctcattgccgaggtgtcaaccaaggacgtgaaagtttacggaaagggaaatccaaccaaagtggtggctgtggactgcggtatcaagaacaacgtgattagactgctggtgaagcggggagccgaagtccacctggtgccttggaaccacgattttaccaagatggaatacgatggaattctgatcgcaggcgggccgggtaaccctgcactggcggagcctctgatccaaaacgtgcgcaagatcctcgaaagcgatcgaaaggaaccactgttcggcatctcgaccgggaacttgatcacgggtctggcggcgggcgctaaaacttacaaaatgtcgatggccaacagaggacagaatcagccggtgctgaacattaccaataagcaggctttcatcactgcccaaaatcacggctacgcgctggacaatactctgccggcaggatggaagccattgtttgttaacgtcaatgatcaaacgaatgaaggcattatgcacgaatccaagcccttcttcgcagtgcaatttcacccagaagtcactccagggccgatagataccgaatacctgttcgactccttcttctcactcatcaaaaagggaaaggccactaccattacctccgtactgccgaaaccggctctggtcgcctcccgcgtggaagtgagcaaagtccttatcctgggatcagggggactgagcattggtcaggcaggagaattcgattactcgggctcgcaggcagtgaaggctatgaaggaggaaaacgtcaagaccgtgctcatgaacccgaatatcgcatcggtgcaaactaatgaagtgggactcaagcaggccgatactgtctacttcctgccgatcaccccccagttcgtgaccgaagtgatcaaggccgaacagccggatggcctgatcctggggatgggaggacaaactgcactgaattgcggagtggaactgttcaaacgcggtgtgctcaaggagtacggagtcaaggttcttgggactagcgtggagtcaatcatggcgactgaggatcggcagctcttctcggataagctcaacgagatcaatgagaagatcgccccttcctttgcagtcgagtcaattgaggacgctctgaaagctgcagatactatcggataccccgtgatgatccggtcagcgtacgcgctgggcggactgggttcgggaatctgtccaaaccgagaaaccctgatggacttgtctactaaggcgttcgccatgaccaaccagatcctcgtggagaaatccgtgaccggatggaaggaaatcgaatacgaagtggtgcgggacgccgacgacaactgtgtgaccgtttgtaacatggaaaatgtggacgctatgggagtgcacacgggggacagcgtcgtcgtggccccagcccagactttgtcgaatgcggaattccagatgctgaggcgcacttcaattaacgtcgtgcgtcatctcggtattgtcggagagtgcaatattcagttcgctctgcaccctacttccatggaatactgcatcatcgaggtgaacgctcgcctgtccaggtccagtgcattggcttccaaggccacgggctacccgctcgccttcatcgcagcaaagatagcccttggcatcccgctgccagagattaagaatgttgtgtcaggtaagactagcgcgtgtttcgaaccatcgctggactacatggtgactaaaatccctcgctgggacctggatcggtttcatggaactagttcgaggattggatcgtccatgaaaagcgtgggtgaggtcatggcaatcggacggactttcgaggagtcctttcaaaaagcgctccgcatgtgccacccgtcaatcgagggctttacgccgagacttccgatgaataaggaatggccgtccaatctcgatctccggaaggaactctctgaacccagctcgactagaatttacgcaatcgctaaggccatcgatgacaacatgtccctggacgagatcgagaaactgacttacatcgacaagtggtttttgtataagatgcgagatatcctgaacatggaaaagaccctcaaaggattgaacagcgagagtatgactgaggagactctcaaacgggccaaggagatcggcttttcggataaacagatctccaagtgtctgggcctcaccgaggcgcaaaccagagaactccggctgaagaagaacatccatccgtgggtgaagcagatcgatactctggccgcagagtacccttcggtgaccaattacctttacgtgacttacaatggacaggaacatgacgtcaacttcgacgaccatggaatgatggtgctgggctgcggcccttatcatatcggaagctccgtggagttcgactggtgcgccgtgagctccatccggactctccgccaactcggaaagaaaactgtggtagtcaactgtaacccggaaactgtgtcgactgacttcgacgaatgtgacaaactgtacttcgaggagctttctttggagagaatcctggacatttatcatcaggaggcatgtgggggatgcattatctcggtggggggacagatcccgaataacctcgcagtcccgctctataagaatggagtcaagatcatgggaacttcgcccctgcaaatcgacagagctgaagatcgctccatcttcagcgcagtgctggacgagctgaaggtggcccaagccccttggaaggcagtaaataccctgaacgaggcccttgagttcgcaaagtccgtggactacccttgcctgttgcggccctcgtacgtcctctcgggcagcgccatgaacgtggtgttctcggaagatgaaatgaagaagttcctggaagaagctaccagagtttcccaggagcacccagtggtgctcacgaagtttgtggagggcgcgcgcgaagtggagatggatgccgtggggaaggatggacgcgtcatttcacatgccatctcagagcatgtggaagatgcaggcgttcactcgggggacgccactctgatgctccctacgcagaccatttctcagggagcgatcgagaaagtcaaagatgcgaccagaaagatcgccaaggcgttcgctatctccggcccgttcaacgtgcagttccttgtgaagggaaacgatgtgctggtgatcgaatgcaacctgcgagcctcacggtcgttcccctttgtgtcaaagacgctgggtgtggacttcatcgatgtggcgaccaaggtcatgattggagaaaacgtggatgagaagcatctcccgaccctcgaccatcctatcattcccgccgattacgttgctattaaggctccgatgttctcgtggccgcgcctgcgggatgccgacccgatcctcagatgcgagatggcctcaaccggagaagtggcgtgcttcggggaagggatccacactgctttcctcaaggccatgctgtccaccgggttcaagattccacagaaagggatccttataggaatccagcaatcgttcagaccaagatttttgggagtggcagaacaactgcataatgagggcttcaagctgtttgccacggaagcgacttcagactggcttaatgccaacaacgtcccggcgactccggtcgcatggccgagccaggaaggccaaaatccttcactgtcatcgatccgcaagctgatcagagatggatcgattgacctggtcatcaatcttccgaacaataacacgaaattcgttcacgacaattacgtgatccggcgcactgccgtggactcgggaatcccgctcctgactaatttccaggtgactaaactgtttgccgaggcagtccaaaagtcgcgtaaggtggatagcaaatccctgttccattaccggcagtacagcgccggaaaggctgct

SEQ ID NO: 43469 - DNA, 4500 bp, Artificial Sequence
  derived and/or modified sequence
atgactcggatcctgaccgcctttaaagtggtgcggacactgaagacgggatttggtttcactaatgtgaccgcacaccagaaatggaaattctctaggcccggcattagactgcttagcgtcaaagctcagacagcccacatcgttctggaagatggcaccaaaatgaaaggctactccttcgggcaccctagctcggtagctggcgaagtggtatttaatacaggactcggaggataccccgaggcgatcaccgatccggcctacaaaggccaaatattaaccatggctaatccaataatcggcaatggcggggctcccgatactaccgcccttgatgagctaggacttagcaagtacctggaatctaatggtatcaaagtgtctgggctcctggtcctggactatagtaaggactacaatcactggctcgcaaccaaatctctcggacagtggctccaggaggagaaggtgcctgccatttacggcgtcgataccaggatgctaacaaagattattagggataaaggcacaatgcttggaaaaatcgagtttgaggggcagccggtagacttcgtggatccgaacaaacaaaacctaattgctgaagtttcaacaaaagacgtcaaagtctatggaaagggcaaccctactaaagtggtggctgtggattgtggcatcaaaaataatgtaatccgattgctggttaagcgcggcgctgaagttcacctcgtgccctggaatcatgattttaccaagatggagtacgacggaatcctgatcgctggtgggcccggcaatcctgcactggccgagcccctgatacaaaatgtgcgaaaaattctagaatcggaccgcaaagagccgctgtttgggattagcactgggaacctgataaccggacttgcagctggggctaagacctataagatgagtatggccaaccgcggacaaaaccaacctgtcctcaacatcacaaataagcaggcatttattaccgcccagaaccacgggtacgctctggacaacaccttgccggccggctggaagccactctttgttaacgtgaacgaccaaacgaacgaaggaatcatgcatgaatctaagccattcttcgcagtgcaattccacccagaagttacacccggcccaatcgataccgaatacttgttcgatagcttctttagcttaatcaagaaggggaaggctaccaccatcacaagcgtattgccgaagcccgcgcttgtggcaagtcgtgtggaggtgagcaaagttctgattttgggttccggcgggttgagcattgggcaggctggcgagtttgactactccggatcgcaggctgtcaaggcgatgaaggaagagaacgtgaagaccgtgctgatgaatcctaacatcgcatcagtccagacaaacgaggtggggctgaaacaggcagacacagtttactttcttcctatcacccctcagttcgtcaccgaggtgatcaaagccgaacaacctgacggactcattctgggaatgggcggccaaactgcgctgaactgcggcgtcgaactgttcaaacgaggggtgctaaaagaatacggtgtgaaggttctagggaccagtgtggagagcattatggcaacagaggacagacaactgttttctgacaaactgaatgagatcaacgagaagatagcccctagcttcgccgtagagtctatcgaagacgccctgaaggcagcagacacgattggctatccagtgatgatccggtctgcgtacgctctcggtggtttgggaagtgggatatgccctaacagagaaacgctaatggacctctccacaaaggcttttgccatgacaaaccagatactggtggagaagagtgttaccggatggaaggagatagaatatgaggtggtgcgagatgcagacgacaattgtgttacagtctgcaatatggagaatgtagacgcgatgggtgttcacactggagatagtgtagtggtcgccccggcccagacattaagtaatgccgagttccaaatgctgcgacggaccagcataaacgttgtgaggcacctcgggattgtaggggagtgtaatatccaatttgccctgcatccaacctctatggagtactgtattatcgaggtgaacgcccggttgtcgcgcagttctgccctggcatctaaggctaccggctacccgctggcttttatcgccgcaaagatcgccttgggaattccactaccagaaatcaagaacgtagtgtccggcaagaccagcgcctgttttgaaccttccctggactacatggtcactaaaatccctaggtgggatctcgatcgctttcacggcacatcatcgagaattggatcaagcatgaagagcgtgggagaggtaatggcaataggaagaaccttcgaggagtcattccaaaaggcccttcgaatgtgccatccgagtatcgaaggattcactccacgcctgcccatgaataaggagtggccatccaatctcgacctgagaaaggagctctccgagccaagtagtacgcgaatatacgccatcgcgaaagcaatcgacgataatatgagcctggatgaaatcgagaaacttacatacatcgacaagtggttcctatacaaaatgagggatatacttaacatggaaaagacccttaaaggtctgaactctgaatccatgaccgaggaaaccctgaaacgggcgaaggagatcggattcagcgacaaacagatctcaaaatgcctgggactcacggaggcacagaccagagagttacggctgaagaagaacatccacccatgggtgaagcagatcgatacacttgcggccgagtacccaagcgtgaccaactacctctatgtcacatacaacggccaggaacacgatgtgaactttgacgaccatggtatgatggtgctcgggtgtggaccctaccacataggctcttccgtggaatttgactggtgcgctgttagtagcattcgcaccctccgccagcttggtaaaaagactgtagtggtcaactgtaatcccgaaacagttagcaccgattttgatgaatgcgataaactgtacttcgaagagcttagtcttgaacgtatcctagatatctatcatcaggaggcttgcggtgggtgtatcatcagtgtgggaggacaaatacccaataacctcgcagtgcctctctataaaaatggagtcaagatcatgggcaccagtccactacagatcgaccgagcggaagacaggtcgatattctctgccgtcctggacgagctgaaggtagctcaggcgccgtggaaagccgttaacacactaaacgaggcacttgaattcgctaagagcgtggactacccatgcctgctccgcccatcatatgtactgagtggaagcgcaatgaatgtcgtattttccgaggacgagatgaagaagtttttagaggaggccacccgcgtctcacaggaacatccggtagttttgacaaagttcgtggagggagcgcgagaggtggagatggatgccgtaggaaaagacggtagggtgatatcgcatgcaataagtgaacacgttgaagatgcaggggtgcactccggggatgcaacccttatgctccccactcagaccatttcccaaggggccatcgagaaagtgaaggatgccacaaggaagatcgctaaggcctttgctatcagcggccccttcaacgtgcagtttctggtgaaaggaaacgatgtgctggtaatagagtgcaacctgcgagcatcaagatcatttcccttcgtgagcaaaactctgggcgtggatttcattgatgtggccactaaagtgatgataggggaaaacgtggatgagaagcatctgcctaccctcgaccatcccatcattccagccgattacgtagcaatcaaagcccctatgttctcatggccaagactgagagatgcagatcccatactgcgctgcgaaatggcttccacaggcgaagttgcttgttttggggaagggatccataccgcgttcttaaaggccatgctttcaaccggtttcaagataccacagaaaggaattcttatcggcatacagcagagtttccgaccccggttcctcggagtagcagaacaactccataatgaggggtttaagttgtttgccacggaggcgacatctgactggctgaacgccaacaatgtgccagctacgcctgtcgcttggccttcacaggagggccagaatccaagcctgtcaagcatccgtaaactgatccgggacggttccatagatctggtcattaacctccctaacaacaacaccaaattcgtccatgacaattatgtcataaggagaaccgcagtcgacagcggcatcccgcttttaacaaacttccaggtgacaaagcttttcgccgaggcagtgcagaaaagtagaaaggtcgattccaaaagtctgttccactaccgtcagtactccgctgggaaagctgcc

SEQ ID NO: 43470 - DNA, 4500 bp, Artificial Sequence
  derived and/or modified sequence
atgactaggattctgacagcattcaaagttgtccggacccttaaaacaggtttcggcttcaccaacgtgactgcccaccagaagtggaaatttagccggcccggtataaggctgctgagcgtcaaggcacagacagctcacatcgtgcttgaagatggcacaaagatgaaaggctattctttcggtcacccatcctctgtcgccggtgaggtagtctttaatacagggctgggcggatacccagaggccattacggatcccgcctataagggtcaaatcttgacaatggccaatccaatcattggaaacgggggtgcaccggacaccaccgccctggacgagctgggactgtccaagtatttggaaagcaatgggattaaagtgagcgggctcttagtgttggattattccaaggactataaccattggctcgccacaaagtctttaggacaatggctccaggaggaaaaagtcccggctatctatggagtagacaccaggatgctgacaaaaataattagagataagggcactatgctgggaaagatcgaatttgaaggccagcccgtcgatttcgtggacccgaacaagcagaatctcattgccgaggtctcaaccaaggatgttaaggtctatggaaaaggtaaccctaccaaagtggtggccgtggactgcggaatcaagaacaatgtgatacgattactggtaaagaggggagcagaggtgcaccttgtgccttggaaccacgatttcacaaagatggagtatgacggtattctgattgctggaggcccaggaaaccccgcactggccgaaccactgatccagaacgtgcgtaagattctcgaatccgacagaaaagaaccattgttcgggatctctaccggcaatctgataacagggctggcagctggagccaagacttacaagatgagtatggctaatcgtggacagaaccagcctgtgctgaacattacgaacaagcaggcttttattaccgctcagaaccatggatatgccctggataatacactgcctgctggatggaaacctttgttcgtgaatgtgaacgaccaaacgaatgagggaattatgcacgagagcaagccatttttcgccgtccagttccatcctgaggtgacgcccgggcctattgacacagagtacttgtttgattctttttttagcctgattaaaaagggaaaggctaccacgattacatccgttcttcctaaacccgcactggtggcttctagagtagaagtgtcaaaggtccttatcttaggctccgggggcttgagcatcgggcaggcaggtgagttcgactatagcggctctcaggcagtgaaagcaatgaaggaggaaaatgtgaagacagtactgatgaatccgaatattgcatcagtgcagaccaacgaggtgggcctgaagcaagctgacactgtatattttctgccaatcacgccccagtttgttaccgaggtgatcaaagcggaacaacccgatggactgatccttggcatggggggacagacagcccttaactgtggcgttgagctgttcaagcgtggggtgcttaaggagtatggggtgaaagttcttggaacaagcgtcgagagcataatggcaaccgaggaccgccagttgttttcagacaagctgaatgagatcaatgagaagatcgcgccctcattcgccgtggagagtattgaagacgcactgaaagcagccgacaccataggctatcccgtgatgattcgctctgcctatgcgctgggtggcctaggcagcggtatatgtcctaaccgcgagacactcatggacctctcgactaaggccttcgccatgactaaccagatccttgtggagaagtcggttaccggttggaaagagattgaatatgaggttgtgagagacgccgacgacaattgtgtgaccgtttgcaatatggaaaatgtcgatgcaatgggggtgcatactggcgattctgtggtagtcgccccggcacagaccctctctaatgccgaattccagatgctcagaaggacatctatcaatgtggtccgtcacctcgggattgttggcgagtgtaatattcaatttgctctgcaccccacgagcatggagtactgcatcatcgaggttaatgccaggctgtctcggtctagcgcactggccagcaaggcgacgggctaccctctcgcatttatagccgccaagatcgccttaggaatacctcttcccgaaatcaaaaatgtggtgagtggcaagacttcggcatgttttgaacccagcctcgattatatggtcactaaaattcctaggtgggatcttgatcgttttcatggaacgtctagtcggatcggctcaagcatgaagtcagtgggggaagttatggccattggcaggacatttgaggagagtttccagaaggccttgcggatgtgccatccttccattgagggtttcacccctcggctgccaatgaataaggaatggccttcaaacctcgatttacgcaaggagctgtctgagccatcctctactcggatatacgcgatcgcaaaggccatcgatgacaatatgtctcttgacgaaatagaaaaactgacgtatatcgacaaatggttcctgtataagatgagggatatactgaatatggaaaaaaccttgaaagggctgaatagtgagtctatgaccgaggaaaccctcaagagggctaaggagattggcttttctgataaacaaatttcaaagtgtctgggcctcacagaggctcagacacgagagctcaggctgaagaaaaatattcatccatgggtgaagcagattgataccctcgcagcggagtatccttctgtcaccaactacctgtacgtaacgtacaacggacaggaacatgacgtcaactttgacgatcatgggatgatggtgctcggttgcggcccttatcatataggcagctccgtcgaattcgattggtgtgcagtctcctcaattaggactctccggcagcttggtaagaagacggtggtggttaactgtaatcctgaaaccgtttccacagacttcgacgaatgcgacaagttatacttcgaagaattgagcctcgaacggatcttggacatatatcatcaggaggcgtgtggcggctgtattatttctgtcggaggacaaatccccaataacttggccgtgccattgtataaaaatggggtcaaaatcatgggtactagcccactgcagatcgatcgggctgaagaccgctctatcttctcagccgtccttgacgagctaaaggtcgcccaggccccctggaaggccgtgaataccctgaacgaagctctcgagtttgcaaagtcagtcgattatccatgtctcctgaggcctagctacgtgctgagcgggtccgccatgaacgtggtgttttctgaagacgaaatgaaaaagtttctcgaagaggcgacccgggtgtctcaggagcatccagttgtgctgacaaaatttgtggagggagcacgggaagtggagatggatgccgttggtaaggacgggcgggtgatctcccacgccatttccgagcacgtggaggacgcaggggtgcatagtggcgatgctactctcatgttgcccactcagacaataagccagggggccattgagaaagtaaaagacgctacaagaaaaatcgcgaaggcatttgctatcagcggtccttttaacgtgcagttcctcgtgaagggcaacgacgtgctcgtaatagaatgtaacctccgggcgagccgctccttcccatttgtttccaagacactgggagtggatttcatagatgtggcgacaaaagtgatgatcggcgagaatgtggacgagaaacaccttcctacattggatcatcccattattcccgccgactacgtcgctatcaaagccccaatgttttcttggccccgcctgcgagatgcagatcccatcttgcggtgcgagatggcctcaaccggggaggtggcctgcttcggggaaggtatccacacagcttttctcaaggcgatgcttagtacaggctttaagatcccccagaaaggaatcttaattggtattcagcagtcctttcggcctaggttcttgggcgtggcggaacagttgcacaacgaaggattcaagttgtttgcaacagaagctaccagcgactggctgaacgcaaacaacgtccctgcaacacccgtcgcgtggcccagccaggaagggcagaatccttcactctcaagtatcagaaaactaatacgcgacggctctatcgacctagtaattaatcttcctaacaacaacaccaagttcgtacatgataactacgtaattcggaggacagccgtggatagcggaatacctctcctgaccaacttccaggtaacaaagctgtttgccgaagccgtgcagaagtccaggaaagtcgactccaagtctctttttcactatagacaatattcggcaggaaaggctgca

SEQ ID NO: 43471 - DNA, 4500 bp, Artificial Sequence
  derived and/or modified sequence
atgacccgcatcctgactgccttcaaagtggttcgcactctcaaaactggcttcggattcaccaatgtgaccgcgcaccagaaatggaagttttcccgccccggaattcgcctgctgtcagtgaaagcccagaccgcacacattgtcctggaggacgggacgaagatgaaaggttactcattcggtcacccgtcctctgtggctggagaagtcgtattcaacaccgggctgggtgggtatccggaagcgattactgaccctgcttacaaagggcagatcctgaccatggccaacccaatcatcggaaacggcggcgcgcccgacaccacggcactggacgaacttgggctctcaaaatacctcgagtccaacggaatcaaggtgagcggtttgctggtgctcgactacagcaaggactacaaccactggcttgcaactaagtcgcttggccaatggttgcaggaagagaaggtgccggctatctatggggttgatactaggatgctcactaagattatccgcgacaagggcaccatgctcggcaagattgaatttgagggccagcctgtggatttcgtggacccaaacaagcagaatctgatcgccgaagtgtccaccaaagacgttaaggtctacggcaaaggcaacccgaccaaggtggtggcagtggattgcggaattaagaataatgtgatcagactcctggtgaagaggggcgccgaagtgcacctggtcccgtggaaccacgacttcaccaagatggaatatgacggcatccttatcgctggtggaccaggcaacccggcattggccgaaccgctgatccagaacgtgcggaaaatcctcgaatcggacagaaaggaaccactgtttgggatctcgactggaaatctgatcactggactggcggccggtgctaagacttacaagatgtcgatggccaaccgcgggcagaatcagccagtgctcaacatcactaacaagcaggcctttatcactgcacagaatcatggctacgctctggacaacaccttgccagcgggttggaaaccacttttcgtcaacgtgaatgatcagaccaacgagggcatcatgcatgagtccaagcctttcttcgcggtccagttccacccggaggtgactccaggaccaatcgacactgagtacctgtttgactcctttttctcgctgatcaagaagggaaaggcgaccaccatcacttccgtcctgccgaagcccgcgctggtggcttctcgcgtggaagtgtcgaaggtcctcatcctgggatccgggggtttgtccatcggacaggcaggagagtttgattacagcggttcccaagcggtcaaggctatgaaggaggagaacgtgaaaacggtgctgatgaacccgaacatcgctagcgtgcaaactaacgaagtcggactcaagcaagctgatacggtttacttccttccgatcaccccgcagttcgttaccgaggtgattaaggccgagcagcctgacggcctcatcctcgggatgggaggccagaccgcactcaactgtggagtggaactgttcaaaagaggcgtgctgaaggagtacggtgtgaaagtcctgggcacctcggtggaaagcatcatggcgactgaagatcgacaactgttcagcgacaaacttaatgagatcaacgaaaagatcgcccccagcttcgcagtggagtcaatcgaggatgcactcaaggcggcagatacgattggctacccagtgatgattagatctgcatacgccctcggaggacttggctcgggtatctgcccgaaccgcgagactttgatggacctgtctaccaaggcctttgcaatgacgaatcagattctcgtcgagaagtccgtgaccggatggaaggaaatcgagtacgaagtggtgcgagacgccgatgataattgcgtcaccgtgtgtaacatggagaacgtcgatgccatgggtgtccacactggagacagcgtcgtcgtggcgccagcgcagactttgtccaacgcggagttccagatgctccgccgcacctccattaacgtggtgagacacctgggcatcgtgggagaatgcaatatccagttcgccctgcatcctaccagcatggagtactgcatcattgaggtgaacgcccggctgtcacggtcgtccgccctggcctccaaggctaccggctacccgctggccttcatcgctgcgaagattgccctgggaatccctctcccggagatcaagaatgtggtttccggtaagacgtccgcctgcttcgaaccgtcgctggactacatggtcactaagatcccgagatgggacttggaccggttccatggtacctcgagccggatcggctcgtcgatgaaatcggtgggcgaggtcatggccattgggcggacgttcgaagaatcattccaaaaggcgctgagaatgtgtcacccatcgatcgagggatttaccccgagactgcctatgaacaaggagtggccctccaatcttgacttgcgcaaggaactgtccgaaccgtcaagcactcgaatctacgccatcgctaaagcgatcgacgacaacatgtcgcttgacgaaatcgaaaagctgacttacattgataagtggttcttgtacaaaatgcgcgatattctgaatatggaaaaaactctcaaggggctcaattccgaatcaatgacggaagagactctgaagcgcgcaaaagaaatcgggttctccgacaagcaaatcagcaaatgcttgggtcttactgaggcccagacccgcgagctgcggctgaagaagaacattcacccctgggtcaagcaaatcgacactcttgcagccgagtacccgtccgtcaccaactacctgtacgtgacctataatgggcaggagcacgacgtgaatttcgatgaccacggaatgatggtgttgggatgcggtccataccatattggatcctcggtggaattcgactggtgcgccgtctcatccatccggactttgcggcagcttggtaagaaaaccgtggtggttaactgcaacccggaaactgtgtcgactgatttcgacgaatgcgacaagctgtactttgaagagctgtcattggaacggatcctggatatctaccaccaagaagcctgcggagggtgcatcatctccgtcggagggcaaattccaaacaaccttgcagtcccgctgtacaagaatggcgtcaagatcatgggaacctcgccgcttcagatcgaccgggctgaagatagaagcatcttcagcgccgtgctcgacgaactcaaagtggcccaggctccttggaaggcggtgaacactctgaacgaggccctggaattcgcaaaatccgttgattacccctgcctgctgcggccttcgtacgtgcttagcggctcagcaatgaatgttgtgttttccgaggatgaaatgaaaaagttcctggaggaagctactcgggtgtcccaagagcacccggtcgtgttgactaagtttgtcgagggagcacgggaggtggagatggacgcggtgggaaaggacggtagggtgatctcgcatgccatctcggaacacgtggaggatgcgggggtgcactccggcgacgctacgctgatgttgccaactcaaacgatctcccagggtgccatagaaaaagtgaaggatgcgacccgcaaaatcgccaaggccttcgccatctccgggccattcaatgtccaatttcttgtgaaaggaaatgacgtgctggtgattgaatgcaacctgagagcctccaggtcgttcccgttcgtctccaaaaccctcggagtggactttatcgacgtggcgactaaggtcatgattggagagaacgtggatgaaaagcatctcccaaccctggaccacccgatcataccagcggactacgtggcgatcaaggcccctatgttcagctggccgcgcctgcgcgacgcagatccgatcttgcgttgcgaaatggcttcgactggcgaggttgcctgctttggagaaggaatccacactgcgttccttaaggcaatgctgtccaccggattcaaaataccgcagaaaggaatcctgataggaattcagcagtccttccgcccgcggtttctgggagtcgccgaacagcttcataacgagggtttcaagctgtttgccaccgaggccacgtccgactggctgaatgccaacaatgttccggcgactcctgtcgcatggccatcacaggaaggacagaacccgtcgctttcctccatccggaagctgatccgggacggctcaatcgatctggtgatcaacctgccgaacaacaatactaagttcgtccatgataactacgtcattaggcgcactgccgtggattcagggatccccctcctgacgaacttccaggtgactaagttgttcgccgaagccgtgcagaagtctcggaaggtggacagcaagagcctcttccactaccgccagtactcggccggcaaggcggcc

SEQ ID NO: 43472 - DNA, 4500 bp, Artificial Sequence
  derived and/or modified sequence
atgaccaggatcctgactgcttttaaggtggtgcggaccctgaagactggctttggtttcactaacgtaaccgcccaccagaagtggaagtttagccggccgggcatccgcctgctaagcgtcaaggcacagaccgcccatattgtgctggaagacggcaccaagatgaaagggtattcgttcgggcaccccagcagcgtggccggcgaagtggtgtttaatacgggcttgggcggttaccccgaggcaatcactgaccctgcctacaaggggcaaatcttgacgatggctaaccctattatcggcaacggcggcgccccagacactaccgcactcgatgagctagggctaagcaagtacctggagtctaacgggataaaagtctcaggcctccttgtcctggattactctaaagattacaaccactggcttgccacgaagagcctagggcagtggctgcaggaggagaaggtgccggctatctacggcgtggataccaggatgctcacgaagatcatacgcgataaggggaccatgttaggcaagatagagttcgaggggcaaccagtggattttgtagatccgaacaagcagaacctcatcgcagaagtatccactaaagatgtgaaagtatatggtaaaggcaatcccaccaaagtagtagctgtggactgtggcattaagaataatgtcattcggttactcgttaaacggggggcggaagtgcacctggtgccgtggaaccacgactttaccaagatggaatacgatgggatccttattgctggaggtcctggcaaccccgccctggcggagcccctaattcagaatgttagaaaaatactggagtcagatagaaaggagccactgttcggtatctcaactgggaacctgatcacaggattggcagccggggccaagacatataagatgagcatggcaaatcgcggacagaatcaacctgttctgaacatcaccaacaagcaggcatttatcaccgcacaaaaccacgggtatgcattagataataccctccctgctggatggaagcccctgtttgtgaacgtgaatgaccagacaaatgagggtattatgcacgagtctaagcccttcttcgcggtacagtttcaccccgaagtgacaccaggtcctatcgataccgagtacctgtttgactcttttttttccctgatcaagaagggaaaggccacaacaatcacatcggtccttcctaaaccggctctcgtggcgtccagagtggaagtgtccaaggttctcatacttggaagcgggggcctttctatcgggcaggcgggggaattcgactatagtggcagccaggcagttaaggccatgaaagaagaaaacgttaaaactgtcctgatgaaccccaatatcgccagtgtacaaacaaatgaagtgggcctaaaacaggccgataccgtgtactttttacccatcacacctcagttcgttactgaggtgatcaaggcagagcaaccagatggactaattctcggaatgggagggcagactgcgttgaactgtggtgtggaattgtttaaaaggggcgtcctaaaggagtatggagtaaaggttttgggcacatctgtggaaagtataatggccactgaggaccggcaactgttttccgacaagttaaatgaaatcaatgaaaagatcgccccaagcttcgcagtagaatcaattgaggatgcccttaaggctgcggataccattggttatcccgtaatgattcggtccgcttacgcgctcggcgggctaggatcagggatctgtcccaaccgtgaaaccctcatggacttatcaacgaaagcatttgctatgaccaatcaaatcctagtagaaaagagtgtgaccggatggaaggagatagagtacgaagttgttcgcgacgccgacgataattgtgtaaccgtttgcaatatggagaacgttgacgccatgggagtccacactggggatagtgtggtcgtcgctccagcacagaccctcagcaatgcagaattccagatgctgcgccggactagcatcaacgtcgtgaggcatctgggaatcgtgggggagtgtaacattcagtttgcccttcacccaacctcaatggaatattgcataatcgaggtgaacgcgcgccttagccggagtagcgctcttgcaagtaaggcaaccggctatccactggccttcattgcagctaagatcgccctgggaatccccctgcctgagataaagaacgtagtctcgggaaagacgtctgcttgtttcgagccatcgttggactatatggtgaccaaaatccctcgatgggatttagatagatttcatgggacatccagtagaatcgggagttccatgaagagcgtaggggaggtgatggcgattggaaggaccttcgaggaatcattccagaaagctctccgaatgtgccacccctccattgaagggtttaccccccgcctccctatgaacaaggaatggccaagtaatttggatctcaggaaagagttgagcgagccctctagcactcgcatctacgcaatagcaaaggctatcgacgacaacatgtctctggatgagattgagaagctgacctatatagataagtggtttctctataaaatgcgggatatcctgaacatggaaaagactcttaagggacttaactctgaaagtatgacggaggagacactcaagagggcaaaggagattggtttttcagacaaacagattagtaagtgccttggattgacagaagcccagaccagggagctgcggcttaaaaaaaatattcatccgtgggttaaacagattgacactcttgctgccgaatatcctagtgtgacaaactacctttatgtcacctataacggccaggaacatgacgtcaatttcgacgaccatggcatgatggtcctgggctgtggcccttatcacatcggatcatccgtggaatttgactggtgtgcggtttcctcgatccgtactcttaggcagctcggcaagaaaacggtggtggttaattgtaatccagaaacagtgtcaactgatttcgatgaatgtgacaagttgtatttcgaggaactgtccctcgagcgcattcttgacatctatcaccaagaagcttgtggcggttgtatcatcagcgtcggcggacagatcccaaataacttggccgtgccactgtacaagaacggggtaaagattatgggcacatccccactgcagatagaccgggccgaggataggtcgatcttttcagccgtgctggacgagctaaaggtcgcccaagcaccgtggaaggccgtcaacaccctgaacgaagcactcgagtttgctaaatcagtggactacccctgtctgctacgaccctcatacgttctgtctggaagcgcaatgaacgttgtcttttcagaggatgaaatgaagaagttccttgaagaggccacccgagtgtctcaggagcatcctgtggttttaaccaagttcgtagagggtgcgcgggaggtcgaaatggacgccgttggtaaggatggcagggtgatcagtcatgctattagtgaacatgtggaggatgccggggttcacagtggcgacgctaccctgatgctgcccacacagaccatcagtcaaggagcgatcgagaaggtaaaggatgctacacggaaaattgccaaagcttttgcaattagtggaccctttaacgttcagtttctcgtgaagggtaacgatgtcctggtcatagaatgcaacttgcgcgcctcccggtcatttccgttcgtgagcaaaactctgggcgtcgacttcatcgacgtcgcaacaaaagttatgatcggcgagaatgtagatgaaaagcaccttcccactctcgatcacccaataatcccagcagattacgtggcgataaaagcgccaatgttcagctggcccagactgagagatgctgacccgatactacgatgcgagatggcttcgaccggggaagtagcttgttttggcgagggcatacatacggccttccttaaagccatgctatctaccgggttcaagattccccagaagggcatcttgatcggcatccagcagagctttcgacccaggttcttgggcgtcgccgaacagctgcacaatgaaggattcaagctgtttgctaccgaggccacctccgactggctcaatgctaataatgtgcctgctacacccgtggcttggcccagccaggaaggccagaatcccagcctgtcctccatccgcaagcttatccgcgacgggtcaatcgacctagtgattaacctgccaaacaacaacaccaagttcgtgcatgacaactacgtaatacggagaaccgcagtggactcaggcattcccctactgactaacttccaggtgacgaagttgtttgctgaggcagtgcaaaaatcaagaaaggtggacagcaaatccctctttcattaccgccagtactctgcaggcaaagctgcg

SEQ ID NO: 43473 - DNA, 4500 bp, Artificial Sequence
  derived and/or modified sequence
atgactcgcatactcactgcattcaaggtggtcagaacacttaagactggcttcggtttcactaacgtgacagcacaccagaaatggaagttttcccgccctggcatccggctgctgtccgttaaggcccagactgcccacattgtgctcgaggacggcacaaaaatgaagggctattcttttggccatccttctagtgtcgcaggcgaagtggtatttaatacgggcctgggtggctaccctgaagcgatcactgatcctgcctacaaggggcagatactgaccatggctaatcccattattgggaatgggggggcgcccgataccacggctctcgacgaattgggccttagcaaatacttggagagcaacggtatcaaagtttcaggactgttggtgctggattattcaaaagactacaatcattggctcgcgactaagtccctgggccagtggctgcaggaggagaaggttcctgccatctacggcgttgacacaagaatgctcaccaaaatcattcgagacaaaggcactatgctcgggaaaatcgagttcgaggggcagcctgtcgatttcgtcgacccaaataagcagaatcttatcgcagaggtgagcactaaggacgtcaaggtgtacggcaaggggaatcccactaaagtggtagccgttgactgtggcattaagaacaacgtgatccgcctcttggtgaagaggggagcagaagtgcatcttgttccctggaatcacgattttacaaaaatggagtatgatggcattctgatcgcgggtggccctggcaatcctgccctggcggaaccactgatccagaatgtgcgcaaaatcctggagtccgaccgcaaggagcccctcttcggaatcagcacagggaacctgattactggacttgctgccggtgctaagacttacaaaatgtcaatggcgaaccgaggccagaaccagcccgtactcaatataacaaacaaacaggcttttatcacagcccagaaccatggatatgcattggacaacacactgccggctggctggaagccactgtttgtaaatgttaatgaccaaactaatgagggcatcatgcacgagtccaaaccattttttgctgtacagtttcatcctgaggtcacgccaggacctattgacacagagtacttgttcgacagcttctttagtctcataaagaaagggaaagcgacgaccataacttccgtgctccctaagcccgcacttgtggctagccgcgtggaagtgagtaaagtgctgatcctcggctccggcggcctgagtattggacaggccggcgaatttgactatagtggctcccaggcagtgaaagcaatgaaggaggagaatgtgaagaccgttcttatgaaccctaacatcgcctctgtgcagactaatgaagtggggctgaaacaagcagatacggtttacttcctcccgatcactccacagttcgtgactgaggtcatcaaggccgagcagcccgatggcctgatcctcgggatgggggggcagacggcactgaactgcggggtagaactgttcaaacgaggcgtcttgaaggaatatggggtcaaggtcctcggtacaagtgtggagagtattatggcaaccgaagatagacagctgttcagcgataaactcaacgaaatcaacgaaaaaattgcaccctctttcgccgttgaatcaatcgaggatgccctgaaggctgccgacaccatcggttaccctgtcatgatcaggtccgcatacgccctgggtggtctggggtctggcatctgtccaaatcgggagacactgatggacctcagcacaaaagccttcgccatgactaaccaaattctggtggaaaagtcagtgacaggctggaaggagatcgaatacgaggtcgtgcgagacgccgacgacaactgtgttacggtgtgcaacatggaaaatgtggatgctatgggtgtgcatactggcgattctgtagtggtcgctcccgcgcagaccttgtcaaacgccgaattccagatgctgcggcgcacgagcatcaacgtcgtccgacatttggggatcgtcggtgagtgtaacattcagttcgctctccatccaacgtccatggagtactgtatcatcgaggtgaacgctcggctgtctcgatccagtgccctggcgagtaaggcaacaggataccctctggccttcatcgccgctaagatcgcactcggcatacccctgccggagatcaagaacgtagtgagtggaaagacttccgcctgctttgagccctccctggactacatggtcaccaagatcccaaggtgggacctggataggttccatgggacttccagtcgaattggcagctcaatgaaatcagtcggagaggtaatggccattgggagaacattcgaggagagctttcagaaagctctgcgcatgtgccacccaagtatcgaagggttcacacctagactgccgatgaacaaggagtggccgtctaacctggacctgaggaaggaactgtccgagccttcttcaacaagaatatacgcaatcgccaaggcaattgatgacaatatgtctctcgatgagatcgaaaagctgacgtacatagacaagtggttcctgtataagatgcgggacatccttaacatggaaaagacactgaaaggcctgaattccgaatctatgacggaggaaaccctcaagcgcgctaaagagattggattctccgacaagcagatcagtaagtgcctgggccttaccgaagcacaaaccagagagctgcgcttgaaaaagaatattcacccttgggttaaacaaatagatactctggccgccgaatatcccagcgtcactaactatctgtacgttacatacaatggtcaggaacatgacgtgaatttcgatgaccatgggatgatggttcttgggtgtggaccgtatcacatcggatcttccgtcgagtttgactggtgcgcggttagtagcatacgaactctcaggcagctgggtaaaaagactgtcgtcgtgaactgcaaccctgaaacagtgagtactgacttcgatgagtgcgataagttgtacttcgaagagctgtctctggaacgaattctggatatctaccaccaggaggcatgcggcggctgcatcatctctgtaggggggcagattcccaacaatctggcagtgcccctgtataaaaatggtgtgaaaatcatgggtacctcaccgcttcagatcgaccgcgctgaggaccggtctatattcagcgcggtgttggacgaactgaaagttgctcaagccccttggaaagccgtcaataccctcaacgaggctctggagttcgcaaaatctgtagattacccctgtctgctgcgcccaagctatgtcttgtccggtagcgctatgaatgtggtgttctctgaggatgagatgaagaagtttctggaagaggccactagagtgtctcaggaacatccagttgtgcttactaaattcgttgaaggagctagagaggtggagatggatgctgtaggtaaggacgggagggtcatttcccacgcgatctccgagcacgtcgaagatgcaggtgtgcactcaggtgacgctaccctgatgctgcctactcagaccattagccagggggccattgaaaaagtcaaggacgctacccgaaaaatcgctaaagcgtttgccatctcaggacctttcaatgtacaattcctggtgaagggcaacgatgtactcgtgattgagtgcaatctcagggcaagtcggagcttcccatttgtttccaagacactgggcgttgattttattgatgtagctaccaaggtgatgataggggaaaacgtcgatgagaaacacctgcccactctcgaccatcctatcattccagccgattacgtggcaatcaaggcacctatgttcagttggccgaggttgagagacgcggacccaatcctcagatgtgaaatggcttcaaccggagaagtcgcctgctttggagagggcattcacacagcttttctgaaagcgatgctctccacaggtttcaaaattccacagaaaggaattctcataggaatacagcagtcattccggcctaggttcctgggcgtagctgagcagctgcataacgaagggtttaagctctttgctacggaggcaaccagcgactggcttaacgcgaataacgtccctgccacacctgtggcttggccttcccaggaggggcagaaccctagcctgagcagtatacgaaagctcatcagagacggttccatcgaccttgtcatcaaccttcccaacaataatacaaaatttgtccatgataattatgtgattcggagaaccgcagtagatagtggcattcctctgctcacaaactttcaagtcacaaagctgtttgcggaggcagtccagaaatctaggaaggttgattccaaaagtctgttccactaccggcaatactccgccggcaaggcagct

SEQ ID NO: 43474 - DNA, 4500 bp, Artificial Sequence
  derived and/or modified sequence
atgactcgcatcctgactgccttcaaagtcgtgcggaccctcaagactgggtttggatttactaatgtgaccgcgcaccagaagtggaagttctcgcgtccggggatccgcctcttgtccgttaaggcccagaccgctcatattgttcttgaggacggaaccaagatgaaaggctactccttcggtcatccgtcgtccgtggccggtgaggtcgtgtttaacactggactgggaggataccccgaagccatcacggatcccgcgtacaagggccagattctgactatggcgaatcctatcatcgggaacggaggcgcacctgacactactgccttggatgagctgggtttgtcaaagtacctggaatcaaatggaatcaaggtttcggggcttctggtgctggattacagcaaggactacaatcactggctcgcgaccaagtccctgggacagtggttgcaggaagagaaggtgccggcgatctatggagtggacacccgaatgcttactaagattattcgggacaagggcaccatgctggggaagatagaattcgaaggccagcctgtggacttcgtggatccaaataagcaaaacctgattgcagaagtcagcacgaaggatgtgaaggtgtacggaaagggaaacccgaccaaggtcgtggctgtggattgcggaatcaagaacaatgtcattcgcctcttggtgaagcgcggggcggaggtgcacctggtgccttggaatcatgattttactaagatggagtacgacggaattctcattgcaggcggaccagggaatcctgcgcttgctgagccgctgatccagaacgtgcgcaagatcctcgaatcggacagaaaagaaccactgttcggtatctccacgggaaatctcatcaccggactggctgcaggggcaaagacgtacaagatgagcatggcgaaccgaggacagaatcaacccgtgctcaatatcaccaacaagcaagcgttcatcactgcccaaaaccacggatacgcactcgataataccctgccagctggatggaagccgctgttcgttaacgtgaacgaccaaaccaatgagggcatcatgcacgagtcgaagccattctttgccgtgcaattccacccagaggtaactccgggccccatcgacaccgaatacctgttcgactcatttttcagtctgattaagaagggaaaggccactactatcacctccgtcctgccgaagccggcgttggtcgcttcaagggtggaggtgtcgaaggtgctgatcttggggtcagggggactgtcgatcgggcaggccggagaattcgattactcgggtagccaggccgtcaaggcgatgaaagaagagaacgtcaaaaccgtcctcatgaacccgaatatcgcctcggtccagactaacgaggtcggactcaagcaggcagataccgtgtacttcctcccgatcactccgcagtttgtcaccgaagtcatcaaggcggagcaacccgacgggctgattctgggaatgggtggacagaccgccctgaactgcggcgtggaactgttcaaacggggtgtcctcaaggaatacggggtcaaggtgttgggaacctccgtggaatcgatcatggccactgaagatcggcagctgttctcagacaaacttaatgaaatcaacgagaagattgccccatcgtttgcggtcgagtcaatcgaggacgcacttaaggcggcagacactatcggctatccggtgatgatccgctcagcctatgcgcttggaggattgggctccggaatctgtccgaaccgggaaactcttatggacctctcgacgaaagcctttgctatgaccaaccaaatcctggtggaaaagagcgtgactggttggaaagaaattgaatacgaggtcgtgcgggatgccgatgataactgcgttaccgtgtgcaatatggagaatgtggacgcaatgggtgttcatacgggagactccgttgttgtggccccagcccagactttgtcaaatgcagagttccagatgctgcggcgcacttccatcaacgtggtgagacacctgggaatcgtcggggagtgcaacatccagttcgccctccacccaacctccatggaatactgtattatcgaagtcaacgcccgcctgtcgaggtcgtctgcgctggcctcgaaggcaacggggtatccgctggctttcattgcagctaagatcgctctgggtatccccctgccagagatcaaaaacgtggtgtcgggaaaaacttcggcttgcttcgagccatcgctggactacatggtgacgaagatcccgcggtgggacctcgatcgcttccatggaacctcgtcccggatcggttcatccatgaaatctgtgggagaagtcatggctatcggtcgcacctttgaggagagcttccaaaaggccctgcggatgtgccacccgtccatagaaggcttcacccccagactcccgatgaacaaggaatggccatccaacctggatctccggaaggagctgagcgagccatcctctactaggatttacgctattgcgaaggccatcgacgacaacatgtcactggacgaaatcgaaaaactgacttacatcgataaatggttcctgtacaagatgcgggatatcctcaatatggaaaaaacccttaaaggcctgaactccgagagcatgactgaagaaactctgaaacgggccaaggaaatcggtttcagcgataaacagatcagcaagtgcctgggcctcactgaagcacagaccagggagctgagactgaagaagaacatccatccatgggtgaagcagatcgacactctcgcggccgaatacccatcggtgactaattacctctacgtgacttacaacgggcaagagcacgatgttaacttcgatgatcacggaatgatggtcctcggatgcggcccgtaccacatcggttcgtcggtggagttcgactggtgtgcagtgtcatctatccgcactctccgccagctggggaagaaaactgtggtggtgaactgtaatccggagactgtgagcactgactttgacgaatgtgacaaactctacttcgaggaactgtcactggaacggattctcgacatttaccaccaagaagcgtgcgggggatgtatcatctccgtgggtggacaaatccccaacaacctcgctgtgccgctgtacaagaatggtgtcaagatcatgggaacttcgccgcttcaaatcgaccgagcagaggacagatccatcttttcagcagtcttggacgaactgaaggtggcccaggctccatggaaggccgtgaacaccctcaacgaggccctggagttcgcgaaatctgtcgattacccttgcctgttgcggccaagctatgtgctcagcggaagcgcaatgaacgtggtgttctcggaggatgagatgaagaaatttctggaagaagcaactagagtgtcgcaggagcaccctgtcgtccttaccaagttcgtggaaggagctcgggaagtggagatggacgcggtcggaaaggatgggcgcgttatctcgcacgccatatccgaacacgtcgaggatgcgggtgtccatagtggagatgccaccctcatgctgccgactcaaacgatctcgcagggcgccatcgaaaaggtcaaggacgcgactcggaagatagctaaagcattcgcaatctctgggcctttcaatgtccaattcttggtgaagggaaacgatgtgctggtgatcgaatgcaacctgagggcgtccagatccttcccgttcgtgtccaagaccctgggggtggactttatcgacgtggccaccaaagtgatgatcggagagaacgtggatgaaaaacatctgccgactctcgaccatcctatcatcccggcggactacgtcgccattaaggcgccgatgttttcctggccacgcttgcgcgacgcggacccgattctcaggtgcgagatggccagcaccggggaggtcgcttgcttcggagagggaattcacaccgcgttcttgaaggctatgctgtcgaccggattcaagatacctcagaaaggaattctcatcggaatacaacagtcattcaggccacgctttctgggcgtcgcggaacagttgcacaatgaagggttcaagttgtttgcaaccgaggcgacctccgattggctcaacgccaacaacgttccggcgactcccgttgcgtggccgagccaagagggacaaaatccctcactgtcgtccattaggaagctgatccgcgacggctccatcgacctggtgatcaacttgccgaacaacaacactaagttcgtccatgacaattacgtgatcaggagaactgctgtggacagtgggatcccattgctgacgaattttcaggtgacgaaactgttcgcagaagcggtgcaaaagtcacggaaggtggactcgaagtcactgtttcattaccgccaatactcggccggaaaggcggcg

SEQ ID NO: 43475 - DNA, 4500 bp, Artificial Sequence
  derived and/or modified sequence
atgacccgcatcctgaccgctttcaaggtggtccggactttgaaaaccggcttcggatttaccaacgtgactgcacatcagaagtggaagttttcaagacctggtatacgtctgctttcggtcaaagcacaaactgcacacatcgtgctcgaagatggtaccaaaatgaaaggttactcgttcgggcacccttcatccgtggcgggcgaggtcgtgtttaacactggccttggtggctacccagaagcaattaccgatcctgcatacaaaggacagattctcaccatggcgaacccaatcattggtaatggaggagcacccgacactactgcgcttgatgagctgggtctgtcgaaatacctggaatcgaacggcattaaagtgagcggcctgctcgtgctggattattcgaaggattacaaccattggcttgcgaccaagtcgctcggacaatggttgcaggaagaaaaggtgcccgccatatacggcgtggatactcgtatgcttactaaaatcattagagataagggaaccatgcttggaaagatcgagtttgaagggcaaccagttgattttgtggacccaaataagcaaaacctgattgcagaagtgtcgacgaaggatgtcaaggtctacggcaagggaaacccaaccaaagttgtcgcagtggattgtgggattaagaacaacgtgatccggcttctggtgaagcgaggcgcagaagtgcacttggtgccttggaatcatgactttaccaagatggagtacgacggaattctcatagcaggtggacctgggaatcctgcgctggcagaacctcttattcaaaatgtgaggaagatcctggagagcgacagaaaagagccgctttttggtatctcgaccggcaaccttattaccggactggcggcaggggcaaaaacctacaaaatgagcatggcaaacagaggacagaatcagcccgttttgaatatcaccaacaaacaggcattcattactgcacaaaaccatggttacgcactcgataatactcttcctgcagggtggaaaccgctttttgtcaacgtgaatgatcaaaccaatgaagggataatgcatgaatccaagccctttttcgcggtgcagtttcaccctgaagtgaccccaggaccaatcgacaccgaatacttgttcgattccttctttagcctgattaagaaaggcaaagcaactacgattacttccgtgcttcctaagcccgcgcttgtggcctcaagagtcgaagtctccaaggtgctgatcctcggatccgggggcctgtcaatagggcaagcaggtgaatttgattactcgggatctcaagcagtgaaggcaatgaaggaagaaaatgtcaagactgtgctcatgaacccgaatatcgcatcggtccaaaccaacgaagtgggtctgaagcaggccgatactgtctacttccttccaatcaccccccaatttgtgactgaggtcatcaaagcagagcagccagatggacttattcttggaatgggagggcaaaccgcacttaactgtggggtcgaattgtttaagagaggagttctcaaggaatacggcgtgaaggtcctggggacctcggtggaatccataatggcaactgaagatcgtcaactgttcagcgataagctcaacgagataaatgaaaagattgccccttcatttgcagtcgaatccatcgaagatgccctgaaggccgccgacactatcggttacccagtgatgattcgatcagcatacgcacttggtgggcttggctccggtatctgtcccaaccgcgaaaccctcatggacctgtcaactaaggcatttgcaatgaccaatcagatcttggtggaaaagtcggtgacggggtggaaagaaattgaatacgaagttgtgagggatgcagacgataattgtgtcaccgtgtgcaacatggaaaacgtcgatgcgatgggcgtgcatacgggagattccgtcgtggtggcaccagcccaaactctgtcgaatgcggaatttcagatgctgagacggacttcgattaatgtggttcgacacctcggcatcgtgggagaatgtaacatacaattcgctcttcaccccacttccatggagtactgtatcattgaggtcaacgctcgactgtctcgatcaagcgcactcgcatctaaggcaactggatacccgcttgccttcatagccgcaaagatcgcactgggaatccctctgccagagattaagaatgttgtcagcggcaaaacctcggcgtgcttcgaaccaagcctggattacatggtgaccaaaattcctcggtgggaccttgatcgcttccatgggacctcctcgcgcatcggatcatctatgaagtccgtcggtgaagtcatggccattggtaggacctttgaagaatcatttcagaaggcgctgcgcatgtgccatccttcgatagaaggtttcaccccgagacttccgatgaacaaggaatggccaagcaacctggatttgcgtaaagaactctcggaaccgtcctccactcgaatctatgcaatcgctaaggctattgacgacaacatgtcgctggacgaaatagaaaaactcacctacattgataaatggttcctctataagatgcgcgatattctgaacatggaaaaaactctgaagggtctgaacagtgaatccatgaccgaagaaaccttgaagcgggcaaaggagatcggattttcggacaagcagatttccaagtgtcttggactgactgaggcacagacccgcgaactgaggctgaagaagaacatccatccttgggttaaacagattgacactctcgcagcagaatacccatcggtgaccaattatctttatgtcacttacaatggacaagaacacgatgtgaactttgatgaccatggtatgatggtcctgggatgtggtccctaccatattggatccagcgtggagtttgattggtgtgcagtctccagcatcaggaccctcagacaactcggtaagaaaaccgtggtcgtgaactgtaatccagagactgtctccaccgattttgatgagtgtgataaactgtactttgaggagctctcgctggagcggatccttgatatctatcatcaagaagcgtgcgggggatgtattatctcagtggggggacaaattccaaacaaccttgcggtgcccctgtacaagaacggagtcaagattatgggaacctcccctctgcaaattgatagagctgaagatcgttccatcttttccgccgtccttgatgaacttaaagtggcacaggccccttggaaggcagtgaatactctgaacgaggctctggagtttgcgaagagcgtcgattacccatgtctccttcggcctagctacgtgctttcgggttcggcaatgaacgtggttttttcggaagatgaaatgaagaagtttcttgaagaagcaacgcgtgtctcgcaagaacatccagtggtccttaccaagttcgtggagggcgccagagaggtcgaaatggacgccgtggggaaggatggcagagtcatttcccacgcaatttctgagcatgtcgaggacgcgggagtgcattcaggtgatgcaacgctgatgcttcccacccaaacgatctcccagggcgcaatcgagaaggtgaaagatgcaaccagaaagattgcgaaggcatttgccatctcaggaccctttaacgtgcagttcttggtgaagggtaacgatgtgcttgtgatcgagtgtaacctgcgcgcatcccgttcatttccatttgtctccaagaccctgggtgtggactttattgatgtggcgaccaaagtgatgatcggcgaaaacgtggatgaaaagcacctccctactctggaccatcctatcattcctgcagattacgtggctattaaggcacccatgttttcatggcctcgcctgcgtgatgcagatccaatcctccggtgtgaaatggcatcgaccggagaggtggcgtgttttggcgagggcattcacactgcatttctcaaagcaatgctgtccaccgggtttaagatccctcaaaaggggattctcattggtattcagcagagcttccgacctcgctttctcggagtggcagaacagcttcacaacgaaggatttaagttgttcgcaactgaagcgacctcagattggctgaacgcaaacaacgtccctgcaactcctgtggcctggccttcgcaagaaggacaaaatccctccctttcgtcgattagaaaactgattagggacggtagcattgacctcgtgattaaccttccaaacaacaacactaagttcgttcatgacaattacgtcattagaaggaccgcagtcgacagcggcattccgctgctcaccaactttcaagtgaccaagctgtttgctgaagccgtgcagaaatcaagaaaagtggacagcaaaagcctttttcactaccggcaatactccgcagggaaggcggcg

SEQ ID NO: 43476 - DNA, 4500 bp, Artificial Sequence
  derived and/or modified sequence
atgacccgtattctgacagctttcaaagtggtaaggaccctgaagacggggtttggctttaccaacgtgactgcacaccagaagtggaagttttcccggccaggaatcagacttctttccgtcaaggcccaaacagcccatatcgttctggaagatggcacaaaaatgaaaggatacagctttggacacccttcctctgtggcgggcgaagtggtgttcaacacaggcttgggcgggtaccccgaggccatcacagaccctgcgtacaaaggccagattcttactatggcgaatccgattattggcaatggcggcgcccctgataccaccgccctggacgaactcggcctctctaaatatctggagagcaatggcataaaggtgagcggtttgttggtcctcgattattcaaaggattataatcattggctggcgaccaagtctctcggtcagtggttacaggaagagaaggtccctgccatatatggcgttgatacaagaatgctcaccaaaataatccgcgataagggaaccatgctcgggaagatcgaattcgaggggcagccagtggactttgtggaccccaacaaacagaatctaattgccgaagtgagcacgaaggatgttaaagtttacggcaaaggaaaccctactaaagtggtcgcggttgactgtggcatcaagaataacgtgatccgcctgctggtgaaaagaggcgcagaggttcatctggtcccctggaaccacgattttactaaaatggagtacgatggtatcttaattgcgggcggccctggcaacccggcgctagcagaacccctgattcagaatgtacgaaagattctagagtccgacaggaaagagcccctatttgggatatccaccggcaacctgatcactggccttgcagctggcgcaaaaacctataagatgtctatggccaatagagggcagaaccagcctgtactgaacattaccaacaagcaggccttcatcactgctcagaatcatggttatgcactcgacaatacgctccctgccgggtggaaacctttattcgtgaacgtcaacgatcagaccaatgagggcatcatgcacgagagcaagccgtttttcgcagtccagttccacccagaagttacccctggtccaatcgatacggaatacctttttgattcattcttcagcctgatcaagaaaggaaaggcaactaccataactagtgtgctcccaaaacccgccctcgtggcctctagggttgaggtgtctaaggtgctaatactggggtcaggaggtctgagcatcggtcaggccggagagttcgattactcgggctctcaagcggttaaggctatgaaagaggagaacgtgaagacagtcctgatgaaccctaacatagcctctgtccaaactaacgaggtgggactcaaacaggctgatacagtgtacttccttccaatcacaccgcagtttgtcaccgaagtgatcaaagctgaacaaccggatggacttattctgggaatgggaggccaaacagccctgaactgcggcgtggaacttttcaagcggggcgtgttgaaggagtacggagtaaaggtgctgggaacctcagtcgagtccattatggcaactgaagatagacaactttttagtgataaactaaacgaaattaatgagaagatcgctcccagttttgcagtggagtccatcgaggacgctctaaaagcagctgatacaatcggttatcctgtcatgattcgcagcgcttacgcacttggcggactaggcagtggcatctgccccaatcgtgaaactctgatggatctgtctacaaaagcgtttgctatgacaaatcagatactggtagaaaagtccgtaacaggctggaaggaaattgaatatgaggtagtaagagacgccgatgacaattgcgtgaccgtttgcaacatggaaaacgttgatgctatgggcgtgcacacaggggactccgtcgtagtcgcccccgcccaaaccctgtcaaacgccgaatttcaaatgctacggagaacctctatcaacgtggtacgacacctcggcatcgtgggcgagtgtaatattcagtttgcactgcatcccacctccatggagtactgtattatagaggtgaacgctcgcttgtcccggtcttctgctttagccagcaaggccaccgggtatccccttgcttttatcgcagcaaagattgctctgggcatccccctacctgagattaaaaatgtggtctctgggaaaactagcgcctgttttgaacccagcctggactacatggtgacaaaaattcccaggtgggatctagatagattccacggtacatcctccagaattggttcttccatgaagtctgtaggggaagtaatggctattggacggacctttgaagaatcctttcaaaaggcactgcggatgtgccacccatccatagaggggttcaccccacggctacctatgaataaagagtggcctagtaaccttgatctgcggaaagaactgtccgagcctagttctacccggatttacgctatagccaaggcgatcgatgacaatatgtccctagacgaaattgagaaactgacatatattgataagtggttcctgtacaaaatgagagatatcctaaacatggaaaagacactcaagggtcttaattcagagtccatgacagaggagaccctgaaacgtgcaaaggagattggtttctccgacaaacagatcagtaagtgcctggggctgacagaggcacagacacgggagttgcgcttgaagaaaaatatccacccgtgggtgaaacagattgacacgctagccgctgagtacccatctgtcaccaactacctgtacgtgacctataatgggcaggagcacgacgtgaatttcgatgaccatgggatgatggtgcttggctgcgggccataccacatcgggtcatcagttgaattcgattggtgcgccgtgtcctcaatccgtacacttagacagctcggaaagaaaaccgtcgtggttaattgtaatcccgagacagtatcaaccgacttcgatgaatgtgacaaactgtattttgaggaactgagtctggaaaggatattggacatataccatcaggaagcctgcggaggatgcatcatctctgtgggtgggcaaatcccaaataacctagcggtgcccttgtacaagaacggagtcaagattatggggaccagtccgctacagatcgaccgggccgaagataggtcaatcttctccgcggtactcgacgagctgaaggtggcgcaggctccttggaaggccgtgaataccctgaacgaagctctcgaatttgcaaagtccgttgactacccctgtctgttgaggccttcatacgttttgtctggaagcgccatgaatgtcgtttttagcgaggacgagatgaaaaagttcctagaggaggctacaagggtgtcccaggaacaccctgtggtattgacgaagtttgttgaaggggctagagaggtcgaaatggacgcggtagggaaggatgggagggtgattagtcatgccatttcggaacatgttgaggatgccggggtgcacagtggcgatgcaaccctgatgctgccaacgcagaccatcagtcagggggcgatcgagaaggtgaaggatgccactagaaaaattgcaaaagcattcgccatctccggaccatttaacgtccagtttttagtcaaaggcaacgatgtcctggttatcgagtgcaacctgagggctagtaggtcctttccattcgtcagtaaaacactgggcgtggattttattgacgttgctaccaaagtgatgatcggggaaaacgtcgacgaaaagcacctccccaccctcgatcatccgatcattcccgctgactacgtggcaatcaaagcgccaatgttcagctggcccagacttagggacgcagatccaatcctgcgctgcgagatggcaagcaccggcgaagtagcctgtttcggggaaggaattcatactgctttcctgaaggcaatgctcagcactggatttaagatccctcagaaaggaattctcattggtatacagcaatccttcagaccccggttcctaggagttgctgaacagttgcataatgaaggcttcaagctcttcgccaccgaagctacgtccgactggctcaatgctaacaatgtaccggccacacctgttgcatggcctagtcaggaaggtcagaaccctagcctttcaagtatccgaaagttgataagggatggttctatagatctagtaattaacctgccgaacaacaacactaagtttgtgcatgacaattacgtcatccgcaggacggcagtggactccggtattccattattaactaatttccaggtgaccaaactctttgctgaggctgtgcagaaaagccggaaagtggactctaagagtttattccactaccgacagtactcagccggcaaagctgcc

SEQ ID NO: 43477 - DNA, 4500 bp, Artificial Sequence
  derived and/or modified sequence
atgactaggatactgactgcttttaaagtggtgcgaacactgaaaaccggctttggcttcactaacgtcaccgcacaccaaaagtggaagttttctcgcccgggtatccgcctgttgagcgttaaagcacagaccgctcacatcgtcctagaggacggcacaaagatgaaagggtacagtttcggtcacccatcttcagtggccggagaggtggtctttaatactggattaggcggctatccagaggctatcaccgaccctgcgtacaagggacagatccttaccatggctaacccaattatcgggaacggtggtgctcctgataccaccgcgctggacgaactggggctgagcaagtatctagaaagcaacggtattaaggttagtggactcctggtgctggactatagtaaggattataaccactggcttgctacaaaaagtctgggccagtggctgcaggaagaaaaagtcccagctatatatggagtggacacacgtatgttaacaaagattattcgcgataaaggaaccatgctgggaaagatcgagttcgaaggacaacctgttgacttcgtggaccccaataagcagaatctcatcgcagaagtgtctaccaaagatgtcaaagtgtatgggaaaggtaacccaacaaaggtggtggcagtggattgtggcatcaaaaacaatgtgataaggctccttgtgaagcgcggcgcagaagtgcacttagttccatggaaccacgattttaccaagatggagtacgacggcattttaatcgctggcggccccggcaacccggctctggctgagcccctgatacaaaatgttcggaaaattcttgaaagcgatagaaaggaacctctgttcgggataagcacaggcaaccttattacgggcctcgcagccggagctaaaacatacaaaatgagtatggctaaccgtggacaaaaccagccagtcctcaacataacaaacaagcaggcattcatcactgctcagaaccatggatacgctctggataacacactcccggccggctggaagcctctgtttgtcaatgtgaacgatcagaccaacgagggcataatgcacgagtccaagcccttcttcgccgtccaattccatccggaggtgactcccggccctatcgacaccgagtacttgttcgatagctttttcagcctgatcaagaaagggaaagccaccactattacttctgtgctgcccaagcctgctctagttgccagcagggttgaggtgagtaaggtgctcatcctgggcagtggcggcttatcaataggacaggctggcgaattcgattatagcggcagccaggcagtgaaagctatgaaggaagagaacgtcaagactgtcctgatgaatccaaacatcgcttcagttcagactaacgaagtggggctcaagcaggcagacactgtgtacttcttgcccattacccctcagtttgtgaccgaggtaatcaaggccgaacagcccgatggcctgattctgggaatgggcgggcaaacggcactgaactgcggggtggaactatttaagaggggggttttgaaagagtatggcgtgaaggttctgggaacttctgttgaatcaatcatggcgaccgaagacaggcagttattttctgacaagctcaatgaaatcaacgagaagatcgcaccttccttcgctgtggagagcatcgaggatgctcttaaagcagcagatacaatcggctatcccgtgatgattagaagtgcttatgcactgggcggattgggcagcggtatctgccctaatcgcgaaactctgatggacctgagcaccaaggctttcgccatgaccaaccaaattttagtggaaaaaagcgtgactggatggaaagaaatcgagtatgaggtcgtccgcgatgctgatgacaactgcgtgaccgtgtgtaacatggagaacgtcgatgctatgggagttcatactggagatagtgtggtggtagcccccgcacaaacactttctaacgccgaatttcagatgctgcgccggactagtatcaatgtagttagacatctcggaattgtgggagaatgcaacatccagtttgctctgcacccgaccagtatggagtattgcattattgaggttaacgcgcgcttgtcaaggtcttctgcattagcgagcaaggcgaccgggtacccgttggctttcatagccgccaagatcgctctgggcattccattaccagaaatcaaaaacgtcgtgagcgggaaaacctcagcgtgtttcgagccaagcctcgattatatggttaccaaaatcccaaggtgggatctggataggttccacgggactagcagccgtattgggtcctctatgaaaagtgtgggcgaagtcatggccatcggacgaactttcgaggagagcttccaaaaagccctcaggatgtgccaccctagtatcgaaggtttcacccctcggttgccaatgaacaaggagtggcctagcaacctggatttaagaaaggagctcagtgaaccatcctcaactagaatctatgccattgcaaaagccatagatgacaatatgagtctcgacgaaatcgagaaactgacgtacattgataaatggttcctatataaaatgcgggatattctcaacatggaaaagactttgaaaggacttaatagcgaaagcatgactgaggagacactcaaaagagcaaaggagatcggattcagcgataaacaaatcagcaagtgtttgggccttaccgaggctcagaccagagagttgcgcctgaaaaagaacattcacccctgggtgaagcagatcgacaccctcgctgctgagtatccgtccgtcaccaactacctttatgtgacctataacggccaagaacacgatgtcaatttcgatgatcacgggatgatggtactgggctgtggtccataccacattggcagcagcgtggagttcgattggtgcgcggtgtcttccataaggaccctgaggcaactgggtaaaaaaaccgtcgtagtgaactgtaatcctgaaactgtgagcaccgacttcgacgaatgtgataagctgtattttgaagaactgtcccttgaaaggatcctggatatctaccatcaggaagcctgcggaggctgtatcatctccgtcgggggccagataccaaacaaccttgccgtgcctctttacaaaaatggggtaaagatcatgggaactagcccactgcaaatcgaccgggccgaggatagaagcattttttccgccgttctcgatgaactcaaagtggcacaggcaccctggaaggccgtcaacaccttaaatgaagcccttgagtttgctaagagcgtagattacccctgtcttttgagaccctcttacgtgctgtcaggcagtgccatgaatgtggttttttctgaagacgagatgaaaaagtttctcgaggaggctacaagagtctctcaagaacatcctgtcgtgctgaccaaatttgtggaaggtgcaagggaagtggaaatggatgctgtaggaaaggacgggagagtcatttcgcatgctattagtgagcacgtcgaagacgctggagtccacagcggggatgctacgctgatgttaccaacccagaccatttcccaaggagcaatcgagaaggtcaaagatgcgaccaggaaaatcgctaaagcttttgccatcagcgggccttttaacgtgcagtttctcgttaagggaaacgacgtgttggtaattgagtgtaatctgagggcgagcagaagctttccatttgtgagtaaaaccctcggcgtggactttatcgacgttgctactaaggtcatgatcggcgaaaatgtagacgagaagcatctgccaacccttgaccaccccataatcccggcagattatgtcgctattaaagcccccatgttttcttggccaaggctgcgggatgctgaccccattctcaggtgcgaaatggcgtccactggcgaggtcgcatgctttggagaaggcatccacactgcttttctcaaggcaatgctgagtactgggttcaaaatcccccagaagggcatcctgattggcatacagcagagttttcgtcccaggtttctcggagtggcggaacagctgcataacgaagggttcaaactgttcgccaccgaggctacctcggattggcttaacgccaacaacgtgcctgccactccggtggcatggcccagtcaagaaggccaaaaccctagtttgagctccatcagaaaattgatccgcgatggctctattgatctggtgatcaacctcccaaacaacaacacaaagttcgttcacgataactacgtcataagaaggaccgctgtggatagcgggatccctctgctgactaattttcaagtcactaaactgtttgccgaggcagtgcagaagtctagaaaggtggatagcaagagcctctttcactatcgccagtatagcgcagggaaggcggcg

SEQ ID NO: 43478 - DNA, 4500 bp, Artificial Sequence
  derived and/or modified sequence
atgaccagaatacttacggccttcaaggtggtgaggactctgaagacggggtttgggttcactaatgtgaccgctcaccaaaagtggaagttcagcaggcccgggatacggctgctgtccgtgaaggcccagacagcccacatcgttttagaggatgggaccaaaatgaagggctactctttcggccaccccagttctgttgccggcgaggttgtgttcaatacagggctgggtggctatccagaagccattactgacccagcctataagggtcagatcctgacaatggcaaacccgataatcggaaacggaggggcgccggatacaacggctctcgatgagctcggtctctccaaatatcttgagtctaatggcatcaaggtgtccggcctattagtactcgattatagcaaggattataatcattggctggccacaaagtccctaggccaatggttgcaagaagagaaggtgcctgcgatctacggcgtggataccaggatgctgaccaaaattattcgggataaaggcacaatgcttggcaaaatcgaatttgagggacagcctgtggacttcgtggatcctaacaaacaaaacctaattgctgaagtatccaccaaagacgtgaaggtctacggtaaagggaacccaacaaaagttgtggctgtggactgtggcatcaaaaacaatgtgatacgcctccttgtcaagaggggtgccgaagtccacctggtgccttggaaccacgatttcacgaagatggaatacgatgggattctgattgctggaggtccaggaaaccccgcgctcgctgagcccttgattcagaatgtgcgaaagatcctggagagcgacagaaaggagccgttgttcggcatcagtactggcaatctcattactggtctggcagcaggcgccaagacttacaaaatgtccatggcaaatcgggggcagaaccagccggtcttgaatattacaaacaagcaggcatttatcaccgcacaaaatcacggatacgcgctggacaatacactccctgctggatggaagccattatttgtaaacgtgaacgaccagaccaacgaagggatcatgcacgaatcaaagccttttttcgcggttcagtttcacccagaggttactccaggcccaattgatacggagtaccttttcgactcgttcttttctctcatcaagaaggggaaagctactacaattacatctgtcttgcccaaacccgccctggttgctagccgagtggaggtttcgaaagtacttattcttggaagcggaggactctcgatcggacaggctggcgagttcgactattccggcagtcaggcggttaaggccatgaaggaagagaacgtgaagacagtgttgatgaaccccaacattgcatctgtgcagaccaacgaggtgggcctcaaacaggccgacactgtgtactttcttcctattacaccccaatttgtaactgaggttatcaaagcagagcagccggatggcctgatcttgggaatgggcggccaaaccgccctgaattgtggcgtcgagctattcaagcgcggggtgctgaaggaatatggggtgaaagtcctggggaccagtgtcgaaagtatcatggctaccgaggaccgtcagctcttcagtgataagctgaacgagatcaacgaaaaaatcgcgccttcatttgccgtggagtctatcgaagacgctctgaaagccgccgataccattggttatcccgtaatgattcgatctgcatatgcacttggtgggctgggtagtggaatttgtcctaaccgcgagacacttatggacctctccacaaaagcctttgctatgactaaccagatccttgtcgaaaagtctgtgactggctggaaagagattgaatatgaagttgtgcgagatgcagacgataattgcgtgaccgtgtgtaatatggaaaacgtggacgccatgggagtccacacgggggattctgtcgtcgtggcccccgcccagacactttccaatgccgagtttcagatgctgcggagaaccagtattaatgtagttcgtcacctgggcatcgttggcgagtgcaacatccagtttgcgcttcatcctacttccatggagtattgcatcatagaggtgaacgccaggctgtctcggtcaagcgccctggcctctaaagccactggatatccactcgcctttattgcagccaagatagcactggggatccctcttccggagattaagaatgtggtgagcggcaaaacatcagcatgcttcgagcctagtctggattatatggttactaaaattccacgctgggacttagacaggtttcacggaacgtcttcccggattggtagctcaatgaaatccgtgggcgaagtgatggctattggacgaacctttgaggagtcatttcagaaggccttgcgaatgtgccatcccagtatagagggattcacaccgcgactgccaatgaacaaggagtggccaagcaaccttgacttgcgcaaagagctgagcgaaccatcttctacacggatttacgcaatagctaaagctattgatgacaatatgagccttgacgagatcgagaagcttacctatatcgataaatggttcctttacaagatgcgcgacattctgaatatggagaagaccctgaagggattaaactcagagtctatgacagaggagactttaaagagggcgaaggagatcgggttcagcgataagcagatttcaaaatgtctgggtttgaccgaggcccagactcgcgaactccgcttgaaaaagaacatccatccctgggtgaaacagatcgacacactggccgctgagtaccctagcgtcactaattacttgtatgtgacttataacggccaagaacacgacgttaactttgatgatcatggcatgatggtcctaggctgtggcccttaccatatcggatcctctgtagagttcgactggtgcgcagtgtcttcgatccgaacccttcggcaactcggcaagaagaccgtcgtggtcaactgtaaccccgagaccgtttcaactgactttgatgaatgtgataagctgtacttcgaggaactgtcactcgagcgcatccttgatatttatcatcaggaggcctgtggcgggtgcatcataagcgttggagggcaaattcctaataatctagccgtgcctctgtacaagaacggcgtgaagatcatgggtacgtccccgcttcaaattgaccgcgcagaggatcgcagtatattttccgctgtgctcgatgaactcaaagtcgctcaggctccatggaaggctgtgaatactctcaatgaggccctggagttcgccaaatctgtggactacccctgtttactgaggccgtcttatgtcctctcagggtctgcaatgaatgtggtgttcagcgaagacgaaatgaaaaaattcctggaggaggctacaagagtcagccaggaacaccccgtagtgttgacaaagtttgtcgaaggagcccgggaggtagagatggacgccgtgggtaaggacgggagagtcataagccacgctatctctgagcacgtggaggacgctggtgttcacagtggggacgctacgctgatgttgccaacccaaacaatcagccagggggctatcgaaaaagttaaggacgcaaccaggaagatcgcaaaggcatttgctatctccggaccctttaatgtccagtttctcgtgaagggaaacgacgtactggtgattgaatgcaacctccgggctagcaggtccttccccttcgttagtaagacactcggggtggattttatagatgtggccacgaaagtgatgatcggcgagaatgtcgacgaaaagcatctccccactctggatcaccccatcattccagctgattacgtggcaataaaagccccaatgttcagctggcccagactgcgcgacgccgaccctatcctgagatgtgagatggcctctacgggggaagtcgcctgttttggggagggcattcacacagcgtttttaaaagccatgctatctaccggcttcaaaataccacagaaaggcatcctgatcgggatacagcagtcttttagacccaggttcctcggagtagcagagcagctgcacaatgagggctttaaactttttgcaaccgaggccacaagtgactggctgaatgcaaataacgtgccagcaacccccgtggcatggccgtctcaggaggggcagaacccatccctgtcatctatcaggaagttaatccgtgatgggagtatcgacctcgttataaacctccccaacaacaatactaaattcgtacacgataattatgtcatcaggcgcacagccgttgatagtgggatccctctcctcaccaactttcaggtgacaaaattgtttgccgaagccgtccaaaaatcccgcaaggtagattctaaatcactgtttcactataggcaatactcagcgggcaaggccgcc

SEQ ID NO: 43479 - DNA, 4500 bp, Artificial Sequence
  derived and/or modified sequence
atgacaaggatcctcactgcttttaaagttgtgcggacacttaagaccgggtttgggtttacgaacgtcacagcccaccaaaaatggaaatttagccggcccggcattaggctcctcagcgtgaaggcccagaccgcccacatcgtacttgaagatggcaccaaaatgaagggttacagctttggacacccatcatcagtggcaggcgaggtggtctttaatacggggctgggcggatacccggaggccattacagacccagcctataagggccagattctgacaatggcgaacccgataatcgggaatggaggcgcgccggataccacagcacttgacgagctggggctcagtaaatatctcgaaagcaatgggatcaaggtgtctgggctgttggtgctggattactcaaaagactataaccattggctcgctaccaagtctttgggacagtggctgcaggaggaaaaggtaccagctatttatggggtggacactcggatgctgacaaagattatccgcgataagggcaccatgctggggaagatcgagtttgaaggacagccagtggactttgtcgacccaaataaacagaatctgattgccgaagtttcaaccaaggatgtgaaagtctacggaaagggtaatcccactaaggtggtggctgttgattgcggcattaagaacaacgttatacgcctcctggtgaagcgcggggccgaagttcacctggtcccttggaatcatgattttaccaaaatggagtacgatggaatcctgatcgccggtgggccgggtaaccccgctctcgcggagcctttgattcagaacgtccgcaaaattcttgaatccgatcggaaagaacctttgttcgggattagtactggcaatctcattacggggctggctgctggggccaagacctacaagatgtccatggcaaaccgcggccaaaatcagccagtcttgaacattactaataagcaggcctttattactgcccagaaccacggctacgcccttgataataccctgccggctggctggaaaccattgttcgttaatgtgaacgatcagacaaacgaggggatcatgcacgaatccaaaccctttttcgctgtacagtttcaccccgaagtgactccgggtcccatcgacacggagtaccttttcgactccttcttttctctcatcaagaaaggcaaagcgaccactattacatctgtcctcccaaaaccggctctggtagcgtctagagtggaggtttccaaggtccttattctgggcagtggcggtctcagcattgggcaagctggcgagttcgattattccggatcacaggcagtcaaagcaatgaaggaggagaacgtaaaaacagttcttatgaaccctaacatagcatctgtccagactaatgaggttggactcaagcaagcggacaccgtttacttcctccctataaccccgcagttcgtgacagaagtcatcaaggccgagcagcctgatgggctcattctcgggatgggcgggcaaaccgcactcaactgtggagtggaactgttcaagcggggagtcttgaaggagtacggggtaaaggtacttgggacgtccgttgaaagcatcatggcgaccgaagatagacagctcttttcagacaagctgaacgaaattaatgaaaagattgccccctcctttgccgtggaatccatcgaggacgctctgaaagcggccgacacaattgggtatcccgtaatgattcgcagcgcctacgcattgggagggcttggcagtggaatctgtcctaaccgcgaaactctcatggatctcagtactaaagcctttgcaatgacaaaccagatactggttgagaagtctgtgacgggatggaaggagatcgagtacgaagtagtgagagacgctgatgataattgcgtcaccgtctgcaacatggagaatgtggacgccatgggtgtgcataccggagactccgtggtcgtggctccagcacaaaccttgtctaacgctgaattccagatgctgcggagaactagcattaacgttgtaaggcatctcggcatcgtaggtgaatgtaatattcaattcgccctgcacccaacctccatggagtattgcattattgaggtaaatgctcgcttgagccgcagcagtgctcttgcttccaaagctaccggttatcccctggccttcatcgccgccaaaatcgccctcggcatccctctgccagagattaagaacgtggtctccgggaagaccagtgcctgttttgagccttcactggattacatggtgacgaaaatcccgcgctgggacttggatcgctttcatgggacttccagccgcatcggttcttctatgaagtcagttggggaggtaatggccatcggcagaactttcgaagagtccttccagaaggcgctcaggatgtgccaccccagcatcgaagggttcacgccgaggttgccaatgaacaaggaatggccatctaatctcgacctgaggaaggagttgagcgaaccatccagtaccaggatttatgctatcgctaaggctatcgatgataacatgagcctcgacgaaatcgagaagctgacctacattgacaagtggttcctgtataaaatgagagacatcctgaatatggagaaaacgctgaaggggctcaattctgagagcatgactgaagaaacactgaagagggccaaggaaatcgggttttccgacaaacagatatctaaatgccttgggctgaccgaagctcaaacacgggaattgaggctgaaaaagaacatccacccctgggtgaagcagatcgacactctcgcagccgagtacccaagtgtgaccaattatctgtatgttacctacaacgggcaggagcatgacgttaactttgacgatcacggcatgatggtgctggggtgcggcccctatcatataggatcaagcgtcgaattcgactggtgtgccgtaagctctattagaaccctcaggcagctgggcaagaagacggttgtggtgaactgcaaccccgagactgtgagcactgacttcgacgagtgcgacaagctctatttcgaggagctgtcactggagagaattctggatatatatcatcaagaggcttgcggtggatgtatcatttctgttggtggtcagattcccaataatcttgccgtgcccctgtataaaaatggagtcaagattatgggcacttcaccgctgcagatcgatcgggctgaggatagaagcatattttcagcagtgctggacgaactgaaggtggcccaggctccttggaaggccgttaacacacttaacgaggccctggaattcgccaagtcagtggactatccctgtctcctccgcccctcatacgtactctccggctccgcgatgaacgtggtattctctgaggacgagatgaagaagttcctcgaagaagctacccgcgtgagccaggagcatccagttgtgttgaccaaatttgtggagggagcaagagaggtcgagatggatgccgtgggcaaggacggccgggtcataagtcacgccatctctgaacatgtagaggacgccggcgtgcactctggcgacgccacactgatgctcccaacccagaccataagtcagggtgcgattgagaaagtcaaggacgccactcggaagatcgccaaggcctttgccattagtgggccgttcaatgtacagttcctggtgaaaggtaacgacgttctggttattgagtgcaacctgagagcctccaggagttttccattcgtcagcaagactcttggcgtggactttatcgatgtagccacgaaggtcatgatcggagagaatgttgacgaaaagcacttgcctacactggaccaccccatcattccagctgactacgtcgccataaaggcccccatgttctcatggccccggctgagggatgccgacccaattctgaggtgtgaaatggcctctacgggggaagtggcttgtttcggtgaagggatccacaccgcctttcttaaggcgatgctctcaacaggatttaagatcccccagaaagggatactgatcgggatccagcagtcctttcgcccccgctttctcggtgtggccgagcagctgcacaacgaagggtttaagctcttcgcgactgaagctacgtctgactggctgaacgcaaataacgtgcctgccactccagtggcctggccctctcaggagggccagaacccaagcctgagttctatccgcaagctgatccgcgatggcagcatagacctggttatcaacctccccaacaataataccaagttcgtgcacgacaactacgtgatccggagaaccgccgtggattccggcatcccccttttgacaaactttcaagtgaccaaactcttcgccgaagccgtacagaaaagtcggaaagtcgactcaaaatctctgttccactatcgccagtacagtgctggcaaagccgcc

SEQ ID NO: 43480 - DNA, 4500 bp, Artificial Sequence
  derived and/or modified sequence
atgactcggattctgaccgcgtttaaggtggtcaggaccctgaagaccggattcggatttacaaacgtgacggcccaccaaaaatggaaattttcgcgccctgggatcagattactatcagtgaaggcccagactgcgcatatagtattagaagatggaaccaagatgaagggctattcctttgggcatccaagcagtgttgcaggcgaagtggtgttcaatacaggactcggcggatacccagaagcgatcaccgaccctgcctacaaggggcaaatattgacaatggccaacccaataatcggcaatggcggcgcccctgacaccactgcgctcgacgagctaggactttctaagtacctggaatctaatggcatcaaggtttctgggctgttggtgctggactacagcaaagactacaatcactggcttgctacaaagtcgctgggacagtggttacaggaagagaaggtgcccgccatctacggtgttgacaccagaatgttaaccaagatcattagggataaagggacaatgttggggaagatcgagtttgagggtcagcctgtggacttcgttgatcctaataaacagaatctgatcgcagaggttagtaccaaggacgtcaaagtgtacgggaaagggaaccccacaaaggtagtcgccgtcgattgcggcattaaaaataatgtcatccggctgcttgtcaagcgaggagctgaggtacacctcgtcccctggaatcacgacttcactaagatggagtacgacggaatccttattgccggaggcccggggaaccctgcgctggccgaacccttgattcagaatgtacgaaagatactcgagtctgatagaaaggaaccacttttcggcatctctacaggcaatctgattacaggcctcgcagctggtgccaagacctacaagatgtccatggcaaacaggggccagaatcagccggtcttgaacatcacgaacaaacaagccttcatcacggcccaaaatcacgggtacgctctcgacaatacactgccagctgggtggaagcccctgttcgtgaatgtgaatgaccagacgaacgagggaataatgcacgagagcaagccattttttgccgtccagtttcatcccgaagtgacgcccggacctatcgacaccgagtatctgttcgactctttcttcagcctcattaaaaaaggtaaggctaccaccatcacatctgtgctccctaagcccgccctggtagcaagtcgcgtggaggtgtctaaggtcctgatcctagggagtggcggactttcaattggtcaggcgggggagtttgattatagtggatcacaggctgtgaaagccatgaaggaggagaatgtgaagacagttttgatgaatccaaatattgctagtgtacagacgaatgaagtggggcttaagcaggccgatacagtctatttcctacccatcactcctcaattcgttacggaagttatcaaagctgagcaaccagacggcctgattctaggaatgggtggtcagacagctctgaactgcggcgtcgaacttttcaagaggggcgtattgaaggagtacggcgtcaaagtcttgggtacatcggtggagtctatcatggccacagaggatcgtcagctcttctcagacaagcttaacgaaattaatgagaagatcgcaccatcattcgcagtggagtctattgaggatgccctaaaggccgccgatactatcggatacccagtgatgatcagatcggcctacgcactgggaggtctaggctccggtatatgccccaaccgcgagacgctgatggacctctcgactaaggcttttgctatgacaaatcaaatactggtcgaaaaatccgtgaccggatggaaagagatcgaatatgaggtagtgcgtgacgccgatgacaactgcgtcacggtctgtaatatggagaatgtggatgccatgggagtgcacaccggtgactccgttgtcgtagcccctgcccagacattgtcaaacgctgagttccagatgttaaggcgcacttcaattaatgtggtccgccacctagggattgtcggcgagtgtaatatccagtttgccttgcatcctaccagtatggaatattgtatcatcgaggtgaacgctagactcagtcggagctctgccctggctagcaaggcaactggttaccctttagctttcattgcagcaaagatcgctctcggtattccactacctgagataaagaacgtcgtgtccgggaagacaagtgcttgcttcgaaccatctctggattatatggtcaccaaaattccgcgatgggacctagatcgcttccacgggacctcctcacggatcggttcgtcgatgaagtcagtaggggaagtcatggcgatcggcagaacatttgaggaaagctttcagaaggctctgcgtatgtgtcatccgagcatcgaaggatttactccccgtctgccaatgaacaaggaatggcctagcaatctggacctgcgtaaggagttgagcgagccaagctccacaagaatctatgccatagctaaagcgatcgatgacaatatgtctttggacgagatcgaaaagttaacctacattgataaatggtttctgtacaagatgagggatatcctcaacatggaaaaaaccctgaaaggattgaactccgaatccatgactgaggagacactcaagcgggctaaagagattggtttttcggacaagcagatcagcaagtgcctgggactgactgaagcccaaacccgagaattgagacttaaaaaaaatatccacccctgggtgaagcagatcgatacactggccgccgagtatccatccgtcaccaactacctctacgtcacctataacggccaggagcatgacgtgaacttcgatgatcacggtatgatggtcctgggttgcgggccctaccacataggctcttccgttgagtttgattggtgcgcggtgtcctcaatcagaaccttacgtcaattgggcaagaaaacagtggttgtgaactgtaaccccgaaaccgtctccacggacttcgatgagtgtgataagctgtactttgaggagctttctttggagaggattctcgatatctatcaccaggaggcgtgtgggggctgcataatcagtgttggcggccagatccccaacaacctggccgtaccactctacaaaaacggagtgaaaatcatgggaacgtccccgctccaaatcgatcgcgcagaagacagatcaattttcagtgctgtactcgatgagctgaaggtggcacaggcgccctggaaagcagtcaacaccctgaatgaggcactggagttcgccaaatcggtcgactatccctgcctattaagacctagctatgttctgagcggatccgctatgaacgttgtttttagtgaggacgagatgaagaaatttctcgaagaggccacccgcgtgagccaagagcatccagttgtcctcactaaatttgtggagggagcccgcgaggtggaaatggacgcggtgggcaaggacggccgcgtgatatcacacgctatcagcgaacatgtagaagacgctggggtacatagcggcgatgcaacactgatgctgccaacacaaaccattagtcaaggtgcgatcgagaaagttaaagacgccacaagaaaaatcgcaaaagcattcgccatatcggggccatttaatgtacagtttctagtgaaaggtaatgacgtgcttgttatcgaatgcaatttgagggccagcaggtctttcccatttgtgtccaaaacactcggggttgattttatcgacgtggctactaaggttatgatcggcgaaaacgtggatgaaaaacatctaccaacgctcgatcatccaatcattcctgccgattacgtcgccattaaggcacctatgttttcctggcccagacttcgggatgccgacccgatcctacgctgtgagatggcttccacaggcgaggttgcatgttttggcgaaggaatccatacggccttcctcaaagccatgctaagtactggcttcaaaatcccccagaagggcatactgattggaatccagcagagctttcgcccccgatttcttggagtagctgagcagctccataatgagggattcaaactgttcgccacggaagcaaccagcgattggttgaacgcaaacaatgtgcccgctaccccagtggcctggccctcgcaagagggccagaatccttccctgagcagcatccgcaaactgattcgggatggaagtatcgatttagttatcaacctaccaaataataataccaaatttgtccacgacaactacgtgattcgtcggacagctgtggattctgggatcccgttgctaacgaactttcaggtcaccaagctttttgctgaagcggtgcagaaaagccgaaaggtggactccaaaagcctgttccattatagacagtattcagcaggaaaagctgct

SEQ ID NO: 43481 - DNA, 4500 bp, Artificial Sequence
  derived and/or modified sequence
atgaccagaattcttaccgcatttaaggtggtaagaaccctgaaaaccggatttggtttcaccaacgtgactgcccatcaaaagtggaagttcagccggccaggcatacggctcctgtctgtgaaggcccagacagctcacatcgtgctagaagatggcactaaaatgaaaggttacagcttcggtcatccctcgtctgttgccggagaagtcgtctttaatacagggctcgggggatatcccgaagccattactgacccagcttataaaggccagatactgaccatggctaatcccattataggcaacggcggcgcccccgataccacggcacttgacgaacttggcctgagcaagtatctggagtcgaatggaatcaaagtgagtggtctgctggtgttagattacagcaaagattataatcactggctcgcgacaaaaagtcttgggcagtggctgcaagaggagaaagtgcctgccatatatggagtggacaccagaatgctaactaagatcattcgtgacaagggaactatgttagggaagattgagtttgaggggcaacctgtcgacttcgtggatcccaacaaacagaatctgattgccgaggtatcaaccaaggatgtgaaagtctatgggaagggtaaccccaccaaggtcgtggcggtggattgcggaatcaagaataatgtcatacgactcttggtaaaaagaggtgccgaagtgcacctcgttccgtggaatcatgatttcactaaaatggagtacgatggaattcttatcgccggcggccctggaaatcctgccctggctgaaccactaatccagaatgtgcggaagatactggagtccgaccggaaggagccactgttcggcatatccactggtaaccttattaccgggctagccgcaggcgccaagacttataaaatgagcatggcaaatcgcggacaaaaccagccagtgctgaacattactaataaacaggcctttatcaccgcccagaaccatgggtacgcgttggacaacaccctgccagccgggtggaaaccactgttcgtaaacgttaatgatcaaaccaacgaggggattatgcacgagagtaagccatttttcgcagtgcagtttcatccagaagtaactcctggccctattgataccgaatacttgttcgattctttcttttctctgatcaaaaaaggcaaggccacaaccatcacttccgtccttcccaagcctgcactggtagcatctcgggtcgaagtcagcaaggtgttaattttaggctctggtggtctcagtattggtcaggctggagagttcgactactcaggctctcaggcagtgaaagcgatgaaagaggaaaatgtgaaaactgtgttgatgaatcccaatatagcgtctgtgcagaccaatgaggtgggtttgaaacaggctgataccgtgtatttcctgcccattactccgcagtttgttaccgaggtaataaaggctgaacaacccgacggtctaattctgggcatgggtggacagaccgccctgaactgcggggtcgagctcttcaaaagaggcgtccttaaggagtatggtgttaaagtattagggacttctgtcgagagcatcatggctaccgaggaccggcagctgttttctgacaaacttaatgaaataaacgagaagatcgccccttcttttgcggttgaatccatcgaggacgcgctgaaagccgcagatacaatcggctacccagtgatgataaggtctgcctacgcacttgggggactgggctccggtatttgtcccaatcgcgagacactcatggatctgtctacaaaggcgtttgcaatgaccaaccagattctcgttgagaagtcagtgactggatggaaagaaatagaatacgaagtggtgcgtgatgcagacgacaattgcgtgacagtgtgtaatatggagaacgtggatgcaatgggcgtgcacactggcgatagcgtggtggttgctcccgcccagactttgtcaaacgctgaattccaaatgctgcgcagaacttctataaatgtggtgagacatctcggcatcgttggggagtgtaatatccaattcgcactgcacccaacttcaatggagtactgcatcatagaggtaaacgccagactcagccgctcgtctgcccttgccagtaaagccactggctatccgttggcttttatcgccgccaagatcgcactcggcatcccactgcccgagatcaaaaacgtcgtgagcggaaagacgtctgcttgctttgagccgagcctcgattatatggtaactaagattcctaggtgggatcttgatcgtttccatggcacttcatccagaataggatcctccatgaagagtgtgggagaagtcatggcaatcggcaggacattcgaggaatcttttcagaaggctctgcgcatgtgccatccctcaattgagggatttacccctcggctgcctatgaataaagagtggccgagcaatctagacctgcgtaaagaattgtctgagccttcttccacccgcatctatgctatcgctaaagctattgatgacaacatgtccctagatgagattgaaaagctaacatacatcgacaaatggtttctttacaaaatgcgcgacattttgaacatggagaaaaccctgaaggggctgaactcagaaagtatgacggaggaaacattgaaacgggctaaagagataggattcagcgataaacagataagtaagtgcctcggactgacggaagcacagaccagagagttgcggctgaaaaagaatattcacccttgggtcaagcagatcgacacgttagccgcggagtacccttcagtaacgaactacctgtacgtcacctacaacggccaggaacacgacgtgaacttcgatgatcatggaatgatggtgctgggttgtgggccttatcacattggctcatccgtcgagttcgattggtgcgccgtatcttcaattcgaaccttgcgccaacttggcaaaaagacagttgtggtgaattgcaaccccgagactgtgtccaccgattttgacgagtgcgacaagctgtacttcgaggaactaagtttggaacggattctggatatttaccaccaagaggcttgcggaggctgcattattagtgttggaggacagatccccaacaatctcgcagttcctctgtataaaaatggagtgaaaatcatgggtacatctccgcttcagatcgaccgcgctgaggatcgcagtattttcagtgccgtgctcgatgagctgaaggtggcccaagctccatggaaggcagttaacaccctcaacgaagcgctggaatttgccaaaagtgttgactacccatgcctgctgagaccctcttacgtgctctcaggctccgcgatgaacgtggtgttcagcgaagacgagatgaaaaaattcctggaggaagccacacgagtctcacaggagcaccccgtggtgctgactaagttcgtggaaggcgcgcgtgaagtagagatggacgctgtgggaaaagatggaagggtaatatctcacgccatctccgaacatgtggaagatgctggcgttcatagcggtgatgccaccctgatgctgcctacacagaccatctcacaaggcgcgattgagaaggtgaaggacgctactcgaaagattgccaaggctttcgccattagcggtccttttaatgtgcagtttctggtgaaaggcaatgatgtactggtgatagagtgtaacttgagggcgtcccggtcctttccctttgtcagcaagacgctcggcgtggacttcattgacgtggcaacaaaggtgatgattggagagaacgttgatgaaaaacaccttcccaccctggaccatcctatcatacctgctgattacgtggctattaaagcaccgatgtttagctggcctcggctaagggatgccgatcccatattaaggtgtgaaatggccagcacaggcgaggtggcatgttttggggagggcatccatacagccttccttaaggctatgctgagtactggtttcaaaatccctcagaagggcatcctgatcggaattcagcagagtttcaggccaaggtttctgggagtcgcagaacagctgcacaacgaaggttttaaactctttgctaccgaggctacatctgattggcttaatgcaaacaatgtgccggctacacccgtggcctggccctcgcaggaggggcaaaatccctccctcagtagcataaggaaacttattcgcgatggaagtatcgatttggttatcaatctgccgaacaacaacaccaagttcgtccacgataattatgtcattagaagaacagcggttgatagcgggatccccctcctgacaaatttccaggttacaaaactcttcgcagaagcagtgcagaagtccagaaaagtggactccaagtctttatttcactatcggcagtactccgctggcaaggccgct

SEQ ID NO: 43482 - DNA, 4500 bp, Artificial Sequence
  derived and/or modified sequence
atgactcgcattctgaccgctttcaaggtagtccgcaccctaaaaaccggctttggcttcactaatgtgaccgctcatcaaaagtggaagttcagccgccctggtattcggctgctaagcgtgaaggcccagaccgctcacattgtcctagaagatggtaccaagatgaagggctactcctttggtcatcctagctccgttgccggagaggtggtctttaataccggtctgggtggttatccagaagcgattacggaccctgcctataagggtcagatccttactatggccaacccaattatcggtaacggtggcgcacctgacactactgcactcgatgagcttggcctgtcgaagtatctcgagagtaacggcatcaaggtcagcggtctgttggttctggattattctaaggattacaaccattggttagctacgaagagcctgggacagtggctgcaagaggaaaaggttcctgcgatctacggcgtggacacgcgaatgctgactaagatcattcgcgacaagggcaccatgctgggtaagatcgaatttgagggacagcctgtggacttcgtggatccaaacaagcaaaacctgattgcggaggtgtccaccaaggatgtcaaagtttacggtaagggcaatccgaccaaagtagttgccgttgactgcggcattaaaaataacgtgattcgcctgctggtgaagcgcggcgcagaggttcacttggttccgtggaatcacgactttaccaagatggagtacgacggtattctgatcgcgggcggcccagggaatccagcactggcggagcctttgatccagaatgttcggaagatcctggagagcgaccggaaggaaccactgttcggaatttccaccggaaatctgattaccggtctggcggccggcgcaaagacctacaaaatgagcatggccaatcgcgggcaaaaccagcctgttctgaacataaccaataaacaagctttcatcaccgcgcagaatcacggttacgcgctggacaacaccctgcctgctggttggaagccgctgttcgtgaatgtcaatgaccaaaccaacgaggggatcatgcatgagagcaagccattttttgccgtccagtttcatccagaggtcacgcctggtcctattgacaccgagtacttgttcgatagcttcttctcactgattaagaagggtaaggctaccacgatcacgtccgttctccctaaaccagccttggtggcgtctcgtgtggaagtgagcaaagtcttaattctgggtagcggcggcctgtccatcggccaggccggtgaattcgattatagcggatcccaggctgtcaaggcaatgaaggaggagaatgtgaagaccgtactgatgaatccgaacattgctagcgttcagaccaatgaagttggccttaaacaggctgatacggtgtacttcctgccaattactccccagtttgtaacggaggtgattaaggcagaacagccggacggtctgattttggggatgggtggccagactgcgttgaactgcggcgtagaactgtttaaaaggggcgtcctgaaggagtacggcgtcaaagtgctgggtaccagcgttgagagcatcatggccactgaagaccgccagcttttttcggataagctcaacgaaattaatgaaaaaatcgctccttccttcgctgttgaaagcatcgaagacgcactcaaggccgcagatacgatcggatatcccgttatgattcgctcagcctatgctctcggcggtctggggagtggcatctgcccgaatcgcgagacgctcatggacctgagcaccaaagcctttgcgatgactaaccaaattttggtggagaagagcgtgaccggatggaaggaaattgaatacgaagttgtacgcgacgccgacgacaactgtgtcacggtgtgcaatatggaaaatgtcgacgccatgggtgtgcatactggcgattctgttgtggtggcccctgcccagacgctgagtaacgcagagtttcagatgctacgtcggacgtcaatcaacgtggttcgccatttgggcattgtcggcgaatgcaatattcaattcgccctgcaccctacctccatggagtactgtatcatcgaggttaacgcgcgcctgagcagaagcagcgcactggcatcaaaagccactggctatccgctagcctttatcgccgccaaaattgccctggggattccattgccagagataaagaacgtcgtgagcggtaagactagcgcatgctttgagccatcattggactatatggtgacaaagatccctcgctgggacctggatcgttttcacggaacctctagccggattggctcttcgatgaagagcgtgggtgaggttatggcaatcggccgcacgttcgaggagagctttcagaaagctctgcgtatgtgccatcctagcatagagggcttcaccccgagattgcctatgaacaaggaatggccatcgaacctggacctgcgcaaggaactgtccgagccctctagcaccagaatctacgcgatcgccaaagccattgacgataacatgtccctggatgaaatcgagaagctcacctatatcgacaagtggttcctttacaaaatgcgcgacatcctcaacatggagaagaccctgaagggacttaatagcgagtcaatgaccgaagagaccttgaaacgcgcgaaagaaattggattcagcgacaaacagatctctaagtgcctgggtctgacggaagcgcaaacccgcgaactgaggctgaaaaagaacatccacccatgggtgaagcagattgacacactggctgcggagtacccaagcgtcacaaactacctgtatgtcacatacaatggtcaggagcacgacgtaaatttcgatgaccacggcatgatggttctgggttgtggtccgtaccacatcggtagtagcgtggagtttgactggtgcgcggtgagtagcatccgcaccctccgtcagctgggcaagaagactgttgttgtgaactgcaacccagagactgtgtctacggacttcgacgagtgcgacaagctctacttcgaggaattgagcctggaaagaattctcgacatttaccaccaggaggcatgcggcggttgcattatctcggttggcgggcagattccgaataatctggcggtgccgctgtataagaacggagtgaaaattatggggaccagcccgctgcagattgaccgtgcggaggatagatcaattttttccgcagtgctcgatgaactgaaggtggcgcaggccccctggaaggcggtcaacaccctgaatgaagcactggagttcgcgaaatctgtggattacccatgcctgttacggcccagctacgtgttgtctggttctgccatgaatgtagttttctcagaggatgagatgaaaaagttcttagaggaggcaacgcgcgtcagccaggagcacccagtcgtcctgacgaagttcgtggagggtgcccgcgaggtggaaatggacgcagtgggaaaggatggcagggttatttcccacgcaatcagcgaacatgtggaagatgccggagtgcattccggtgacgcaaccctcatgctgccgacgcagacgatctcgcagggcgccatagaaaaggtgaaagacgccaccaggaaaattgctaaggcctttgcaatctccggtcctttcaacgtgcagttcctggttaaaggcaacgatgtgctggtgatcgaatgcaacctgagggcgtccaggagctttccgtttgtctctaagactctgggtgtagacttcatcgatgtcgctaccaaagtgatgatcggtgaaaacgtcgatgagaagcacctgcctactctggatcatccgataatcccggccgactacgttgccatcaaggccccgatgttctcttggccacgtttgagagacgcagaccctattctgcgctgcgaaatggcctcaacaggggaggtggcgtgctttggtgagggtatccacaccgcattcctgaaagcaatgctcagtaccggcttcaaaatcccacaaaagggcattctgatcggcattcagcaaagcttcaggccacgctttctgggcgtcgctgaacagctgcacaacgaaggctttaagcttttcgccacagaggcaacttccgactggttaaatgccaacaacgtgcctgcaacgcctgttgcgtggccgagtcaggaaggtcagaacccttccctgtctagtatccgcaaattgatccgcgacggctctattgacctggttatcaacctgccaaataacaataccaaattcgtccatgataactatgtaatacgccgcaccgcagttgacagcggcataccgctgctgaccaatttccaggttaccaaactttttgcggaggccgtgcaaaaaagccgtaaggtggactctaaatccttatttcactaccgccagtactccgccggtaaggccgcc

SEQ ID NO: 43483 - DNA, 4500 bp, Artificial Sequence
  derived and/or modified sequence
atgactagaattcttaccgcatttaaggtggtgagaacgctcaagactggttttggatttaccaacgtgaccgcgcatcagaagtggaagttcagcagacctggaatccggttgctttccgtgaaggcacagacggcacatattgtgctggaggacggtaccaagatgaagggttactcctttggccatccctccagcgtggcgggtgaagttgtctttaacaccggtcttgggggttaccccgaagcaataaccgatcccgcatacaagggtcagatactgaccatggccaatcctatcatcggtaatggtggtgcaccagataccaccgctctggatgagcttggtcttagcaagtacttggagtccaacgggatcaaggtcagcggtctgcttgttctggattactcaaaggattacaaccactggcttgcaacgaaaagccttggacagtggctgcaagaggagaaggtgccggcaatttacggcgtcgacaccagaatgctcactaagatcatccgcgataagggtaccatgcttgggaaaattgagtttgaaggtcaaccggtggattttgtggatcctaataagcaaaatctcatagcagaagtgtctactaaggatgtcaaggtctacgggaagggaaatcctacgaaggtggtggcagtcgattgtggtatcaagaataatgtgatccggctgctcgtgaagagaggtgccgaagtccaccttgtgccatggaaccatgatttcaccaagatggagtacgatggtatcctgattgcagggggtcctggaaaccctgcactcgccgaaccgctgatacagaacgttcgaaagattctcgaatcggatagaaaagagccactgttcggaatctcaactggaaatcttataaccgggctcgcggcgggcgcaaaaacgtacaagatgtccatggcaaaccgaggacagaaccagcccgtgcttaacattactaacaagcaagcgtttatcaccgcacagaatcatggatacgcactggacaacacgcttcctgcgggatggaaaccgctctttgtgaacgtgaacgaccaaaccaacgaaggaattatgcacgaatcaaaacctttctttgcggtgcagttccacccagaagtcactccgggacccattgacactgagtacctgtttgattcattcttttccctcattaagaagggaaaagcaaccacgataacttcagtgctgccaaagcctgcgcttgtcgcgagccgagttgaggtgagcaaggttcttatccttggttcaggtggccttagcattgggcaagcaggagaatttgattactccggatcccaagccgtgaaggcaatgaaggaagagaatgtcaagactgtcctgatgaacccaaatatcgcatctgtgcagaccaacgaagttggtctgaagcaagctgataccgtctactttctgccaatcacccctcaattcgtgactgaggtgatcaaggcagaacagcctgatggactgatattggggatgggtggtcagacggcgctgaactgtggcgtggaactgttcaagaggggagtccttaaggagtacggggtgaaggtgctgggaacttctgttgagtccatcatggctactgaggatcgccagctgttctcagacaaacttaatgagattaatgagaagatcgcacccagcttcgcggtggagtccatagaagatgcacttaaggcagcagatactattggctatcctgtcatgatacgcagcgcatacgcacttggaggacttggctcgggaatttgtcctaatcgggaaaccctgatggatctgtcaactaaggcatttgccatgactaaccaaatcctcgtggaaaagtccgtgactgggtggaaagagattgaatacgaagtggtgcgcgatgccgacgacaactgtgtgaccgtgtgtaatatggaaaacgtggatgcgatgggcgtgcacactggtgattcggtggtggtggcaccagcacaaacgctttcgaatgcagaatttcaaatgcttcggcgcacttcaattaacgtcgtgaggcatctcggtattgtcggggagtgcaacattcagttcgcgctgcatccaacgtccatggaatactgtatcattgaagtgaatgcgcggcttagccgctcatcggcacttgcatcaaaggcaaccggatacccacttgctttcattgcagcaaaaatcgccctcggtattcctctgcctgagattaagaacgtggtgtctggtaagaccagcgcctgcttcgaaccatctcttgattacatggtgactaagatcccacgatgggacttggatcggtttcatggaacttcatcacggatcgggtcatcaatgaagtcggtgggtgaggtgatggccattggcaggacttttgaagaatcctttcagaaggcactgagaatgtgtcacccgtcgatcgaaggttttactccccgtctgccaatgaacaaagagtggccctcaaatctcgatctgaggaaggaactgtccgaaccttcgtcaactcggatctacgccatagcaaaagcaattgatgataacatgtcgctggacgaaatcgagaagctgacttatatcgataagtggttcctctacaaaatgcgagatattctgaatatggaaaagaccctcaagggtctgaactcggaatcaatgactgaggaaaccctgaagcgtgccaaggagatcggcttttccgataaacaaatctcgaagtgccttggactcaccgaagcgcagactcgcgaactgaggcttaagaaaaacatccatccttgggtaaagcagatagataccctggcagcggaatatccatcagtgactaactacctgtacgtcacttacaacggacaggaacatgatgtgaacttcgacgaccacggtatgatggttctggggtgtggaccgtaccatattgggtcgtcggtggaatttgattggtgcgcagtctccagcattagaacgcttcgccagctgggaaaaaagacggtggtggtgaactgtaatccagaaaccgtgtcaaccgattttgatgaatgtgacaagctgtactttgaagaactctcactcgaacggattcttgacatctaccatcaagaggcctgtggtggctgcataatctccgtgggcgggcagatccctaacaacttggccgttccactctacaaaaatggagtcaagatcatgggaacttctccactgcaaatcgaccgggccgaggatcgctccattttctctgcagtccttgatgaactcaaagtcgctcaagcaccttggaaggctgtgaacactctcaacgaagctctggaatttgcaaagtcagtggattacccttgcctgttgcggccttcctacgtcctgtccggaagcgccatgaacgttgtgtttagcgaagatgagatgaagaagtttcttgaggaagcaacccgggtcagccaggaacatcctgtcgtgctcaccaagtttgtggagggtgcaagagaagtcgagatggacgcagtcggaaaggacggacgagtgatttcgcatgctatcagtgaacatgtcgaggacgcaggagtgcacagcggcgacgccacccttatgcttcctactcaaaccatcagccagggcgcaattgaaaaggtcaaagatgctacgaggaagatcgccaaggcatttgcaatttcgggtcccttcaacgtgcaatttctggtcaagggaaacgacgtcctcgtcattgagtgtaacctgcgcgcatccagatcctttccatttgtgtccaagacccttggagtggactttatcgatgtggcaactaaggtgatgatcggggaaaatgtcgatgaaaagcatcttcccaccctggatcatcctatcatccctgctgattatgtcgccattaaagcgcctatgttttcctggcctcgcctcagagatgcagaccctattcttagatgcgaaatggcctcaaccggggaggtcgcgtgttttggagaaggaattcacacggccttcctgaaagcaatgctctcgaccggttttaagattccacaaaagggtatcctcattggtatacaacaatcgtttagaccaaggttccttggtgtggcagaacaactgcataacgaaggctttaagctctttgctacggaagcaactagcgattggctgaatgccaacaacgttcccgccacccccgtggcctggccatcgcaagagggacagaacccaagcctctcatcgatcaggaagctcattagggacggctcaattgaccttgtgataaacttgccgaacaacaataccaagttcgttcatgacaattacgtgattaggcgaaccgcagtggattccggcattcccctgcttactaacttccaagtcactaaactgtttgccgaagcagtgcagaagtcccggaaagtcgactccaagagcctgtttcattaccgacaatacagcgccggtaaggcggcc

SEQ ID NO: 43484 - DNA, 4500 bp, Artificial Sequence
  derived and/or modified sequence
atgactcgtatccttaccgcattcaaagtggttaggactcttaagaccggattcggcttcactaacgtcaccgcccaccaaaagtggaagttcagccgcccagggattagactgctatcagtgaaagcgcagacagcacacatcgtcctggaggacggtactaagatgaaggggtacagcttcggtcacccttctagcgtggccggtgaagtggtgtttaacaccggacttgggggatacccagaggccattaccgatcctgcgtacaaaggacagattctgacaatggctaatcctatcatcggcaacggaggagcccccgacacgacagctctggatgagttgggcctgagcaaatacctagagagcaacggtatcaaggtttccggtcttctggtgcttgactacagcaaggattacaaccactggctcgccaccaaatccttgggacagtggctacaagaggagaaggttcccgccatttacggagtagacactcgaatgctgactaaaataatcagggacaaaggtacaatgctaggaaaaattgagtttgaagggcagccagtcgatttcgtggatcccaacaagcaaaacttaattgccgaagttagcactaaggatgtgaaagtttacgggaagggcaatcccactaaggtggtcgcagtcgattgtggcattaaaaacaacgttatcaggttgttggtaaaaaggggggccgaggtgcaccttgtgccatggaatcatgattttaccaaaatggaatatgatggtatactaattgctggaggccccgggaatcctgcactggcagaacctctgattcagaacgtgcgaaagatcctggaatctgatagaaaggagccactgttcggcatttccacagggaatctgatcaccggtttagccgccggagccaagacttacaagatgagcatggccaatcgaggtcagaatcagcccgtgctgaatataacaaacaagcaagctttcatcacagcgcagaatcacggctacgcattagacaatacactgcccgcgggttggaaacccctcttcgtgaacgtgaacgatcagacaaacgaggggattatgcacgagtcgaagcccttctttgccgtccagttccaccctgaggtgactcctggccccatagacacagagtatctgttcgactcttttttcagtctaattaaaaaaggcaaagccacaacaatcacctccgtgctgcctaaacctgctctagtagctagccgggttgaggtttccaaggtccttattcttggcagcggggggctaagtattggccaggccggggagtttgattatagcggcagtcaggccgtaaaggcaatgaaagaggagaacgtgaaaaccgtgctgatgaatccgaatatagcttctgtgcaaaccaacgaagttgggctgaagcaggcagatacggtatacttcctgcccatcaccccccagttcgttacagaagtcatcaaggctgagcagccagatggtctaatcctcggaatgggtgggcagacggcactcaattgtggggtggagttatttaaacgcggggtgctcaaggagtatggagtgaaggtccttgggacatcagtggaatctatcatggccacagaagataggcagctcttcagtgacaagcttaacgaaataaatgagaaaatagccccctcattcgctgttgaatctattgaagatgcgcttaaagccgccgatacaattggctaccccgtgatgatacggtcggcgtatgctctcgggggccttggttctggaatctgcccgaacagggaaaccctgatggaccttagtactaaagccttcgcaatgaccaaccaaatcttagtcgagaagagcgttacgggatggaaggaaattgagtacgaggttgttcgggacgccgacgataattgcgttacagtatgtaacatggagaatgtggatgccatgggtgtacatacgggagattctgtggtcgtcgcacccgcacagactctcagtaacgcagaattccagatgctacgaaggacatctattaacgtggtgcgccatttagggatagtgggtgagtgcaatatccagtttgcgcttcatcccactagcatggagtactgcattattgaggtgaacgcacgtctgagcaggtcgtctgcactcgccagtaaggccacgggctaccctcttgctttcatcgcagccaagatcgcactgggcatcccccttcctgaaatcaagaacgttgtctctggaaagacatccgcatgtttcgaaccatccctcgattatatggtgaccaagattcctcggtgggacctcgatcgctttcacggaacgtcctctcgtataggatcctctatgaaatctgtgggtgaagtgatggctatcggtaggacgtttgaggagtcatttcagaaagctctcagaatgtgtcaccccagtatcgaggggttcaccccacgtctgcccatgaacaaagaatggcctagtaacctcgaccttcgaaaagagttaagcgagccatcctcaacacgtatctatgcgattgccaaggccatcgacgataatatgtccctggatgagattgaaaagctgacttacatcgataaatggtttctgtacaaaatgcgggatatccttaatatggaaaagactctgaagggcctcaactcagagtcgatgacagaggagactctgaagcgcgctaaagaaatcggcttttcagacaaacagatcagcaagtgtctcggactgacagaggctcagacccgggagctgagattgaaaaaaaacatccacccctgggttaaacagattgacacactcgccgcggagtatccatccgtgacaaactacctttacgtgacatacaatggtcaagagcacgacgtgaattttgatgaccacggcatgatggtcctgggttgtggtccataccatatcggctcgagcgttgagtttgattggtgtgcagtcagttcaatacgcactctcagacagcttggcaagaagactgtcgtggtgaactgcaaccctgaaacagtgagcacggattttgacgaatgcgacaaactgtactttgaggagctgtccctggaacggatcctggacatataccatcaggaagcctgcggcggatgtattattagcgttggcggccagatcccaaacaatctcgcagtacccctttacaagaacggggtcaaaataatgggcacgtcccccctacagatagatagagcagaggatcggtcaattttttctgccgtgctcgacgagttgaaagtggcccaggccccctggaaggctgtcaacaccctaaacgaggcccttgagttcgctaagtcagttgattatccctgtctgctgcgcccttcatatgtcctgagcggttccgccatgaatgtcgtcttcagcgaagatgaaatgaagaaattcctggaagaggccacgagagtttcacaagaacatccagtggtgctaacgaaattcgtggaaggggctcgggaggtagagatggatgctgtcggaaaggacgggcgagtgatttcacatgccatttctgaacacgttgaggacgccggagtgcactcaggtgatgcgactttgatgctgcctacgcaaaccatcagccaaggcgcgattgagaaggtgaaggacgccaccaggaaaatcgcaaaagcgttcgcgatcagtgggccctttaatgtacaatttctggtgaaaggaaatgatgtgctggtgatcgagtgtaatctgcgcgcctcaaggtcatttcccttcgtctcgaagactttgggcgtcgattttatcgatgtggcaaccaaggtcatgatcggagaaaacgtagacgaaaagcatctcccaacattagatcaccccattatacccgcagactacgtcgcaatcaaagcacctatgttctcctggcctaggctgagagacgctgatcccattctccgctgcgagatggcttccaccggggaagtggcttgcttcggtgaagggatccacaccgcctttctgaaggcaatgttgtcaacaggtttcaaaatcccgcagaagggtattctgataggaatacagcagagtttcagaccacgttttctgggagtggccgagcaactgcataacgagggtttcaagctgtttgctactgaagccacctcagattggctaaacgctaacaatgtgcccgcaaccccggtcgcttggccaagtcaggaggggcagaatccgtccttaagctctatccgtaagctcatcagggacgggtcaattgatcttgtgatcaatcttccaaataataataccaaattcgtccacgataactacgtgatccgtcggacagctgttgattcgggaatacctctcctgacaaactttcaagtgactaaactgtttgccgaagccgtgcagaagagcaggaaagtggactccaaatcattgttccactatagacagtactctgcagggaaagcggcc

SEQ ID NO: 43485 - DNA, 4500 bp, Artificial Sequence
  derived and/or modified sequence
atgacaagaattcttactgcattcaaggttgtccggaccctcaaaactggctttggtttcactaatgtcaccgcacaccagaaatggaaattcagtagacccggtattagactgctgtcggtgaaagctcaaaccgctcatatagtgctggaggacggcacaaaaatgaagggatatagcttcggtcatccctcatctgtggctggggaggtcgtgtttaatactggcttaggcgggtaccccgaggctattacagatcccgcatacaaagggcaaatcttgacaatggccaaccctattatcggtaacggaggagcccctgatacaaccgctctcgatgagttgggtctgagtaagtacttagaaagcaacggcatcaaagtgtcagggttgcttgtgctggattacagcaaggactataaccattggctggccacaaagtctctagggcagtggctgcaggaggagaaagtccctgccatctacggtgtagatacgagaatgctgaccaagatcatcagagacaagggaacaatgctcggcaaaatagaattcgaaggacaaccggtggactttgtggatcctaataagcagaacctgattgctgaggtgtctaccaaagatgtgaaggtgtacgggaaggggaaccctaccaaagtagtagctgttgactgtggtattaaaaataatgttattaggctgctggtgaaacgtggagccgaggtgcacctggtcccctggaatcatgactttaccaaaatggaatatgacggtatcctgatcgctggcggccctggaaatccagctctcgccgagccactcattcagaacgtaaggaaaatactcgagagtgatcggaaggagcctttatttggaatatctacgggaaacctcattacaggcctggccgccggagctaagacatataaaatgtctatggcgaacagaggccagaaccagccggtactaaacatcactaacaagcaggcattcatcacagctcaaaatcatgggtacgccttagacaacacacttccagccggctggaaacccctgttcgtgaatgtgaatgaccagacgaacgaaggtatcatgcacgagtcaaagccctttttcgcggtccagttccaccctgaggtgacccccggccctatcgacacagaatatcttttcgacagcttttttagtctcatcaaaaagggaaaagcaactacaatcacgtcagtgctacccaagccagcactggtcgccagcagggttgaagtgtcaaaggtgctcatcctgggctccggcgggctgagcatcggccaggctggggagtttgattacagcggctctcaggcggtgaaagccatgaaggaagagaatgtgaaaacggttctcatgaatccgaatatagcttcagtacagacgaacgaagtgggacttaaacaggcagacacggtctacttcctgcccattaccccccagttcgtcacagaggtaattaaggcggagcagccagatggcttaatactgggaatgggcggtcagaccgccctcaattgtggggtggaactatttaagcgaggcgtacttaaggagtacggcgtgaaggtgctgggaacctcagtcgagtcgataatggcaacagaagacagacagcttttctcagataaattgaatgagattaacgagaaaattgctcccagcttcgccgtagagtccatcgaggacgctcttaaggcggcggatacaattggctatccagttatgattaggtcagcctacgctttgggcggattgggctcaggcatctgccccaatagagaaacgctgatggacttatctaccaaggcattcgccatgacgaatcaaattctggtcgagaagtccgtcaccggctggaaggaaatcgagtacgaagtcgtaagagacgcagacgataattgcgttacggtctgtaacatggagaacgtggatgccatgggagttcacactggggattccgtggtagtggcacccgctcagacactctctaacgctgaattccagatgttgaggaggacaagtatcaacgtcgtccgacacctgggcatagttggcgaatgcaatatccaattcgctctgcatcccacctctatggaatattgtataatcgaagtgaatgcgaggctcagcaggtcgtccgcactcgctagcaaagccaccggctaccccttagctttcatcgcagctaagatcgcgctcgggattcccctgcctgaaattaagaacgtggttagtgggaagacaagtgcatgtttcgagccctccctggattacatggtgacaaagattccaaggtgggatcttgataggttccatggtacctcttctagaattgggagttctatgaaatcggtaggggaagtaatggcaatcgggcgaacttttgaggaatcttttcaaaaggctctgcgcatgtgtcatccatccatcgaaggattcactccccgcttgccaatgaacaaagaatggccatctaatctggacctcaggaaagagctgtcagaaccgagcagcacccgcatttatgccatcgcaaaggcaattgacgacaatatgagtctcgacgaaattgaaaaattaacatacattgataagtggtttctatataagatgcgcgacatcctcaacatggagaagactctcaaggggctgaatagtgagtcaatgactgaagaaactcttaagcgagccaaggaaatcgggttttccgacaagcagataagtaagtgcctcggcctcaccgaggcccaaaccagggagctaaggcttaagaagaacatccatccatgggtgaagcagatagataccctggccgcagaatacccttccgtcaccaactacctgtatgtgacgtacaatggacaagaacacgatgtcaattttgatgatcacggcatgatggttctcggctgtgggccatatcacatcggcagctcggtggagttcgattggtgtgccgttagctcaatcagaaccctcagacagctaggtaagaaaaccgtggtcgtgaactgtaaccctgaaaccgtgtccactgatttcgatgaatgtgataagctttacttcgaagaactgagtttggagcgaatccttgacatttaccaccaggaagcttgtggcggttgcatcatctccgtgggcgggcagattcccaacaaccttgctgtccccttatataagaatggggtgaagataatggggacctcacctctgcaaatcgacagagcagaagaccggagtatattcagcgcagtgttggatgaactgaaagtggctcaggccccttggaaggctgtgaatactctcaatgaagcgctggagttcgccaagtcagtggactacccatgcctgctgcgaccatcttatgtgctgtcaggatccgccatgaacgtcgtgttttctgaggacgagatgaaaaaatttctggaggaagccacccgagtaagccaagagcaccctgttgtgctaacaaaatttgtggagggtgctagggaagtggagatggacgctgttggtaaagatggaagagttatatcccacgctattagtgagcatgtcgaagacgccggcgtacattcaggggatgccaccctgatgcttccaacccaaaccattagccagggcgcgatcgagaaggtgaaggacgctaccagaaagatcgctaaggccttcgcaatttctgggccgtttaacgtgcaatttttggtcaagggaaatgacgtgctggtaatcgagtgtaacctgcgagcatcacgttcgttcccatttgtatctaaaactctgggtgtcgactttatcgatgtggcaaccaaagtgatgatcggagaaaacgtggatgagaagcatctgcccacgcttgaccacccaatcattccggccgactatgtcgccatcaaagcgcctatgttctcctggccgcggctgcgtgatgcagatccgattctgcgctgtgagatggcgtctaccggcgaggtggcatgtttcggcgaaggtatccacactgccttcctcaaagccatgctgtcaaccggttttaaaatcccacagaagggaattttgatcggaatccagcaaagcttcagaccacgattcctcggcgtcgccgaacagctccataacgaagggttcaaactgttcgcgacagaggctacatctgattggctgaatgccaacaacgtacctgcaaccccggtggcctggccatctcaggagggacaaaatcctagtttatcttctatcagaaaactgataagagacggtagcatcgatctggttatcaacctgcccaataataatactaagttcgtccatgataattatgtgatacggaggacagctgtggattctggaatccccctcctgacgaattttcaggttactaagctgtttgcagaggcagtccagaaatctagaaaggtggactctaagagcctgttccattacaggcagtattccgcaggcaaagccgct

SEQ ID NO: 43486 - DNA, 4500 bp, Artificial Sequence
  derived and/or modified sequence
atgactcgtattctcaccgcctttaaagtggtgcgcaccctcaagactgggttcggatttaccaacgtcaccgcacaccaaaaatggaaattcagccgtccaggcataaggcttctgtcggtgaaggcgcagactgcacacattgtgctggaggatggcaccaagatgaagggttacagcttcggacatccctcatccgtggctggtgaagttgtgttcaataccggccttggggggtacccagaggcaatcactgatcccgcatacaagggacagatccttactatggcaaaccccataatcggtaatggtggggcacctgatactaccgcacttgatgaactgggactttcgaaataccttgagtccaacggcatcaaagtgtccggactgctcgtccttgactactcgaaggactataaccattggcttgcgactaaatccttgggtcaatggctgcaagaggaaaaggtccccgcgatttatggagttgatacccggatgcttactaagattattcgagacaagggcaccatgctgggaaagattgaatttgagggccaaccagtcgactttgtggatccgaataagcaaaacctgatagccgaggtgagcactaaggacgtcaaagtgtacggtaagggaaatcctaccaaggtcgtggccgtcgattgtggtattaagaacaacgtgattcgactgcttgtcaagcgcggggcagaagtgcacctcgtcccttggaaccatgattttaccaagatggagtacgatggtattctcattgccggtggacccggcaaccccgcattggcagaaccactgatccagaatgtgcgcaagatccttgaatccgacagaaaggagcctctgtttggtatttccaccggaaaccttattacgggtctggcagcaggggcaaagacttacaagatgtccatggcaaatcggggtcaaaatcagccggtgctgaacattacgaataaacaagcgttcattacggctcaaaaccacggttacgccctggacaatactctgccagcaggctggaagccactttttgtgaacgtcaacgaccaaactaacgagggaattatgcatgagtccaagccatttttcgctgtgcaattccaccctgaggtgactccaggtccaatagataccgaatacttgtttgattccttcttctcactcataaagaaaggtaaagccactaccattacttcggtgctgcctaagccagctcttgtggcctcgcgtgtggaagtgtcgaaagtccttattctgggatcgggcggtctgagcattggccaggcgggagagtttgattacagcggctcccaagcagtgaaggccatgaaggaagaaaacgtcaagactgtcctgatgaacccaaacatcgcatccgtgcaaaccaatgaagtgggtcttaaacaagcagataccgtgtacttcctgcctattactccccaatttgtgaccgaagtgatcaaagcagaacaacctgatggtttgatactcggtatgggaggccagactgcactgaactgcggagtggaacttttcaagaggggagtgcttaaggagtatggagtcaaggtgctgggaacgtccgtggagtccattatggcgactgaggatagacagctgttttcagataagctgaatgagattaatgagaagatagcaccatcatttgcagtggagtcgatagaagatgctctcaaagcagcggacacgatcggctacccagtgatgattcgcagcgcatacgcacttggtggtcttggatctggcatttgtccaaaccgcgaaaccctgatggatctgtctacgaaggcctttgcaatgacgaaccaaatcctggtcgagaagtccgtgactggatggaaggaaattgaatacgaggtggtgcgcgacgcggatgacaactgtgtgaccgtgtgtaatatggagaatgtcgatgccatgggtgtgcacacgggcgattcagtcgtcgtggcacctgcccaaacccttagcaacgcagaatttcaaatgcttcgcagaacttcgattaacgtggtgcgtcaccttggcattgtcggcgagtgtaacattcagttcgcattgcacccaacctccatggaatactgcatcatcgaggtgaacgcccggctctcgagatccagcgccctggcatccaaggcgaccggataccctcttgcattcatcgcggccaagatagcgcttggaattcccctccctgagattaagaacgtggtgtcgggtaagacctcagcgtgtttcgagccctcacttgattacatggtgaccaaaattccgagatgggatctggaccgctttcatggcacttcatctcgaattgggtccagcatgaagtccgtcggtgaggtcatggccattggccgtacttttgaggaatcatttcaaaaagctctgcggatgtgccatccctcaatagaaggttttacccctagactccctatgaacaaagaatggccatctaatctcgatctgagaaaggaactctcagagccaagcagcacccgcatttacgcaattgccaaagccatcgacgataacatgtcccttgacgagattgagaagttgacttacattgacaagtggtttctttacaagatgcgggacattctgaacatggaaaagaccctgaaggggctgaactcggaatccatgactgaagagactcttaagcgggcaaaggaaatcggcttttcggataaacaaattagcaaatgtctgggcttgaccgaagcacaaactcgggagcttcgcctgaagaagaatatccatccgtgggtgaagcaaatcgacacgctcgcggcggagtacccgtccgtgaccaactatctttacgtgacgtacaacggacaggaacatgatgtgaattttgatgatcatggaatgatggttctgggttgtggtccttaccatattgggtcaagcgtcgagttcgactggtgtgcagtgtcgtcgattcggaccctgaggcagctgggaaagaaaactgtggtcgttaattgtaacccagagactgtctcgaccgattttgacgaatgtgacaagctgtactttgaagagctgtccttggaacgaatcctggacatttaccatcaagaggcatgtggcggatgtataatcagcgtgggaggtcaaattccaaataaccttgccgtgcctttgtacaagaacggagtgaagataatgggaacgtcaccgcttcagattgatagagcagaggatcgctcgattttctcggcagtcctcgatgaactgaaagtggcgcaagcaccttggaaggcagtgaacactcttaacgaggcactggaatttgccaagtcagtcgattacccttgtctcctgcggccttcgtacgtcctttccggatcggcgatgaacgtggtgttctccgaggatgaaatgaagaaattcctggaagaggcgactcgagtatcccaagaacaccctgttgtgcttaccaaatttgtcgaaggcgcacgggaagtggaaatggacgccgtgggaaaggatggtagggtcatttcacatgcgatctccgaacacgtggaagatgccggagtgcattcgggggatgccactttgatgctccctactcaaactatttcacagggcgctatcgagaaggtgaaggacgcaaccaggaagattgctaaggcgtttgcaatttcaggcccctttaatgtgcagttccttgtgaagggtaacgacgtgctcgttattgaatgcaaccttagggcaagccgctcgttccctttcgtgtccaagactctcggagtggactttattgatgtggcaacgaaagtgatgatcggggaaaacgttgatgaaaagcatctgccaaccctcgatcatccgattatcccggcagattacgtggcaattaaggcacctatgttctcatggccccgcttgagagacgcagatccgatacttaggtgcgaaatggcaagcaccggagaggttgcttgtttcggtgaaggtattcatactgcttttctgaaggcaatgttgtccaccgggttcaaaatacctcaaaagggtatacttataggtatccaacagagcttccgcccccgctttttgggtgtggcggagcagcttcacaatgaaggattcaaactgttcgcaaccgaagccacctcggactggctcaatgcaaacaatgttcctgcaacgcccgtggcctggccatcccaggaaggtcagaacccatctcttagcagcatcagaaagctgatacgagatggttcaatagacctggtcatcaatctcccaaacaataacaccaagtttgtgcatgacaactacgtgattcgccggactgccgtggacagcggtattcctcttcttacgaattttcaggttaccaagctgtttgccgaagctgtgcagaagtcgagaaaggtcgattcgaagtccctttttcactacagacagtactctgcgggcaaggccgca

SEQ ID NO: 43487 - DNA, 4500 bp, Artificial Sequence
  derived and/or modified sequence
atgacgcggattctcactgccttcaaggttgttaggacattgaaaaccgggtttggctttactaatgtcactgcccaccaaaagtggaagtttagccgacccgggattagactgttatccgtaaaggctcaaacggctcatattgtattggaagacggaacaaaaatgaaaggctatagcttcggccatcctagttccgtggcgggggaggtggtgttcaataccggcctcggtgggtacccggaagccatcaccgaccccgcatacaagggacaaattttaactatggccaaccctatcatcgggaacggaggcgctccggataccacggcgctggatgaactcgggctttctaagtatctcgaatccaacggcataaaagtgagtggtctactagttctcgactattctaaggactacaatcattggttagcgactaaaagtctcgggcaatggctgcaggaggagaaagtcccggccatatacggcgtcgataccagaatgctgactaagatcataagagacaagggaaccatgttaggaaagatcgaattcgagggtcagcccgtcgatttcgtggacccaaataagcaaaatctgatcgccgaggtatctacgaaggacgttaaagtatatggaaaagggaatcctactaaggtggttgcagtcgattgcggcatcaagaacaacgtgattcggctgctggtgaaacgaggcgccgaggtgcatctggtgccatggaaccacgactttaccaagatggaatatgacggaattctgatcgccggagggccggggaaccccgctctggccgagcccttgattcagaacgttcgaaagatattggagtcggaccggaaagagccattgtttggaatctctacgggcaatctgatcactggtttggcggcgggcgccaagacctataaaatgtcaatggctaacagagggcagaatcagcccgtgctcaatattaccaacaagcaagccttcataacggcgcagaatcacggatacgctcttgacaacacactacctgccgggtggaagcctctgttcgtgaacgtgaatgatcagaccaatgaaggcatcatgcatgagtccaaacctttcttcgcggtgcagtttcacccagaggtcacccctggtcctatcgacactgaatacttatttgactctttcttctctttgatcaagaaaggaaaggctacgaccattacatcagttctgccaaagcctgccctggtagcttctcgcgtggaggttagtaaggtcctgattctgggctcgggcgggctatccataggccaggcgggcgagttcgattattctgggagccaggcggtgaaagcaatgaaggaggaaaacgtaaaaaccgtccttatgaatcctaatatcgcgtccgttcaaactaatgaagtgggcctgaagcaggcagacaccgtatacttcctgcccatcacaccacagttcgtgaccgaggttattaaagccgaacagcctgacggcctcatcctagggatgggaggtcaaacagcactcaactgcggcgtggagttgttcaaaagaggggtgctaaaagagtacggcgtgaaggtgttgggcacctccgtcgagtccatcatggcgactgaggaccgacagctcttctcggataaactgaatgaaatcaatgaaaaaatcgctcctagcttcgcagtggagtccattgaggacgcccttaaggccgccgatacaatcgggtacccagtgatgattagatctgcttacgcccttggcgggttgggaagcggcatatgccctaatcgggagacactcatggacttatccaccaaggccttcgccatgacaaatcagattctggtggagaagtcagtgactggttggaaggagatagagtatgaagtggtgcgggatgcggacgacaactgcgttacggtctgcaatatggagaatgtggatgccatgggtgtgcacacgggggactctgttgtagttgctcccgctcagacgctgagcaatgcagagtttcagatgctacggcgtactagcattaacgtggtacgccacttgggcatagttggcgagtgcaacattcagttcgcgctgcaccctacttctatggagtattgtatcatcgaagtaaacgcaaggctgtcacgctctagcgcattagcttctaaggctacagggtacccccttgcttttattgccgccaagattgcactcggcatacctctgccagagataaaaaacgtggtcagtggaaaaacaagtgcttgctttgaacctagcctggactatatggtcaccaaaatcccccggtgggacctcgacagattccatggcactagttcccggatcggttcctcaatgaagagcgtgggagaagttatggccatcggacgaaccttcgaggagtccttccagaaagccctgcgtatgtgccacccttcgatcgagggatttacacctaggctgccgatgaacaaagagtggccaagcaacctggacctgcggaaggagctttccgaacctagcagcacgaggatatacgctatcgccaaagccatcgatgataacatgtcgctggatgaaatcgagaaactaacctatatcgacaagtggttcctgtataagatgcgggatatactcaacatggaaaagactcttaaggggctgaactcagagtctatgactgaggagacattgaaaagggcaaaggagattggattctcagacaagcagatctctaaatgtctgggtttgacagaggctcagactcgcgagctacgattgaaaaaaaatattcatccttgggtgaaacagatcgatacactggctgccgaatacccatctgtcaccaactatctatacgtgacgtataacggacaagaacacgacgtaaattttgatgatcatggcatgatggtgttgggttgtggtccataccatatcggaagcagcgtagaattcgactggtgcgccgtgtcctctattaggactctgcgccagttgggtaaaaagacagtggttgtcaactgcaaccccgaaaccgtctctactgattttgacgagtgtgataaactttacttcgaagagctctcactggagagaatcctcgacatataccatcaggaagcctgcgggggctgcattatatccgtcggtggtcagatccctaataacctggctgtacctctatataaaaatggcgtcaaaattatgggtacatcaccactgcaaattgatcgcgcagaagataggagtatcttctcagcagtgctagatgaactaaaggtggcacaggccccatggaaggcggtgaatacgctaaatgaagctcttgaattcgccaaaagtgttgactacccatgcttgctccgtccatcctatgtgctgtctggctccgccatgaatgtggttttctctgaggacgagatgaagaagtttctcgaggaagccacgagggtgagccaagaacatcctgtggttctcactaaattcgtagagggcgcccgtgaagtagagatggacgccgttggcaaagatggacgggttatctcccatgcaatttctgaacatgttgaagacgcaggagttcactctggtgatgccaccttaatgctcccgacacagacgatcagccagggggctatcgagaaggtcaaagacgctacacgcaagattgcgaaggcttttgcaatcagcggaccattcaatgtgcaattcctggttaagggcaatgacgttctggttatcgaatgcaatctcagagcgtctagaagttttcctttcgtcagtaaaacattgggagtagacttcatagatgtggcaaccaaggtgatgatcggagaaaacgtggatgaaaagcacctgccaacacttgatcaccccattattccagctgactacgtggccattaaggctcctatgttttcctggcccaggttacgcgacgctgaccctattctgaggtgtgaaatggcaagtactggagaggtggcttgctttggggagggcattcacaccgcatttcttaaagctatgctgagcaccggcttcaaaatcccacagaagggcatcctgatcggtatacagcagtcatttagacccagattccttggagtggctgaacaactgcacaacgaaggattcaagctgtttgccaccgaggccacttccgactggctcaacgccaacaatgtgcctgctaccccagtcgcatggccttctcaggagggtcagaatccctccctttcctcaatacggaagctgatccgggacggcagtatagaccttgtcatcaacctgccaaataataatacgaagttcgtgcatgacaactacgtgattaggcggacagctgtggacagcggcatcccgttgcttacaaactttcaggttaccaaactgttcgctgaggcagtgcaaaagagcaggaaggtggacagtaaatctttatttcattataggcaatattcagccggcaaagccgct

SEQ ID NO: 43488 - DNA, 4500 bp, Artificial Sequence
  derived and/or modified sequence
atgactagaatcctcactgccttcaaggtggtgcgaactcttaagaccggatttggattcactaatgtgaccgcacaccagaaatggaagttcagcagacctggtataagactcctgtccgtcaaagcacaaaccgcccatattgtgctcgaagatggcacgaagatgaaaggctactcgtttggtcatccatcatcagtggcaggtgaagtggtgttcaatactggtcttggaggataccctgaagcgattactgaccctgcctacaagggacaaattctgacgatggcgaatccgatcatcggcaatggtggagcccctgataccactgcccttgatgaacttgggctgtcgaaataccttgagtcgaatgggatcaaggtgagcggtctgcttgtgctggattactcaaaggactacaatcactggctggcgaccaaatcgctgggccaatggctgcaggaggaaaaggtcccggcaatttacggtgtggatactagaatgctgaccaagattattcgcgataagggaacgatgctggggaagatcgaatttgagggtcaaccggtggattttgtggatccgaacaagcagaacttgatcgccgaggtgtctactaaagacgtcaaagtgtacgggaagggcaaccctaccaaggtggtggcagtggattgcggaatcaaaaacaacgtcatccgcctcctggtgaagaggggcgccgaagtgcatctcgtgccgtggaaccatgacttcactaagatggagtacgacggtatccttatcgcaggcggccctggcaaccctgctctcgcagagcctcttatccaaaatgtgcgaaagattctggaatccgataggaaagaaccattgttcgggatttcaactggtaacctgattacggggcttgcagcaggtgcaaagacctataagatgtcaatggctaaccgtggtcaaaaccagccagtcctgaacattactaataagcaagcatttatcaccgcacagaaccacggttacgcccttgataacaccctgccagccggatggaagcccctctttgtgaacgttaatgaccaaaccaacgaaggtatcatgcatgaatcgaagccttttttcgcagtgcagttccatcccgaagtcactcccgggcctattgataccgagtacctcttcgattcctttttcagcctcattaagaagggtaaggcaactacgataacttcagtcctccccaagccagcattggtggcatctcgagtggaggtttccaaagtcctgatactcggctccggtggcctgtcgatcgggcaagccggcgaattcgattactctggatcccaagcagtcaaggcgatgaaagaggagaacgtgaaaaccgtgttgatgaacccaaacattgcatccgtgcagactaacgaagtggggctgaagcaagcagacaccgtctatttcttgccgatcactccacaatttgtcactgaggtgattaaggcagagcaaccagacggtctgatccttggtatgggtggccagactgctcttaactgcggggtggaactgtttaagcgtggggtccttaaagaatacggggtgaaggtgctggggacgagcgtggaatcaattatggcaaccgaggatcgccagcttttctcggataagttgaatgagatcaacgagaaaattgcgccatccttcgctgtggagtcgattgaagatgcactgaaagcagccgacactattggatacccagtcatgattaggtccgcatacgcacttggaggcctgggatccggcatttgtcctaaccgggaaactctcatggacctgtcaactaaagcatttgccatgactaaccagattctggtggaaaagtcggtcaccggatggaaagaaattgaatacgaagtggttcgtgacgccgacgacaactgtgtgaccgtgtgtaacatggaaaacgtcgacgcgatgggagtccacaccggagactcagtggtggtcgcgcccgcacagactctttcaaatgctgaatttcagatgctgagacggacgtcgattaacgtggtcaggcatctgggcatcgtcggagagtgcaatattcaatttgctctccatcctacctctatggaatactgtatcattgaagtcaacgccagactgtcccggtctagcgcactcgctagcaaagcaactggttaccccctggccttcatcgcagctaagattgctcttggaattccactgcccgaaatcaagaacgtggtgtccggcaagacctcagcttgttttgaaccctcgttggattacatggtcactaagatcccacggtgggacttggatcgttttcacggcacctcgtcccgcataggaagctctatgaaatccgtgggtgaagttatggcaattgggaggacttttgaagaatcatttcaaaaggccctccgaatgtgtcacccctcgatagaaggatttactccaagactcccgatgaataaggaatggcccagcaacctggatcttaggaaagaactgagcgagccctcaagcactaggatatacgccatagctaaggcaatcgatgataacatgtccctcgacgagattgaaaagttgacctatattgataagtggtttctgtacaagatgcgggatatcctgaatatggagaaaactctcaagggacttaattcggagtccatgactgaagaaactctcaagcgggcaaaggagattggtttttcggacaaacaaatcagcaaatgtctgggcctgaccgaggcacagacccgggaacttcgcctcaagaaaaacattcatccttgggtgaagcagattgacactctcgccgcggaatatccgtccgtgacgaattacctgtatgtgacgtacaatggtcaggaacatgacgtgaattttgatgatcatggaatgatggttcttgggtgtggtccttaccatatcggaagctctgtggaatttgattggtgtgcggtttcatcgataagaaccctgcggcaactgggtaaaaagaccgtcgtggtgaattgtaatccggagactgtctccaccgatttcgatgagtgcgacaagctctactttgaggagctcagcctcgagagaatccttgatatctaccaccaggaagcatgcggaggatgcatcatttctgtcggtggccaaattcctaacaatctggccgtccctctgtacaaaaacggcgtcaagatcatgggaaccagcccactgcagattgatagagctgaggataggagcatattctcggccgtgttggatgaacttaaggtggcacaggctccttggaaagcagtgaacaccctgaacgaggctctggaatttgcaaagtccgtggactacccttgtctgctcagaccttcatacgtgttgtcagggagcgcgatgaacgtcgtcttttccgaagatgagatgaagaagttcttggaagaagcaacccgtgtctcacaagagcatcctgtggtgctgaccaagtttgtcgagggcgcacgcgaagtggagatggatgcagtgggaaaggacggacgcgtcatttcgcatgcaatctccgaacatgtcgaagatgcaggagtccactccggggatgccactctgatgctgcctactcagaccatttcgcaaggggcaattgaaaaggtcaaggatgcgactcgcaagattgcgaaggcgtttgcgatctcgggccctttcaacgtccagtttctggtcaaaggaaacgacgttctggtcattgaatgtaacttgagggctagcagatcatttccctttgtctccaagactcttggagtggactttatagacgtggcgaccaaggtgatgattggtgagaacgttgatgagaaacatcttccaacgctggaccatcccataatcccggcggattacgtggccatcaaggcacctatgttctcgtggcccaggcttagggatgcggacccaattcttcgttgcgagatggcatccaccggtgaagtcgcctgttttggtgaaggtatccataccgcatttctcaaagccatgctttcgactggatttaagatcccccaaaagggcatactgattggtatacaacaatcatttcgacctcggttcctgggcgtcgctgaacaacttcataacgaggggttcaagctgtttgcaaccgaagccacttcagactggcttaatgcaaacaatgtgccagcgaccccagttgcatggccctcacaagaaggtcagaatccatccctcagctcaattagaaaacttattcgggatggatcaatcgatctcgtcataaatctgcccaataacaatacgaagttcgtgcacgataactacgtcattcgcagaaccgccgtggattcaggaattcccctgttgacgaacttccaagtgaccaagctctttgccgaagcggtgcaaaaatccagaaaggtggactcgaagtccctcttccattatcgccagtacagcgcaggtaaggcagcc

SEQ ID NO: 43489 - DNA, 4500 bp, Artificial Sequence
  derived and/or modified sequence
atgacccgcatactcactgcatttaaggtggttagaaccctcaaaaccggattcggtttcaccaacgtgaccgcacaccagaagtggaagttttcacggcctggaatccgccttttgtccgtgaaggcacaaaccgcccatattgtcctggaggacggcaccaagatgaagggttactcgtttgggcatccgagctcagtcgcaggcgaagtcgtgtttaacactgggctgggagggtaccctgaggcgattactgaccctgcgtacaaaggacagatcctcactatggctaaccccattatcggcaacgggggagcccctgataccactgcgctggatgagctgggactctcaaagtaccttgagtcgaatggtattaaggtgtccggactccttgtgctcgattacagtaaagattacaaccactggctcgcgacgaagagcctgggtcaatggcttcaggaggaaaaggtgcccgcaatttacggagtcgacaccaggatgctcaccaagattatcagagacaaggggaccatgctcggtaaaatcgagtttgagggtcagcctgttgactttgttgacccgaacaagcaaaaccttattgccgaggtgtccactaaagatgtcaaggtgtacggtaagggcaaccctaccaaggtggtggcggttgattgtggcattaagaataatgtgatacggcttctcgtgaaacggggagcagaagtccatcttgtgccctggaatcatgactttactaaaatggagtacgacggcatcctgatagcaggggggcctggtaatcccgcactcgccgaaccacttatccagaatgtgcgcaagatacttgagtccgatagaaaggaacctctgttcggaattagcactggcaacctgattacgggacttgcagccggtgcaaaaacctacaagatgtccatggcaaacagaggtcagaaccagccagtgctcaatatcactaataagcaggcattcatcaccgctcaaaatcatggctacgccctggataacactctgcccgccggttggaagccactctttgtgaacgtgaacgatcaaaccaatgaaggcattatgcatgaatcaaaacctttcttcgctgtgcaatttcaccccgaagtgaccccagggccaatcgataccgaatacctttttgatagcttcttttcgctgataaagaaaggaaaggcgaccacgattacctcggtgctccctaagcctgcactggtcgcgtcccgcgtcgaggtgagcaaggtcctgatactcggttcaggtggattgagcataggacaagcaggtgaatttgactactcagggtcgcaagcagtgaaggcgatgaaggaggagaacgtaaagactgtcctgatgaatcccaatattgcctcagtgcaaactaacgaagtgggactgaagcaggcagatactgtgtattttctgcctattacgccacaatttgtgaccgaagtgattaaagcagagcaacctgacggccttatactgggaatgggagggcagactgcgcttaattgcggtgtggaactctttaagcgtggagtcctcaaggagtacggtgtcaaggtccttggaacctcggtggaatccatcatggcaaccgaagatagacaactcttcagcgataagctgaatgagattaacgagaagatcgcaccttcgtttgcagtggagtcgatcgaagatgcattgaaggcagcggatactatcggataccccgtcatgattaggtcggcatacgcacttggcggccttggttcggggatctgtcctaacagagaaaccctgatggatctctcgactaaggctttcgcgatgaccaaccaaattcttgtggaaaagagtgtgaccggatggaaggagattgaatacgaggtggtgcgcgacgcagatgacaattgcgtgactgtctgcaatatggaaaacgtcgatgcaatgggcgtgcacaccggcgactcagtggtcgtggcaccggcacagaccctttcgaacgccgagttccaaatgctgaggaggaccagcataaatgtggtcagacatctgggtattgtcggcgagtgtaacatccagtttgcactccaccccacctcaatggaatactgcatcatagaagtcaacgccaggctctcccgctcgtctgccctggcgtcaaaggctactggttaccctcttgcattcattgcggccaagattgcactcggcatcccccttccggaaatcaagaacgtcgtctcggggaaaaccagcgcctgctttgagcctagccttgattacatggtgactaagatccctaggtgggacctggacaggttccacggcacgtcctcccggataggcagcagcatgaagtccgtgggtgaagtgatggcaatcgggcggaccttcgaagaatcctttcagaaggccctgcgcatgtgtcatccttcaatcgagggatttaccccgcggcttccaatgaacaaggaatggccaagcaacctggatctgcggaaggagctgtccgaaccatcttccaccagaatttacgcaattgcaaaggcaatagatgacaacatgtcgctggatgaaatcgaaaagctcacctacattgataagtggtttctgtataagatgagggacattctgaacatggaaaagacgctcaaaggccttaattccgaaagtatgaccgaagaaactcttaaacgcgcgaaagaaattggtttctcggacaaacagatttccaaatgtctgggcctgactgaagcacagactagagagttgcggttgaagaagaatatccatccctgggtgaagcaaatcgatactctggcggccgaatacccctcagtgactaattacctttacgtgacctacaatggacaagagcacgacgtcaacttcgacgatcacggcatgatggtgttgggatgtggaccttatcacattggctcgtcggtggaattcgattggtgtgccgtgtcgagcatccgtaccttgagacaactcggtaagaaaaccgtggtggtgaattgtaaccccgaaactgtctcgaccgattttgatgagtgcgataaactttacttcgaggagctttcgctggaacgcatccttgacatatatcaccaagaagcatgtggcgggtgtattatctcggtgggtggtcagattcccaacaacctggccgtgcctctctacaagaatggagtaaagattatggggacttcgccccttcaaattgatcgggcagaagatcgatccattttctcggcagtcctggatgaactgaaggtcgcacaagcaccatggaaggcggtgaataccttgaacgaagcactggagtttgcaaaatcggtggattatccctgtctcctcaggccttcatacgtcctttcgggatcagcgatgaatgttgtgttctcggaagatgagatgaaaaagtttctggaggaggcgacccgagtgtcgcaggaacatccagtggtcctgacgaagttcgtggaaggagcacgggaagtcgaaatggatgctgtgggaaaggatgggcgggtgatcagccacgctatcagcgagcatgtggaggatgcaggggtccattccggagatgcaacgcttatgctcccaacccagacgatttcacagggggccattgaaaaagtcaaggatgccactcgaaagattgctaaagcattcgccattagcggcccttttaacgtgcaatttctggtgaagggcaacgatgtgcttgtgattgagtgtaatcttcgtgcctccagatctttcccgtttgtgtcgaaaacgctcggcgtggactttatcgatgtggcaaccaaagtcatgataggcgagaatgtggatgaaaagcatcttcccactcttgatcatccaataatcccggcagattacgttgcaatcaaagctcctatgttttcttggcctcgcctgcgggacgcggatccaatcctgcggtgtgaaatggcgtcgaccggtgaagtggcatgttttggagagggtatccatactgcattcctgaaagcaatgctttccacgggattcaagatcccacagaagggaattctgattggtatccagcagagctttagaccaaggttcctgggtgtggcagaacaactgcataatgaaggattcaagctgttcgcaaccgaagcaacctcagattggcttaacgcaaataacgtgccagcaactcccgtcgcatggccatcgcaggaaggacagaatccgtcccttagctccattagaaaacttattagagatggatcgattgaccttgtgataaatcttcctaacaacaacaccaagtttgtccacgacaactacgtgatccgacgcaccgcggttgattcaggaattcctcttcttaccaactttcaagtcacgaaactgtttgcggaggcagtgcagaagtcaagaaaagtggactccaaatcactgtttcattacagacagtactccgccgggaaagcagcg

SEQ ID NO: 43490 - DNA, 4500 bp, Artificial Sequence
  derived and/or modified sequence
atgacccggatcctgacggcgttcaaggtcgtccggacccttaaaactggctttggtttcaccaacgtcactgcgcatcagaaatggaagttttcgcggccggggatccggctgctgtctgtgaaggcgcaaactgctcatatcgtgttggaggacggaaccaagatgaaaggttactcgtttggacacccatcgtcggtcgcaggtgaagtggtgttcaacaccggactgggtggataccctgaagccatcactgatccggcttacaaggggcaaatcctgaccatggccaacccgatcattggaaatggaggagccccggacactactgcactcgacgagctggggctctctaagtacctggagtccaacggaatcaaggtgtccgggcttctggtgctggattacagcaaggattacaaccactggcttgcgacgaagagcttgggacagtggctccaagaagaaaaagtgccggccatctacggagtcgatacccgcatgctcactaagatcatccgggataagggcaccatgttgggcaagatcgagtttgaaggacagccggttgatttcgtggacccgaacaagcagaatctcatcgccgaagtgtcgactaaggacgtcaaggtttacgggaagggaaacccgacgaaagtggtggctgtggattgcggaatcaaaaacaacgtgatccgcctgcttgtgaagcgcggcgccgaagtgcacctggtgccgtggaaccacgactttaccaagatggaatacgatggtatcttgattgcgggaggaccaggaaacccagctttggccgaaccacttatccaaaacgtgcgcaagatcctcgagagcgaccgcaaagaacctttgtttggcatctccactggtaatctgattactgggctggcggcgggagccaagacctataagatgagcatggccaaccgcggacagaatcaaccagtgctgaatatcaccaataagcaagccttcatcaccgcccaaaatcatggttacgcgctggacaacacgctccctgcggggtggaagccgcttttcgtgaacgtcaatgaccagaccaacgaaggaattatgcacgaatccaagcccttcttcgcggtgcagtttcaccctgaggtgactccgggcccgattgacactgaatacctgttcgactctttcttttcgctcatcaaaaagggcaaggcaactacgataactagcgtgttgccaaagccggcgcttgttgcatcccgggtagaggtgagcaaagtgctgatcctgggaagcggaggattgtcgatcggtcaggcaggagagttcgactacagcggatcccaggccgtgaaagctatgaaggaggaaaacgtaaagactgtgctcatgaaccccaacatcgcctcggtgcaaactaatgaagtcggcctgaagcaagcagacactgtgtatttcctgccgatcactcctcagttcgtgaccgaggttatcaaggccgaacagccggatgggcttatcctgggaatgggaggtcaaaccgctctcaactgcggtgtcgaactgttcaaaaggggagtcctgaaagagtacggagtgaaggtgctgggcacttcggtggaatccatcatggccaccgaagatcgacaactgttctcggacaagctcaatgagatcaacgagaagatcgcgccttcattcgccgtggaatcaatcgaagatgctctgaaggctgctgacaccatcggttacccggtgatgattcggtcagcctacgccctgggtggcctgggctcggggatttgtccaaaccgggagactctgatggaccttagcactaaagcctttgccatgacgaaccagatcttggtcgaaaagtcagtcaccggctggaaagaaattgagtacgaagtggttcgcgatgcagacgataattgcgtcaccgtgtgcaatatggagaacgtggacgctatgggcgtgcacaccggagactccgtggttgtggcaccggcacagaccctttctaacgctgaattccagatgctgcgccgcacttccatcaacgtggtccgccatctgggaatcgtgggtgagtgcaatatccagtttgcactgcatcccacgtccatggaatactgcatcatcgaagtgaatgcaagactgtcgcgcagcagcgctctggccagcaaggcgaccgggtaccctctcgccttcatcgcggcgaagatagcactgggcatccccctgccagaaatcaaaaacgtggtgtcgggaaaaacctcggcttgtttcgagccatcactggactacatggtgaccaagatcccaagatgggacctggatagattccatggaacctcgtcaagaatcggatcgtcgatgaagtccgtgggcgaagtcatggccatcggacggactttcgaggaatccttccagaaggctctgcgcatgtgccatccgtcgatcgagggcttcactccccgccttccgatgaataaggaatggcctagcaatctcgatctgcgcaaggaactctcagagccgtcgtccacccgcatctacgccattgcgaaggcaatcgacgacaatatgagcctcgacgaaatcgaaaagctcacttatatcgacaagtggttcctgtacaagatgcgggatatcttgaatatggaaaagacgctgaagggactgaactcggagagcatgactgaagaaaccctgaaacgcgccaaagagatcggtttttcggataagcagatctctaaatgtctggggctcactgaggcccagactcgcgagctgcggcttaagaagaacattcatccttgggtgaaacaaatcgacactttggcggcggagtacccgagcgtgactaactacctgtacgtgacttacaatggccaggagcacgatgtgaacttcgacgatcacggaatgatggtgctcggatgtggaccgtaccacatcggctcctccgtggagttcgattggtgcgcggtcagtagcatccgcaccctgcggcagctgggaaagaaaactgtcgtggtgaattgtaatccggaaacggtgtcgactgattttgatgagtgtgacaagctgtatttcgaagagctgtccctcgaacgcatcctggacatctaccaccaggaagcgtgcgggggatgcatcatctcagtcggaggacagattccgaacaatctggctgttccattgtacaagaacggagtaaagatcatgggaactagccccctgcaaatcgaccgggctgaggaccgctcgatcttcagcgccgtgctggacgaactcaaggtggctcaggccccgtggaaggccgtgaacaccctcaacgaggccctcgaattcgccaaatcggttgattacccgtgcctcctcaggccctcctacgtgctgtcgggatctgcgatgaacgttgtgttctctgaagatgaaatgaagaaattcctggaagaggcaacgcgtgtgagtcaggaacatccagtggtactgactaaattcgtggagggagccagagaagtggagatggatgcggtcggaaaggatggacgagtgatctcacacgccatctccgaacacgtcgaggatgctggggtccattccggagatgctaccctgatgctgccaactcaaactatctcacaaggagccatcgaaaaggtgaaagacgccactcgcaagattgcaaaggcttttgccatcagcggaccgttcaacgtccagttcctggtgaaggggaatgacgtgctggttatcgagtgcaatctgagggcgtcgcggagcttccctttcgtcagcaagactttgggcgtggatttcattgacgtcgcgactaaagtcatgatcggggaaaatgtggacgagaaacacttgcccacccttgaccaccctatcattccggcggattacgtcgccattaaggcgcctatgttcagctggccaagacttcgcgatgccgacccgatcctcaggtgcgaaatggcctccaccggcgaggtggcctgctttggagaaggaatccatacggcattcctgaaggcaatgctgtcgactggcttcaaaatcccccaaaagggaatcctgatcggaattcaacaatcctttaggcctagattcctcggagtggccgaacagctgcacaacgaaggatttaagctctttgcgactgaggcgacttccgattggctgaacgccaataatgtcccggcgaccccggtggcctggccatcccaggagggtcaaaatcccagcctgtctagcatcagaaagttgattcgtgatggcagcatcgacctggtgataaacctgccgaataacaatacgaagtttgtccacgacaattacgtgatcagacgcaccgcggtcgatagcggaatccctctcctgactaacttccaggtcaccaagctgttcgccgaggctgtccaaaaatcacgcaaggtggactccaaatccctgtttcactaccgccaatactccgcaggtaaagccgca

SEQ ID NO: 43491 - DNA, 4500 bp, Artificial Sequence
  derived and/or modified sequence
atgacccgtatacttactgccttcaaagttgtgcgcacgcttaaaactggtttcgggttcactaatgttacggctcatcagaagtggaagttctcaaggccagggattcgactgttgtctgtaaaagctcagaccgctcatattgtactagaagatggaacaaaaatgaagggttactccttcggacacccatcttcagtcgccggtgaagtggtcttcaacactggtttgggtggttatccggaggctattacagatccagcttacaaaggtcagatattaaccatggctaacccaattatcgggaatgggggcgctccagatactactgctttggacgagttgggactctccaagtatctcgagtccaacggtattaaagtctctggcctgcttgtgcttgactatagcaaggattataatcactggctcgctactaagtcgctcggacagtggctacaagaggaaaaggttcctgccatatatggtgtggatacccgtatgcttaccaagataatccgtgataaaggtaccatgctgggaaaaattgagttcgagggtcaaccggtcgactttgtcgatcctaataagcaaaacttgattgctgaggtttccactaaagatgttaaagtttatgggaaaggtaaccctacaaaagttgtagctgttgattgcggcatcaaaaacaacgtaataaggctgctagttaagcggggagctgaagttcatcttgtaccttggaatcacgattttacaaaaatggaatatgatgggatccttatagctggtggacctgggaaccctgctctagcagaaccacttattcagaacgttaggaagatccttgagtcggacagaaaggagcctcttttcgggatttccacaggtaacttaattactgggctcgctgctggtgcaaagacttataagatgagtatggccaacaggggacagaaccaacctgtgttgaatataaccaacaagcaggcctttatcacagctcaaaaccacgggtacgctttggataacactcttcctgccggttggaagcctctctttgtgaatgttaacgaccaaactaacgaagggattatgcatgaaagcaaaccattcttcgccgtgcaatttcatccagaggttacacccggtccaatagacaccgaatacctatttgactcattcttttccctcattaagaagggcaaagccactacaatcactagtgttcttccaaaaccagccctcgtcgcctccagggtggaagtgtcaaaagtcctcatcctaggcagtggggggctctctattggacaagctggagaatttgattactctggctcccaggctgttaaggcgatgaaggaagagaacgtgaaaactgttctaatgaacccgaacatcgcttcggtgcaaacaaatgaggttggtctgaaacaagctgatacagtctacttcttgccaataacacctcagtttgtgacagaagtgattaaggctgaacaacctgatggtctgatactaggtatgggtggccaaactgctttgaattgtggggttgagttatttaagcgtggtgtgctgaaggaatatggcgtaaaggttctgggtactagtgttgaatccataatggccacagaggatagacaacttttctcggacaagcttaatgagatcaatgagaagattgcacccagttttgctgttgaatccattgaggatgcgctgaaggctgccgatacaataggatacccagttatgatacgctctgcttatgccttaggtgggctaggttcaggtatttgcccaaatagggagacattgatggatttgtctaccaaggcgtttgccatgactaaccaaattcttgtcgagaaatctgttacaggatggaaagaaatcgagtatgaggtagtgagggatgctgatgataactgcgtcacagtttgcaacatggaaaatgtcgatgcgatgggagtccacactggggactcagtggttgttgctcctgctcaaacgctatcaaatgcagaattccagatgctcagaagaaccagcattaatgtggtaagacaccttggaatagttggggaatgcaatattcagttcgcccttcatcctacttccatggagtactgtataattgaggttaacgccaggctttcgcgaagcagcgcccttgcaagcaaggccactgggtatccacttgccttcattgcggctaagattgcattaggcatccctttacctgaaattaagaatgtcgtgtccggtaagacttcagcttgtttcgaaccaagcttggactacatggtcactaagatcccacgttgggatctggataggtttcatggaacgtcgtcaagaatcggttctagtatgaagagtgtgggggaagtcatggctattgggaggacctttgaggagagctttcagaaagctcttaggatgtgccatccaagtatcgagggattcacgcctagactaccaatgaataaggagtggccttcaaatcttgatcttaggaaagaactttctgagccttcttctactcgcatctatgctatagctaaagctattgatgataatatgtctcttgatgaaatagaaaagctgacttatatcgataaatggtttttgtataaaatgagagacattctgaatatggaaaaaacgctcaagggtctaaattcagagtccatgacagaagaaaccctgaagcgcgcgaaggagatcggattcagtgacaaacagatctctaagtgccttggactgaccgaggcacagacgagggaactaagactcaagaagaatatacatccctgggtgaagcaaattgatactctagctgcagagtatccgtcggtgacaaattatctttatgtgacgtataacggtcaagagcatgatgtgaacttcgatgaccatgggatgatggttcttggttgtggcccttatcatattgggtcgtcagttgagtttgactggtgcgccgttagtagcatacggactttgcggcaactaggaaaaaagaccgttgtagtcaattgtaaccctgaaactgtcagcaccgatttcgacgagtgcgataagctatacttcgaggaactatcactagaaaggattctggacatttaccaccaagaggcctgtggaggctgtattatatctgttgggggtcagatccctaataatctcgctgttcctttgtacaagaacggagtcaagatcatgggtacttctccattgcaaatcgacagagcggaagatcgttctatcttttctgcagtgttagacgaattgaaagtagcccaagctccttggaaagctgtcaacactcttaacgaagctcttgagtttgcaaaatcagtggactacccatgcttgttgaggcctagttatgtcctgagtgggtctgctatgaacgtggttttcagtgaagacgagatgaagaaattcctagaggaggcaactcgagtgtcacaagaacatcctgtggtgctcactaagtttgttgaaggcgctagggaagtagagatggatgctgttggtaaggatggcagggtcattagtcacgctatttcggagcatgttgaagatgctggggtgcacagcggtgatgctacgcttatgttgcctactcagaccatctcacagggtgccattgaaaaagttaaggatgcaacccgtaaaattgctaaagcctttgcgatttcagggcctttcaatgtgcaattcctagttaaggggaatgatgtccttgtcattgaatgtaatttgagggcatcacgttctttccctttcgtctctaagacgttgggtgttgatttcatcgatgttgccactaaagtcatgatcggtgaaaacgtcgatgagaaacacctccctacccttgaccatccaatcataccagctgactatgttgctattaaagcaccgatgttttcatggccgagacttcgagacgcagatccaatcttaagatgtgaaatggcctccacgggcgaagttgcatgctttggcgaggggattcacactgcttttcttaaggctatgctttcgacgggttttaaaatcccacaaaaaggtatcttgattggaattcaacaatctttcagacccagatttttgggtgttgctgaacaacttcataatgaaggtttcaagttattcgcaaccgaagctacctccgattggttgaacgcaaacaacgttcctgctacgcctgttgcttggccttctcaggagggtcaaaacccatccctctcatctatacgaaagttaattagggatggatcaatcgatttggtgatcaatctccccaataataatactaagtttgtccacgataactatgttatacggaggaccgctgtcgacagcgggattccccttctgacgaactttcaagtaacgaagctgttcgccgaggcagtccaaaaatctcgtaaggttgattctaaatctttgtttcactacagacaatactctgcaggtaaagcagcc

SEQ ID NO: 43492 - DNA, 4500 bp, Artificial Sequence
  derived and/or modified sequence
atgacccggatcctcacagcatttaaggtggtgagaacactgaagactgggttcggatttaccaacgttacagcccatcagaagtggaagttcagtcggcccggcatcagactgctgtcagttaaagcccagacagcccacatcgttctggaagatgggaccaagatgaagggttattcttttgggcatcccagctccgttgcaggcgaggtggtcttcaataccgggctaggcggctaccccgaggcaatcactgatcctgcgtataaaggtcagatcttaactatggccaatcccattatcgggaacgggggcgcaccagacacaaccgcactggacgaactgggactgagcaagtacctcgaatctaatgggatcaaagtgtccggactcttggtgcttgactactctaaagactacaaccattggctggcaactaaaagtttaggacagtggcttcaggaggaaaaggtccctgctatctacggcgtggacacgagaatgctgacaaaaatcatcagagataaagggactatgctcggaaagatcgagttcgaggggcagcctgtggattttgtcgatcccaataaacagaacctgatcgctgaggtgtccactaaggatgtgaaggtgtatggcaaagggaacccaaccaaggtggtggccgttgattgtggaatcaaaaacaacgtgatccgactgctcgtgaagcgcggcgctgaggtgcatctggtaccatggaaccatgacttcacaaaaatggagtacgacgggattctgatagccggggggcccgggaatcctgctctggcggaaccgctcatacagaatgtgcggaaaatactagagtccgatagaaaagaaccactattcgggatcagcaccgggaacctgatcacaggcctggccgcgggtgccaagacttataagatgagcatggctaacagggggcagaatcagccggttttgaacatcaccaacaagcaggccttcattactgctcagaatcacgggtatgccctggataacactctaccagccggttggaaacctcttttcgtcaatgtgaatgaccagacaaacgaagggattatgcacgagtcaaagccctttttcgcagtgcagttccatcctgaagtgactcctggcccaattgataccgagtatttgtttgacagcttcttttcccttattaagaaggggaaagcgacgacaatcacatctgtcttgcctaaacctgcccttgtggcatctagagttgaagtgtccaaggtgttgatcttgggaagtggcgggctgagcattggacaagctggcgagttcgattatagtggtagtcaggcagtaaaagcaatgaaggaagaaaatgtcaagaccgtgctgatgaatccgaacatcgcatcagttcagactaatgaagtgggactgaagcaagccgataccgtctactttctcccaatcaccccacagttcgtgacggaggtgataaaagccgagcagcccgacggccttatcctgggcatgggaggccagacagcccttaattgcggcgtcgagctgttcaaaaggggggtgttgaaggaatatggcgtgaaggtcctgggaacttctgtagaaagcatcatggctacagaggatcggcaactatttagcgataaactgaatgaaataaatgagaagatcgccccttctttcgctgtcgaatcaatcgaagacgcacttaaggcggccgatactatcgggtaccccgtaatgattaggtctgcatatgcgctgggaggactaggctccggcatctgcccaaaccgagagacattgatggacctttccaccaaagccttcgctatgactaatcagatcctggtggagaagagtgtcaccgggtggaaggagatcgagtacgaggttgtaagagatgccgatgacaattgtgtaaccgtgtgtaacatggagaacgtcgacgctatgggagtccacaccggtgactccgtggtggtggcgccagctcagacattgtctaatgccgagtttcaaatgctcaggcgcacctcaataaatgtagtacgccacctcggaatcgttggagagtgcaatattcaattcgccctccatcccactagtatggagtactgcattattgaggtgaacgctcggttgagtcgctcgtcagccctggcatctaaggcaaccggctacccgctagccttcattgctgcaaaaattgccctgggaataccacttcctgagatcaagaacgtggtgagcggaaagacttcagcatgctttgagcctagtctggattatatggtaactaagattccccggtgggacctggacaggttccacggcacttccagtcggatagggtcctcaatgaagtcagtgggcgaagttatggcgatcggcaggaccttcgaagaatccttccagaaggcgctgcgaatgtgccacccttctatcgagggttttacaccccgactccccatgaacaaggagtggccctctaatctcgacttgaggaaggaactctcggaaccttcgtccactcgcatctacgctatcgccaaggctatcgatgataacatgtctctggacgagattgaaaagctgacttatattgacaaatggttcctatataagatgcgcgatatcttaaacatggagaaaacgctgaagggcctcaatagcgagagtatgaccgaggagactctcaaaagagcgaaagagatcgggttttccgacaaacagatcagtaaatgtctaggtctgactgaggcgcagacaagggagctgagactcaagaaaaatattcacccttgggttaagcaaattgatactctggcggcagaatacccgtctgtcactaactacctgtatgtgacatataatgggcaagaacacgacgtcaatttcgacgatcacggaatgatggtgctgggatgtggcccctaccatattggttcatctgtcgaattcgactggtgcgccgtgagttcaatacgcacgctcagacagcttggtaagaaaaccgtggttgtgaattgtaacccagaaacagtgagtactgatttcgatgagtgtgataagctctatttcgaggagctgtcactggagcggatcttggacatttaccatcaggaggcatgcggcggttgcataatttcagtgggcggccagatacctaacaatctggcagtgccgctgtataagaacggagtgaagattatgggtacctctccactgcaaatagaccgagccgaggaccggtctattttctcagccgtgcttgacgagctgaaagttgcacaggcaccttggaaggccgtgaacaccctcaacgaggcattagagtttgcaaaaagtgtcgattacccttgtctgttaaggccctcttatgttctctcaggcagcgcgatgaatgttgttttttccgaggacgagatgaaaaaattcctggaagaggccacaagagtgagccaggagcaccctgtggtcctcaccaaattcgttgagggggcgagggaggttgagatggatgctgtgggaaaggatggccgggtgatcagtcatgccatatcggagcacgtggaggatgcaggggtacactctggagacgctacactgatgttgcccacgcagaccatttcccaaggagcaattgagaaagtcaaagatgcaacacgcaaaatcgcgaaggccttcgctatttctggacccttcaatgtgcaatttcttgtgaaaggcaatgatgtcctcgtgatcgaatgcaatctacgagcgtccaggtcctttccttttgtgtcaaagactctcggagttgattttatcgatgttgccacaaaggttatgatcggagagaatgtggatgagaagcatctgccaaccctggaccaccccattatccccgcggactacgtggcaattaaggcacccatgttctcttggccacggctccgcgacgccgacccaatcctccggtgcgagatggcctctactggggaggttgcctgctttggagaaggcatccacaccgcgttcttgaaggctatgctcagcacggggtttaagataccccagaagggtattcttattggaatccaacagtcttttaggccccgttttttaggagtggccgagcagctacataacgaggggtttaaactcttcgcgaccgaagccacgagcgattggctgaatgccaacaatgtgccagcgacccccgttgcctggccaagtcaagagggccagaatccctcactgagttctatcagaaaactcatccgcgacggatccatagacctcgtgatcaatctaccaaacaataataccaaattcgtgcatgacaattacgtgatcagaagaactgccgtagactccggtatcccattactgacgaactttcaagtgacgaagctgttcgctgaagctgttcagaaaagtagaaaagttgattcaaagagcctctttcactatcggcaatatagcgctggaaaagcggcc

SEQ ID NO: 43493 - DNA, 4500 bp, Artificial Sequence
  derived and/or modified sequence
atgacccggatcctgactgctttcaaagtggtgcgcactctgaaaaccggcttcggattcaccaacgtgactgcacatcagaaatggaagttctcgcgccctggcatccgcctcctgagcgtgaaagcccagacggcccacatcgtgctggaggacgggactaagatgaagggctactctttcggacaccctagctcggtggcaggcgaagtagttttcaacaccggcctcggcggctacccggaagcgatcactgaccctgcgtataagggacaaatcttgaccatggcgaacccgattatcggcaacggaggcgcaccagataccaccgctctcgatgaattgggactcagcaagtaccttgaatccaatggaatcaaggtttcaggcctgctcgtgctggactacagcaaggactacaatcactggctggccaccaagagcctgggacagtggctgcaagaggagaaggtgcctgccatctacggagtggataccagaatgctgaccaagattattcgagataaagggaccatgcttggcaagattgaatttgagggccagccggtcgacttcgtggacccgaataagcagaacctcatcgctgaagtgagcactaaggacgttaaggtgtacggaaaaggaaacccgaccaaggtcgtggcagtggactgcgggatcaaaaacaacgtgatcagactccttgtgaagcgcggagccgaggtccacctcgtgccttggaaccatgacttcactaagatggaatacgacggaatcctcatcgccggaggccccgggaatccggcactcgccgaaccactcatccaaaacgtccgcaaaatcctcgaaagcgacagaaaagagccgctgtttgggatcagcaccggaaatctgatcactggactggcagcgggcgcaaagacgtacaaaatgtcaatggctaatagggggcaaaaccaacctgtcctgaacatcacgaataagcaagccttcatcaccgcccagaatcacggatacgccctggacaacactctcccggccggatggaagccgttgttcgttaatgtgaatgatcagaccaacgaaggaatcatgcacgaaagcaaaccttttttcgccgtgcagtttcatccggaggtcacgccgggccctatcgacactgaatacctcttcgattccttcttttccttgatcaagaagggaaaagctactaccatcacctcggtgctccctaagcccgctctcgtggcctcccgggtggaagtctccaaagtcctcatcctcggatcgggcggacttagcatcgggcaagcaggagaattcgactactcgggttcgcaggccgtgaaggccatgaaggaagagaacgtgaaaactgtgctcatgaatccgaatattgcgtccgtccagaccaatgaagtcggtctgaaacaggctgacactgtgtacttcctccctattaccccacagtttgtcactgaagtgatcaaggcagagcagccggacggactgatcctgggtatgggcgggcagaccgctctgaactgtggtgtggaactgttcaagagaggagttctgaaagaatacggagtcaaggtgctcggcacctcggtcgagtccatcatggcaaccgaagatcgccagttgttcagcgacaaactgaacgaaatcaatgaaaagatcgcaccttcgtttgcagtggaaagcatcgaggacgctctgaaggcggcggataccattggataccctgtgatgatccggtcagcttacgctctgggaggactcggatctggaatctgcccaaaccgggagactctgatggacctttcgaccaaggccttcgctatgaccaaccagattctggtggaaaagtccgtgactggatggaaggaaattgagtacgaggtggttcgcgacgcggacgataactgcgtgacggtctgcaatatggaaaatgtggatgcaatgggagtgcataccggagacagcgtggtcgtggcccctgcacaaactctgtcgaatgccgagttccagatgctgagacgcacttccataaatgtggttcgccaccttggcattgtgggagagtgcaacattcaattcgccctccatccgacctccatggaatactgcatcatcgaggtgaacgcccgactgtcccgatcctcagctctggcctcgaaggctaccgggtacccgttggccttcatcgcggccaagattgcgctgggaatccccctgccagagattaagaacgtggtgtccggaaagaccagcgcatgttttgaaccgagccttgactacatggtgacgaagatcccgaggtgggacctggacagattccacggaacgagctcacgcatcggctcctcaatgaagagcgtgggtgaggtcatggcgatcggccgcaccttcgaagagagctttcaaaaggccctgcgcatgtgccacccctccatcgagggtttcacgcccaggctgccgatgaataaagaatggccatcaaatctggatctgcgcaaggaactctccgaaccctcatcgacccggatctacgcgatcgccaaagcgatcgacgataacatgtcactggatgaaattgagaagctgacctatattgataagtggttcctgtacaagatgcgcgacatcctgaacatggaaaaaacccttaaagggctgaacagcgaatcgatgacggaggaaactctgaagcgggcaaaagagatcggcttctcggacaagcaaatcagcaaatgtctggggctgacggaagcgcagactagggaactgaggctcaaaaagaatatccacccgtgggtgaagcagatcgatactctggcggctgagtacccgtctgtcaccaactacctgtacgtgacctataatggacaagaacacgatgtgaatttcgacgaccatggaatgatggtgctggggtgcggcccttaccacatcggctcatccgtggaatttgattggtgcgctgtgtcgtcaattaggaccctgcgccagctgggcaaaaagactgtggtggtcaactgtaaccccgaaaccgtctccaccgatttcgatgaatgcgacaagctctacttcgaggaactttcattggaacggatcctcgacatctaccaccaagaggcctgtggggggtgcatcatctcggtgggtgggcagatccccaacaacctggccgtgccgctctataagaatggggtgaagattatgggcacgtcaccgctgcagatcgatcgcgcggaagataggtcaatctttagcgcggtgttggacgagttgaaggtcgcgcaggccccatggaaggctgtgaacacgctgaatgaggcactcgaatttgcaaagtcagtggactacccgtgcctgcttcgcccaagctacgtcttgagcgggagcgccatgaatgtggtcttttcagaagatgagatgaagaagttcctggaagaagccacgcgcgtgagccaggaacacccagtggtgctcacgaaatttgttgaaggtgcaagagaagttgaaatggacgcggtgggaaaggacggtagggtgatctcccatgcgatcagcgagcacgtcgaggatgcaggtgtccacagcggagatgctaccctgatgcttccgactcagactatctcgcagggtgctatcgagaaggtgaaggacgcaaccagaaagatcgcgaaggcttttgcaatctcaggcccctttaacgtgcagttcctcgtcaagggaaatgatgtcctggtcatcgagtgcaatttgcgcgcttcccggtcattcccgttcgtcagcaagaccctcggcgtagactttattgacgtggcaacgaaagtcatgatcggagagaacgtcgacgaaaaacacctgcccactctcgatcacccaatcatccctgcggactatgtggccattaaggccccgatgttctcctggccgcgacttagggatgctgatcctatcctccggtgcgagatggcttcgactggcgaagtggcttgcttcggagagggaatccataccgccttcctcaaagctatgctttcaaccggattcaagattccacagaagggaatcctgatcggaatccaacagagcttcagacctcgctttcttggagtggcggaacaactgcataatgagggattcaagctgttcgcgaccgaggccacttccgactggctgaatgctaacaacgttccggctacgccggtggcctggccgagccaagagggccaaaatccatcgctgtcgagtatccggaagctgattagggacggaagcatcgacctcgtgattaatctcccaaacaacaacaccaaatttgtgcacgacaactacgtgatccgccgcactgccgtggattctgggattccgctgctgaccaacttccaggtcaccaagctgtttgctgaagccgtgcagaaatcacgcaaggtggattcaaaatccctgttccattacagacagtattccgcagggaaggcggca

SEQ ID NO: 43494 - DNA, 4500 bp, Artificial Sequence
  derived and/or modified sequence
atgacgcggatactgaccgctttcaaagtcgtccggacacttaagaccgggtttggcttcaccaatgtcaccgcccaccaaaagtggaaattctctcggcctggaatcaggttgttatctgtgaaggcgcagactgcccatatcgttctagaggatggcaccaagatgaagggatacagcttcggccaccccagcagcgtggctggagaggtggtgtttaatacagggttggggggctaccctgaagcgatcactgaccctgcgtacaagggtcagattcttaccatggccaaccctattatagggaacgggggcgcgcccgatacgactgcacttgacgagctgggcttgtccaaatatctggaatccaacggcatcaaggtgtctgggctgctagtactggattactcaaaggattataatcattggctggcaacgaaaagtctgggccagtggctacaggaagagaaggtgcccgccatttacggggtcgatacgcgcatgctgacaaaaataatcagggataaaggcactatgctgggaaaaatcgagttcgaagggcagcccgtggacttcgtggaccctaacaagcaaaatctgattgcagaggtgtccaccaaggatgtgaaggtgtatggtaagggtaatccgacaaaagtggtggctgtggattgcgggattaagaacaatgtcatccgtctgttggtgaaacggggcgctgaggtacacctcgtcccttggaaccacgactttacaaagatggagtacgatgggattcttatcgctgggggccccggcaaccccgcgctcgcagaaccgctgatacagaacgtgcgcaaaatattggaaagcgatcggaaggaaccactgtttggcatctccacgggaaacctgatcacaggtctggcggccggagccaaaacctacaagatgtccatggcaaatcgggggcagaaccagccagtcctgaacattacaaacaagcaggccttcattaccgctcagaaccatggttatgcattggacaacactctgcccgccggctggaagcccttgttcgtgaatgtgaacgatcagacaaacgagggaattatgcatgagagcaagccttttttcgctgttcagtttcatccagaagtcactcctggtccaatcgacaccgaatatcttttcgactcctttttcagcttgattaagaaaggcaaggcaacgactatcacatccgtgctgccaaagccagccctcgtggccagtagggtcgaagtgagcaaggtccttattctggggagcggtggattgtccatagggcaggccggcgaatttgactactccggctcacaggccgtgaaagcgatgaaagaggagaacgtgaagactgtgcttatgaacccgaacattgcaagcgtgcagaccaacgaagtgggtttgaaacaagccgacacagtttactttctgcccattactccgcagtttgtgacagaggtgatcaaggccgaacagccggacgggttaatccttggcatgggaggacagacagcactaaactgcggcgtggagctgtttaagcggggagtactcaaagagtatggggtcaaggtgctgggcacgagtgtagaatccatcatggcaacagaagatcggcagctgttttcagacaaactgaacgagatcaatgagaagattgctcccagcttcgcagtggagtcaattgaggacgcgctgaaggccgccgacacgattggctatcccgtgatgataagatcggcctatgctttggggggcctggggagcggtatctgtcccaatagggaaacgctgatggatctatccaccaaggccttcgctatgacaaaccaaatactggtggagaaaagcgtaactggatggaaagaaattgaatatgaagtggtgagggatgccgacgacaattgcgtgaccgtatgtaacatggagaatgttgacgctatgggagtccacacgggagatagcgtggttgtggcgcctgcccagaccttaagtaacgctgagtttcagatgttacgaaggacctccatcaatgtggtgcgacacttggggattgtgggagaatgtaacattcaattcgctctacaccccacatccatggagtattgtattattgaggtaaatgctcgcctgtctcggagctccgcactggcctcgaaggccacgggctatccgttagctttcatcgcagcaaagatcgcgctcggcatcccactccccgaaatcaaaaacgtggtgagcggtaaaacttccgcatgtttcgaaccttccctggactatatggtaaccaagataccccgctgggacctcgaccggttccacgggacgtcgagtcgtatcgggagctctatgaagtccgtgggggaggtgatggctataggccggacgttcgaagaatcatttcagaaagcactccggatgtgccacccctcaattgagggtttcacacccaggttgccaatgaacaaggaatggccctcaaacctggacctgagaaaagaactgagtgaaccaagtagtacaagaatatacgccatagctaaagccattgatgacaacatgagcctcgacgagatcgaaaagctcacatatattgacaagtggtttctgtacaaaatgagggatatcctgaatatggagaaaacactcaagggcctgaactctgagtctatgaccgaggagactttgaagcgggccaaggagatcggctttagcgacaagcaaatctcaaagtgccttggcctgaccgaggcacagactagggaactcagactgaagaaaaacatccacccatgggtgaaacaaatcgacaccttggcggcagagtacccttcagttacaaactatctgtacgtgacctataacggacaggagcacgatgtgaattttgacgatcatggcatgatggtgcttggttgtggcccatatcatatcggcagctcggtcgaatttgattggtgcgctgtgagctccatccgaaccctgagacagctgggcaagaagactgttgtggtgaattgcaatcccgagacagtgtccaccgacttcgatgaatgcgataagttgtatttcgaagagctgagtttagaacgtatattagacatctaccatcaggaggcgtgcggaggttgcataatcagcgtcggcggtcaaataccaaacaatcttgctgtgcccctatacaagaatggagttaagataatgggtacctcacctttgcagatcgaccgggctgaggaccgctccatcttctcagccgttctagatgagctgaaggtggcgcaggccccgtggaaagcggtcaatactctgaacgaggcactggaattcgccaagagcgtggactacccttgtcttctaaggccgtcttatgttttaagcgggtccgccatgaacgtcgtgttttctgaagacgaaatgaagaagttcctggaggaagcaactagggtctcacaggaacatcccgtagtcctcactaaatttgtggagggagccagagaagtcgagatggatgcagtgggtaaggatggaagggtgatcagccacgccatcagcgaacatgtcgaagacgcgggggtccactcaggggatgccactctgatgcttccaacccagacgatcagccagggcgcgatagagaaggttaaagatgctactcgcaagatcgctaaggccttcgccatttccgggccctttaatgtgcagtttctggtcaagggcaacgacgtactcgtgatcgagtgcaacctccgtgcatcacgttccttccctttcgtatctaaaaccctgggggtggacttcattgacgtcgctaccaaagtgatgattggcgaaaacgttgatgagaaacatcttcctacattggatcaccctatcattcctgccgattatgtggccataaaggcccccatgttttcctggcctagactgcgtgacgccgacccaatccttcgctgcgagatggcatcgactggcgaggtggcctgtttcggggaggggatacataccgcttttctcaaggccatgttgagtacagggttcaagattccgcagaagggcatcctgatcggtatacagcagagcttcaggccaaggttccttggagtggccgaacagctgcacaacgagggctttaaactcttcgcaacagaagccaccagcgattggctgaatgctaataatgtacctgcaactccagtcgcttggcccagccaggaagggcagaacccatcactcagcagcatcaggaaattaatccgagatggatcgatcgacctagtaatcaacctacccaacaacaataccaagttcgtacatgacaattacgttattaggagaacagccgtggacagcggtatccccctgctgacaaattttcaggtgacaaagctcttcgctgaagccgtccagaagtccaggaaggttgattctaagagcctgttccactataggcaatattcggccgggaaggccgct

SEQ ID NO: 43495 - DNA, 4500 bp, Artificial Sequence
  derived and/or modified sequence
atgacgagaatactcaccgctttcaaagtggtgaggaccctgaaaactggattcggtttcacgaacgtgactgcccatcaaaaatggaagttcagccgcccggggatccgactgctgtcggtcaaggcgcaaacggcccacatcgtcctcgaagatggaactaaaatgaagggatacagcttcggacacccgtcctccgtggctggagaagtggtgttcaacaccggactgggaggctatccggaggcgatcaccgatcccgcttacaaaggacagatcctcacgatggcaaacccgatcatcggaaacggaggagccccggacaccaccgcccttgacgagctcggtctttccaagtacctcgaaagcaatggcatcaaggtgtccggtctgctcgtcttggattactcgaaggactacaatcattggctggccactaagtctctgggacaatggcttcaggaggagaaagtgccggcaatttacggagtggatacgagaatgctgacgaagattatccgcgataagggcactatgcttggaaaaatcgagttcgagggacagccggtggacttcgtggacccgaataagcagaacctcatcgcggaggtgagcactaaggacgtgaaggtctacggtaagggtaacccgaccaaagtcgtcgccgttgactgtggtatcaaaaacaatgtgattcgcctgctggtgaaacggggagcagaggtgcatctcgtcccgtggaatcatgactttactaagatggaatacgatgggatccttatcgccggcggaccaggaaatcctgcactggccgagccacttatccaaaacgtgcgcaagattctggaatcagataggaaagagcccctgttcggaatcagcaccggtaacctgatcactggactcgcagccggtgctaagacttataagatgagcatggcaaaccgcggacaaaaccagccggtcctgaacatcaccaacaagcaggcgttcatcaccgctcaaaaccacggatacgcactggacaacactctcccggccggatggaagccgctttttgtgaatgtgaatgatcagacgaacgaagggatcatgcacgaaagcaagcctttcttcgctgtacaattccacccagaagtgactcccggaccgatcgacaccgaatacctgtttgactcgtttttctccctgatcaaaaaaggcaaggccacgacgatcacttcggtgctgccgaagccggctctggtggcctcgcgcgtggaagtgtccaaagtgttgatccttggctcgggagggttgtcgatcggccaggcgggagaattcgactacagcggcagccaggcggtcaaggccatgaaagaggaaaacgtgaaaactgtcttgatgaacccgaacatcgcctccgtgcaaactaacgaagtcggactcaagcaggcggatactgtgtacttcctgcctatcactcctcagttcgtgactgaagtgatcaaggctgagcagccagacggcctgattcttggaatgggcggtcagactgctctgaactgcggagtcgaactcttcaagcgcggcgtgcttaaagaatacggtgtgaaggtcctgggcacttcggtcgagtcaattatggctactgaggaccgccaacttttctcggacaagttgaacgaaatcaacgagaagatagcaccgtcctttgccgtggagtccatcgaagatgcactcaaagcagcagacaccattggctacccggtgatgatccgctcagcgtacgctctgggaggcctgggatccgggatctgtccaaacagggaaaccctgatggacctcagcaccaaggcgttcgcaatgactaatcagatcctggtggagaagtcagttaccggatggaaagaaatcgagtacgaggtggtgcgcgatgcagatgataattgcgtgaccgtctgcaacatggagaacgtggacgccatgggcgtccacaccggtgactccgttgtggtggcccccgcccagactctttcaaatgccgaattccagatgcttaggcggacttcgatcaacgtggtccggcatctgggaattgtgggagagtgcaacatccaattcgcgctccaccctacttcgatggaatactgcatcatcgaagtgaatgcgcggctgtctcggagcagcgccctcgcctccaaagcaaccggatacccgctggctttcatcgcagccaaaatcgccctgggaattcctcttccggaaatcaagaacgtggtgtcaggaaagactagtgcctgcttcgagccctccttggactacatggtcacgaagatcccacgctgggacctggacagatttcacggaacctcttcgcgcatcggctcgagcatgaagtcggtaggggaggtgatggccattggccgcactttcgaagagagctttcagaaagcactgcgcatgtgccatccgtcaatcgaaggatttactccgagacttcccatgaacaaggagtggccgagcaatctcgatctgagaaaagagctctcagaaccgtccagcacgcgcatttacgcaatcgcaaaagccattgatgacaatatgtcccttgacgagatcgaaaaactgacttacatcgacaagtggttcctctataagatgcgcgacattctgaacatggaaaagacgctgaagggactgaactccgagtcgatgaccgaagagactctgaagcgcgctaaagaaatcggtttctccgataagcagatctcgaaatgcctgggactcactgaggcgcagacccgcgaactgcgcctcaagaaaaacatccacccgtgggttaagcagatcgacaccctggccgctgagtacccatccgtgaccaactacctctacgtgacctacaacgggcaggaacatgatgtcaatttcgacgatcatggaatgatggtgctcggttgtggaccgtaccacatcggatcgtcggtcgagttcgattggtgtgcggtgtcgtcaatccggaccctgagacaactgggaaagaaaaccgtggtcgtgaactgcaaccctgaaaccgtctcgaccgatttcgatgaatgcgataagctgtacttcgaggaactgagcttggaacgaatcctggacatctaccatcaggaagcgtgtgggggctgcatcatctccgtgggcggacagattcctaataacctggctgtccctctgtacaagaacggcgtgaagattatgggcacctcgccacttcagatcgacagggctgaagatagatcgatcttctccgccgtgcttgacgaactgaaggtggcgcaggcgccgtggaaagcggtcaacaccctcaatgaagcactcgagttcgcgaagtctgtggactacccctgcctcttgcgcccgtcatacgtgctctcgggctcggccatgaacgtggtattctcggaggatgaaatgaaaaagttcctcgaggaggcgactagagtgtcacaggaacacccggtggtgttgactaaattcgtggaaggcgcgcgggaagtggagatggacgcggtcggcaaagatggacgggtgatcagccatgccatctccgaacacgtcgaagatgccggtgtccactcgggggacgcgactcttatgctcccaactcagacgatcagccagggtgcaatcgaaaaggtgaaggacgccactcgtaagatcgccaaggcttttgccattagcggtccgttcaacgtccaattcttggtcaagggaaatgacgtcctggtgatcgagtgcaacctgcgggcttcccgttcatttccctttgtgagcaagactctgggtgtggactttatcgacgtcgccaccaaggtcatgatcggggaaaacgtggatgagaaacatctcccgacgctcgaccacccaatcatcccagctgactacgtggcgatcaaggcgccgatgttctcctggccgcgactgagggatgctgacccgatcttgagatgtgagatggccagcactggcgaagtcgcgtgcttcggagagggaattcatactgcgtttctgaaggcgatgctgtcaacgggattcaagatcccgcagaaaggaatcctgatcggcatccagcaatcgttcagaccacgcttcctcggagtggccgaacaactgcacaacgaaggattcaagttgttcgcgaccgaggctactagcgattggctcaacgcgaacaatgtgcctgcgaccccggtggcgtggccgagccaggaaggacagaacccatcactcagcagcatccggaaacttatccgcgacggatccatcgacctggtgatcaatctgcctaacaacaatactaagttcgttcacgataactatgtgatccgccggaccgcggtggattcaggaattccactgcttactaactttcaggtgaccaaactgtttgccgaagcagtccagaagtctcggaaggtggactccaaaagcctgttccattatcggcagtactcggcgggtaaagcagct

SEQ ID NO: 43496 - DNA, 4500 bp, Artificial Sequence
  derived and/or modified sequence
atgacgcgaatattaacggcgtttaaagtagtacgtacgttaaaaacgggttttggttttacgaatgttacggcgcatcaaaaatggaaattttcgcgtccgggtatacgtctattatcggtaaaagcgcaaacggcgcatatagtattagaagatggtacgaaaatgaaaggttattcgtttggtcatccgtcgtcggtagcgggtgaagtagtttttaatacgggtctaggtggttatccggaagcgataacggatccggcgtataaaggtcaaatactaacgatggcgaatccgataataggtaatggtggtgcgccggatacgacggcgttagatgaattaggtctatcgaaatatttagaatcgaatggtataaaagtatcgggtctattagttttagattattcgaaagattataatcattggttagcgacgaaatcgttaggtcaatggctacaagaagaaaaagttccggcgatatatggtgtagatacgcgaatgttaacgaaaataatacgtgataaaggtacgatgctaggtaaaatagaatttgaaggtcaaccggttgattttgtagatccgaataaacaaaatctaatagcggaagtatcgacgaaagatgtaaaagtatatggtaaaggtaatccgacgaaagttgttgcggtagattgtggtataaaaaataatgttatacgtctactagtaaaacgaggtgcggaagttcatttagtaccgtggaatcatgattttacgaaaatggaatatgatggtatactaatagcgggtggtccgggtaatccggcgctagcggaaccgttaatacaaaatgttcgtaaaatactagaatcggatcgtaaagaaccgttatttggtatatcgacgggtaatctaataacgggtctagcggcgggtgcgaaaacgtataaaatgtcgatggcgaatcgtggtcaaaatcaaccggtattaaatataacgaataaacaagcgtttataacggcgcaaaatcatggttatgcgctagataatacgttaccggcgggttggaaaccgttatttgtaaatgttaatgatcaaacgaatgaaggtataatgcatgaatcgaaaccgttttttgcggttcaatttcatccggaagtaacgccgggtccgatagatacggaatatctatttgattcgtttttttcgttaataaaaaaaggtaaagcgacgacgataacgtcggtactaccgaaaccggcgctagtagcgtcgcgtgtagaagtatcgaaagtattaatattaggttcgggtggtctatcgataggtcaagcgggtgaatttgattattcgggttcgcaagcggttaaagcgatgaaagaagaaaatgtaaaaacggttttaatgaatccgaatatagcgtcggtacaaacgaatgaagttggtttaaaacaagcggatacggtatattttctaccgataacgccgcaatttgtaacggaagttataaaagcggaacaaccggatggtttaatattaggtatgggtggtcaaacggcgttaaattgtggtgtagaattatttaaacgaggtgtactaaaagaatatggtgttaaagttttaggtacgtcggtagaatcgataatggcgacggaagatcgacaattattttcggataaactaaatgaaataaatgaaaaaatagcgccgtcgtttgcggtagaatcgatagaagatgcgttaaaagcggcggatacgataggttatccggttatgatacgttcggcgtatgcgctaggtggtttaggttcgggtatatgtccgaatcgtgaaacgttaatggatctatcgacgaaagcgtttgcgatgacgaatcaaatactagtagaaaaatcggtaacgggttggaaagaaatagaatatgaagtagtacgtgatgcggatgataattgtgtaacggtttgtaatatggaaaatgttgatgcgatgggtgttcatacgggtgattcggtagtagtagcgccggcgcaaacgttatcgaatgcggaatttcaaatgttacgacgaacgtcgataaatgtagtacgacatctaggtatagtaggtgaatgtaatatacaatttgcgttacatccgacgtcgatggaatattgtataatagaagtaaatgcgcgtctatcgcgatcgtcggcgctagcgtcgaaagcgacgggttatccgctagcgtttatagcggcgaaaatagcgttaggtataccgctaccggaaataaaaaatgtagtatcgggtaaaacgtcggcgtgttttgaaccgtcgctagattatatggtaacgaaaataccgcgttgggatttagatcgttttcatggtacgtcgtcgcgaataggttcgtcgatgaaatcggtaggtgaagttatggcgataggtcgtacgtttgaagaatcgtttcaaaaagcgctacgtatgtgtcatccgtcgatagaaggttttacgccgcgactaccgatgaataaagaatggccgtcgaatttagatttacgaaaagaattatcggaaccgtcgtcgacgcgtatatatgcgatagcgaaagcgatagatgataatatgtcgctagatgaaatagaaaaactaacgtatatagataaatggtttctatataaaatgcgagatatattaaatatggaaaaaacgctaaaaggtctaaattcggaatcgatgacggaagaaacgctaaaacgtgcgaaagaaataggtttttcggataaacaaatatcgaaatgtttaggtttaacggaagcgcaaacgcgtgaattacgtctaaaaaaaaatatacatccgtgggtaaaacaaatagatacgttagcggcggaatatccgtcggttacgaattatttatatgtaacgtataatggtcaagaacatgatgttaattttgatgatcatggtatgatggttctaggttgtggtccgtatcatataggttcgtcggtagaatttgattggtgtgcggtttcgtcgatacgtacgttacgtcaattaggtaaaaaaacggtagttgttaattgtaatccggaaacggtttcgacggattttgatgaatgtgataaattatattttgaagaactatcgctagaacgtatattagatatatatcatcaagaagcgtgtggtggttgtataatatcggtaggtggtcaaataccgaataatctagcggtaccgctatataaaaatggtgtaaaaataatgggtacgtcgccgttacaaatagatcgtgcggaagatcgatcgatattttcggcggttttagatgaactaaaagttgcgcaagcgccgtggaaagcggtaaatacgttaaatgaagcgctagaatttgcgaaatcggtagattatccgtgtctattacgtccgtcgtatgttctatcgggttcggcgatgaatgtagttttttcggaagatgaaatgaaaaaatttctagaagaagcgacgcgtgtttcgcaagaacatccggtagttttaacgaaatttgttgaaggtgcgcgagaagttgaaatggatgcggttggtaaagatggtcgagtaatatcgcatgcgatatcggaacatgtagaagatgcgggtgttcattcgggtgatgcgacgttaatgttaccgacgcaaacgatatcgcaaggtgcgatagaaaaagttaaagatgcgacgcgtaaaatagcgaaagcgtttgcgatatcgggtccgtttaatgttcaatttttagtaaaaggtaatgatgttctagttatagaatgtaatttacgagcgtcgcgatcgtttccgtttgtatcgaaaacgttaggtgtagattttatagatgttgcgacgaaagtaatgataggtgaaaatgtagatgaaaaacatttaccgacgttagatcatccgataataccggcggattatgttgcgataaaagcgccgatgttttcgtggccgcgtttacgtgatgcggatccgatactacgttgtgaaatggcgtcgacgggtgaagttgcgtgttttggtgaaggtatacatacggcgtttttaaaagcgatgttatcgacgggttttaaaataccgcaaaaaggtatattaataggtatacaacaatcgtttcgtccgcgatttctaggtgttgcggaacaactacataatgaaggttttaaactatttgcgacggaagcgacgtcggattggctaaatgcgaataatgttccggcgacgccggtagcgtggccgtcgcaagaaggtcaaaatccgtcgttatcgtcgatacgtaaattaatacgtgatggttcgatagatttagttataaatctaccgaataataatacgaaatttgttcatgataattatgttatacgtcgaacggcggtagattcgggtataccgttactaacgaattttcaagttacgaaattatttgcggaagcggttcaaaaatcgcgaaaagtagattcgaaatcgctatttcattatcgtcaatattcggcgggtaaagcggcg

SEQ ID NO: 43497 - DNA, 4500 bp, Artificial Sequence
  derived and/or modified sequence
atgactcgcatcctcactgccttcaaggttgtgcgcacccttaagacgggcttcggatttactaatgtgacggcgcaccagaagtggaagttttcccgcccgggtatccggctgctgagcgtgaaggcgcagaccgcacacatcgtactcgaggacggaactaagatgaagggctactccttcggccacccgtcctcggtcgcgggggaggtggtgttcaacactggactgggagggtacccagaggctatcaccgatccggcctataaaggccaaatcttgaccatggccaaccctatcatcggaaacggcggagccccagacactacggcactcgacgagctcgggctctccaagtacctggagtcgaatggtatcaaagtgtcaggactcctggtgctggattacagcaaggactataaccactggctggcaactaaatcgctcggacagtggctgcaagaggagaaggtgccagccatctacggtgtggacactcggatgctgaccaaaatcatccgggacaaaggcactatgctgggcaaaatagaattcgaaggccaacccgtggatttcgtcgatccgaataagcaaaacctgatcgctgaggtgtccactaaggacgtgaaggtctacggcaaagggaatccgacgaaggtcgtcgcggtggactgcggaatcaagaacaacgtcattcggctcctggtcaagaggggagcagaagtgcatctcgtcccgtggaatcatgactttaccaagatggagtacgacggaatcctgatcgctggcggaccaggcaacccagccctcgccgaaccgttgatccagaacgtgaggaagatcctggagtcagatcgcaaggaaccgctttttggaatctcgactgggaatctgatcactggactggccgccggagctaagacttacaagatgtcgatggcgaaccgcgggcaaaaccaaccggttctgaacatcaccaataagcaggcctttatcaccgcacagaaccatggatacgctctggacaacaccctgcccgcagggtggaagccgctgttcgtgaatgtgaacgaccaaaccaacgaaggaatcatgcacgaatcgaagccgtttttcgccgtccaatttcatcctgaagtcacgccgggacctatcgataccgagtacctgtttgactcgttcttcagcctgatcaagaagggaaaggcgaccactatcacctccgtgctgcctaagccggcgctggtcgcgtcacgggttgaagtgtcgaaggtgctgattctgggatcaggcgggctgtccatcggacaagccggagaattcgattactccggatcgcaggctgtgaaggcaatgaaggaggagaatgttaagaccgtgctgatgaacccgaacatcgcaagcgtgcaaactaatgaagtgggactgaagcaggcagatactgtctacttcctgccgattacgccgcagtttgtgaccgaggtgatcaaggcagagcagccggatggtttgattctgggaatgggcggacaaaccgctctcaactgcggagtggagttgttcaagcggggcgtgctgaaggagtacggagtcaaggtgctgggaacttccgtggaaagcatcatggccactgaagataggcagcttttctccgacaaactgaacgagattaacgaaaagatcgccccctccttcgctgtcgaatcaatcgaagatgctctcaaggccgcggacactatcggataccctgtgatgatcaggtcagcgtacgcactgggagggctgggatcgggaatctgcccgaaccgagaaactctgatggacttgagcaccaaggccttcgcgatgaccaaccagattctggtggagaagtcggtcactggctggaaagaaatcgagtacgaggtagtgagagacgctgatgacaactgtgtgaccgtctgcaatatggaaaacgtggatgccatgggagtgcacactggagacagcgttgtggtggcgccggcgcagaccctctccaacgctgaattccagatgctccgcagaacctcgatcaacgtcgtgcggcacctggggatcgtcggagagtgcaacatccagttcgctctccacccaacctcgatggagtactgcatcatcgaggtgaatgcccgcctgtcaagatcgagcgcgctggcttcaaaggcaaccggatacccgttggccttcatcgcggctaaaatcgccctgggcatcccgctgcctgaaatcaagaatgtagtctcaggaaagacgtcagcttgtttcgagccgtcactggattacatggtgacgaagatcccgcggtgggacctggacagatttcacggaacttccagccgcatcggatcgtcgatgaagagcgtgggtgaagtgatggcaatcggccgcacctttgaagagtctttccagaaggcccttcggatgtgccacccctcgatagaaggcttcacgccgcgccttccgatgaacaaggagtggccttcgaacctcgatctgcggaaggaactttccgaaccgtcatctaccaggatttacgctatcgccaaggcgatcgacgacaatatgagtcttgacgaaatcgagaaactgacctatatcgataaatggttcctgtacaagatgcgcgacattcttaacatggagaaaactctgaagggtcttaacagtgagtccatgactgaagaaactctgaagagagcaaaggagattggtttctcagataagcaaatttcgaagtgtctcggactgaccgaggcacagactcgcgagctccgactgaagaagaacatccatccctgggtgaagcaaatcgacaccctggcggctgaatacccaagcgtcaccaactacctgtacgtgacgtacaacggacaagagcacgacgtgaacttcgacgatcacggcatgatggtgctgggatgtggaccgtaccacatcgggtcgtcggtcgagttcgactggtgtgccgtgtcctcgatccgcactctgcggcaactcggtaaaaagaccgtggtcgtgaactgcaacccggaaactgtttccaccgacttcgacgagtgcgataaactgtactttgaagaactgagcctggaaagaatcctcgatatctaccatcaggaagcctgcgggggatgtattatctccgtcggaggccagatccccaacaacctggcagtgccgttgtacaaaaacggagtcaagattatgggaacgtccccgctccagattgacagggcggaggaccgcagcatcttctccgcagtgctcgacgaactgaaggtcgcccaagcaccttggaaagccgtgaacaccctcaacgaagctcttgagttcgcgaaatcagtggactacccgtgcctccttcggccgagctacgttctgtccgggtcggccatgaacgttgtcttttcggaagatgaaatgaagaagtttctcgaagaggccacccgggtgagtcaggaacacccggttgtcctgaccaaattcgtggaaggggccagagaggtggaaatggacgccgtgggaaaggacggacgcgtgatctcgcacgccatttcagaacacgtggaggacgcaggagtccactccggagacgctaccctcatgctgccgactcagactattagccagggcgccatcgaaaaggtgaaggacgcaactcgcaaaatcgcgaaggcgttcgccatcagcggaccgttcaacgtgcagtttctcgtgaagggtaatgacgtgctcgtcattgaatgtaacctgagagcatcacgctcgttcccattcgtctcaaaaacccttggagtggactttatcgacgtcgcgactaaagtgatgatcggcgagaacgtcgacgaaaaacatttgcccaccctcgatcatccaatcatcccagctgactacgttgccatcaaagcgccgatgttcagctggccacggctgcgagatgctgatcccatcctgcgctgtgaaatggcttccactggtgaggtggcgtgtttcggagaggggatccataccgccttcctgaaggctatgctgagcactgggttcaagatcccgcaaaaggggatcctgatagggattcagcaatcgtttcggccgagatttctcggcgttgctgaacagttgcacaacgaaggtttcaaactcttcgccaccgaagcaacctcggattggctgaatgccaataatgtcccagctaccccggtggcatggccttcccaggaaggacaaaatccatcactgtcgtccatcagaaagctcatccgcgatggatccattgatctggtcataaacctgccgaataacaacactaaattcgtgcacgacaattacgtcatcagaaggaccgccgtggacagcggaatccctctgctcactaacttccaggtcactaagctcttcgccgaagccgtgcagaagagtcggaaagtcgattcgaagtcactgtttcattaccgccaatactcggcgggaaaggcggca

SEQ ID NO: 43498 - DNA, 4500 bp, Artificial Sequence
  derived and/or modified sequence
atgacgcgcatacttactgcatttaaggtggtgaggactcttaagaccgggtttggattcacgaacgttaccgcccaccagaaatggaagtttagtagacctggcattaggctgctctcggtgaaggctcagaccgcccacatcgtactcgaggacggtaccaaaatgaagggatacagcttcggacacccttcatccgtggcaggtgaggtcgtgttcaataccggattgggaggataccctgaagcaattactgaccctgcctataaagggcaaattcttactatggcaaacccgattattggaaatgggggtgcacccgacactacggcgctggacgaactgggactctccaagtacctggaatcaaacggaattaaggtgagcggacttcttgttctggattactccaaggattacaaccattggctcgcaaccaagtcgctgggtcaatggctccaggaagaaaaggtgcccgcaatttacggggtggataccagaatgcttactaagattattcgtgacaagggaactatgcttggtaagattgaattcgaaggtcagcccgtggactttgtggaccctaataagcaaaacctcatagccgaagtgtcaaccaaagacgtgaaggtgtacggtaaaggcaaccctacgaaagtggtggccgtggactgcggtattaagaacaatgttatacgccttctcgtgaaacgaggagcagaagtgcaccttgtgccctggaaccatgattttactaaaatggaatacgatggaatcctgattgcaggaggacctggaaaccccgcgttggcagaacctctgattcaaaatgtcagaaagatcctggaatccgacagaaaggaacctctgttcgggataagcactggtaaccttattacgggactggccgcgggtgctaagacttacaagatgtccatggcaaacagaggccaaaaccagcctgtccttaacattactaataagcaggccttcataacggcccagaaccatggatacgcactcgacaacacccttccagcgggatggaagccactctttgtgaacgtcaacgaccaaactaacgagggaatcatgcatgagtcaaagccattcttcgcagtccagtttcatcccgaagtgactccaggtcctattgataccgaatacttgttcgattcgtttttctccctcataaagaaaggtaaagcaactaccatcacctcggtgctgcccaagcctgcccttgtggcatcccgagtggaagtgagtaaggtgctgatccttggttccggagggcttagtattggacaagcaggagaatttgattactccggatcacaagcagtgaaagcaatgaaggaggaaaatgtgaaaacggtgctgatgaatcccaacatcgcatcagtgcagacgaacgaggtgggcctcaagcaagccgatacggtgtacttcctcccaattaccccacagttcgtcaccgaagtgatcaaggcagaacagcctgacggccttatacttggaatgggtgggcaaaccgcccttaattgtggagtcgaattgttcaagagaggagtccttaaggaatacggggtcaaggtcctgggtacctctgtcgaatccatcatggccaccgaggatcgccaactgttttcggataagctgaacgagattaacgaaaagatcgccccttcctttgcggtggagtcgattgaagatgcgcttaaggcagcggataccattggctaccccgtgatgattagaagcgcttacgcacttggtggtcttggatccggtatctgtcccaacagagaaactctgatggatctgtcgaccaaggcattcgcgatgaccaaccaaatactggtggaaaagtcagtgactgggtggaaggaaatagagtacgaagtggtgagggatgcggacgacaactgtgtcacggtgtgtaatatggagaatgtcgacgcgatgggggtccacactggagattccgtggtggtggcaccagcccagactctctctaatgcagaattccagatgctgcggagaacctctattaacgtggtcagacatcttggaattgtgggtgagtgtaacatccagttcgcactgcatccaacctcgatggaatactgtattatcgaagtgaatgcaagactgagccgctcctcggccctggcatcgaaggccactggttacccactcgcgttcattgctgcaaagattgccctcgggatcccactccctgaaatcaaaaacgtggtgtcgggtaagacttcagcatgcttcgagccgtcccttgactacatggtcaccaagattcctagatgggaccttgataggttccatggtactagctcaagaataggttcaagcatgaagtcggtgggggaagtcatggccattggccgaacttttgaagagtcgtttcagaaggcgttgcgaatgtgtcatcctagcatcgaaggttttacccccagacttcccatgaacaaggagtggccatcgaacctcgaccttcggaaggaactgtccgaacctagctcaactaggatttacgccattgcaaaagcgatcgacgacaatatgtcgctggatgaaattgaaaaacttacgtacattgacaagtggtttctttacaagatgcgggatatcctgaacatggaaaaaactctcaagggacttaactcagagagcatgaccgaagagactctcaaaagggccaaggaaatcgggttctccgataagcagatatcgaagtgtcttggcttgacggaagcccagactcgcgaactgcggctcaagaaaaacattcacccctgggtcaagcagattgataccctggccgccgagtacccgtctgtgaccaactatctctacgttacttacaatggtcaggagcatgacgtcaactttgatgaccatggaatgatggtgctgggatgcggaccgtaccacatcggatcaagcgtggagtttgactggtgtgccgtctccagcatccgaactctgcgccagcttggaaagaaaaccgtggtggtgaactgtaacccagaaactgtgtcgactgattttgatgaatgtgataaactttactttgaagaattgagcctggaacgaatcctggacatttaccaccaggaagcatgcggaggctgcatcatttccgtgggtggacagattccaaataacctggcggtcccactctacaagaacggggtcaagatcatgggtactagcccacttcaaattgatagggcagaggacaggtcaatcttttcggcagtgcttgatgaactcaaagttgcacaagcaccttggaaagcagtgaacactcttaacgaagcactggagttcgccaagtcagtcgattacccgtgcctgctgaggccttcatatgtgctttcgggatcggcaatgaacgtggtgttttcggaagatgaaatgaagaagtttcttgaagaggcgactcgggtgtcgcaggaacaccctgtggtgcttacgaagtttgttgaaggagcccgcgaagtcgaaatggacgcagtgggaaaggacggacgcgtcatttcccatgcaatcagcgagcatgtcgaagatgcaggtgtgcactccggagacgcgactctcatgctccctactcagaccatctcacaaggggccatcgaaaaggtgaaggatgccacccggaagattgcaaaggctttcgcaattagcggtccgtttaatgtgcaattcctggtgaaaggaaacgacgtcctggtgatagaatgtaaccttagggcatcgcgctcctttccttttgtcagcaagacccttggggttgactttattgatgtcgcaactaaagtcatgattggagagaatgtcgatgaaaaacatctgcctaccctggaccatcccatcatccctgctgattacgtggcaatcaaggcacctatgttttcctggccgcgtctgcgcgacgcagacccaatactgagatgtgagatggcatccactggagaggtggcctgctttggtgagggaattcacactgcatttctcaaggcgatgctgtcaaccggcttcaagattccacaaaaggggatcctgatcggcatacaacagtcttttcgcccacgctttctgggagtggcagaacaactgcataacgagggtttcaaactttttgcaaccgaagcaacttccgactggttgaatgcaaacaacgtgcctgcaaccccagtggcttggccttcccaggagggtcagaatccatccctttcttcgatccggaaacttatccgggatggcagcattgatctggtgattaaccttcctaacaacaacactaagtttgtgcatgataactacgtgattagacgcactgccgtggatagcgggattcctctgcttactaatttccaagtgaccaaactgtttgccgaggcggtgcaaaaatcccgtaaggtggattccaagagcttgtttcattacaggcaatatagcgcggggaaggccgca

SEQ ID NO: 43499 - DNA, 4500 bp, Artificial Sequence
  derived and/or modified sequence
atgacccgcatcctgactgcgttcaaagtcgtgagaacgctgaaaactggcttcggttttactaatgtcaccgctcatcaaaagtggaaattcagccgacctggaattcgattgctgtcggtcaaggctcagactgcacatattgtcttggaggacggtacgaagatgaaaggatactcgtttggtcacccgtcgtctgtggccggcgaagtcgtctttaacactggtcttggggggtacccagaagccattaccgatcctgcctacaaaggccagatcctcacgatggccaacccgattattggaaacgggggtgcaccagacaccaccgccttggacgaacttggactgagcaagtatctcgagtccaatggtataaaggtgtccggactgcttgtgctggattactcgaaggattacaaccactggctcgcaaccaagtcccttggccaatggctgcaggaagagaaggtgcccgcgatttacggagtggatactagaatgctcacgaagattatcagggacaagggtaccatgctggggaaaattgaattcgaggggcagccagttgattttgtggaccccaataagcaaaaccttatcgcagaggtgtctactaaggacgttaaggtgtatggaaaaggtaaccccactaaggttgtcgctgtcgattgtggtattaagaataatgtgatcagactgctcgtgaagcgtggagccgaagtccatctggtgccttggaaccatgactttaccaagatggagtacgatggaattctgatcgcaggaggaccaggcaatcctgcactggcagaacctttgatccaaaatgtgcgtaagatactcgaatcggaccgcaaagaacctcttttcggcatatcaactggtaatctgattactggtcttgcagcaggagcaaagacctataagatgagcatggctaacagaggacaaaaccagcccgtgcttaacataactaacaagcaagcgttcataaccgcacaaaaccacggttatgcgcttgataacactcttcctgccggatggaagcccctttttgtcaatgttaacgaccaaaccaatgagggaatcatgcatgaatctaagccgtttttcgctgtgcaattccatccagaagtcacccctggccctatcgataccgagtacctgtttgatagctttttctcactgataaagaagggcaaggccactaccatcacttcagtgctgccaaagcctgcacttgtggcctcccgagtggaagtctccaaggtgcttatccttggatcgggaggactgtcgatcggacaggcaggagaattcgactactctggatctcaagctgtgaaagccatgaaagaggaaaacgttaagaccgtccttatgaacccgaatatcgcatcagtccaaacgaacgaggtgggactgaaacaggcagataccgtttacttcctgccaattactcctcagtttgttaccgaagtgatcaaggcagagcaacccgacggactgattcttgggatggggggtcagactgcactcaactgtggagtggaacttttcaagcgcggtgttttgaaggaatacggtgtcaaggtgcttggtacttccgtggaatcaataatggccaccgaagatagacaattgttctcagataaactcaacgagattaacgaaaagattgcaccgtcatttgcagtggagtctattgaagatgcactgaaggctgcagacaccatcggttaccctgtgatgattcggtcggcctacgcactcggaggattgggttcgggaatatgtcccaaccgcgaaacccttatggatttgagcacgaaagcatttgcaatgactaaccaaatcctggtcgagaaatctgtcaccggttggaaggaaattgagtatgaagtggtgcgagatgcggatgacaattgcgtcaccgtgtgtaacatggagaatgtggacgcaatgggcgtgcacactggcgattcggtcgtggtggcacctgcacaaaccctctccaacgccgagtttcaaatgctgcgccggacctcgatcaatgtcgtgaggcatctgggaattgtgggcgaatgcaatattcagtttgcacttcatcctacctcgatggagtactgcattattgaggtgaatgcaagactgtcgagatcgtccgcactcgcgtcaaaggcaaccggctaccctctcgcttttatcgcagcaaaaatcgcccttggtattccacttcccgagataaagaatgtggtgtcaggcaaaaccagcgcttgttttgagccttcactggattacatggtgacgaaaattcctcgttgggacctggataggtttcacggaaccagctcccgaatagggagctcgatgaagtcggtgggagaggtgatggcgattggtcgaacctttgaggagagctttcagaaggcacttcggatgtgtcacccgtcgattgaaggattcaccccccggcttcctatgaacaaggagtggccgagcaacctggaccttagaaaagaactgtccgaaccctcctcgactaggatttacgccattgcaaaagcgattgatgacaacatgagcttggacgagatcgaaaagctgacctacattgataagtggtttttgtacaagatgagagatattctgaatatggagaaaacccttaagggccttaactcagaatcaatgactgaagaaactcttaagagagccaaggaaatcggattttcggataagcaaatatcgaaatgtctgggacttactgaggcccagactcgggaactgaggctgaagaaaaacattcatccttgggtgaagcaaattgatactctggccgccgaataccccagcgttaccaattacctgtacgtgacttacaacgggcaggaacatgatgtgaactttgatgaccacggaatgatggtgcttggatgcggaccataccatattgggagcagcgtggagtttgattggtgtgccgtgagctccattaggactcttagacagctgggaaagaaaaccgtggtggtcaattgtaatcctgaaactgtgtcgaccgacttcgatgaatgtgataaactttacttcgaagaactgagcctggaacgcattctcgacatctaccaccaagaagcctgcggtggttgcatcatatccgtgggcgggcagatcccaaacaacctcgcggttcctctttacaagaatggagttaagatcatggggacttcaccgctgcagattgacagagccgaagatcgttctattttctccgcagtgctggatgaactcaaagtcgcacaggcgccgtggaaggcggtgaatacgcttaacgaagcccttgagttcgcaaagtcagtggattacccgtgtctcctccggccctcctacgtgctgtcaggctcagcgatgaacgtggtgttctccgaagatgagatgaagaagtttctggaggaggcaactagagtgtcccaggagcaccctgttgtcctgaccaagttcgtggaaggagcacgggaagtggagatggatgcagtcggaaaagatggacgtgtcatctcacacgccatctcagagcatgtggaagatgcaggtgtccatagcggcgacgcaaccctgatgctcccgacgcagaccatcagccaaggggcaattgaaaaggtcaaagatgccacccgtaaaatcgctaaggcatttgcaatttcgggacctttcaatgtgcagtttcttgtgaaaggaaacgacgtcctggtgattgaatgcaacctgcgtgcctcgcgctcatttccattcgtgtcgaaaacccttggagtcgatttcatcgatgtggcgaccaaggttatgatcggtgaaaacgtggatgaaaagcatctgcctactcttgaccacccgattataccagcagactacgtcgcgatcaaggcacccatgttttcctggccaaggcttcgagacgcagaccctatcctccgatgcgagatggcgtccactggggaggtggcatgttttggcgaggggatacatactgcatttcttaaggcaatgctctcgacgggatttaagattcctcaaaaaggaatccttatcggtatacagcaatcctttagaccaaggttccttggtgtcgcagaacaactgcataacgaaggttttaagctgtttgcaaccgaagcaacctctgattggcttaatgcaaataacgtgccagcgaccccagtcgcgtggccttcacaagaaggacagaatccaagcctgagctcaattcgcaagctgattcgcgacggttccatcgatctggtgatcaatctcccaaacaacaacactaaattcgtgcacgataactacgtcattagacggaccgctgttgatagcggtattccattgctgacgaatttccaagtcacgaaactgtttgcagaagcggtgcagaagagcagaaaggtcgattctaagtcgctcttccattacagacaatactcagccggcaaggccgct

SEQ ID NO: 43500 - DNA, 4500 bp, Artificial Sequence
  derived and/or modified sequence
atgacaagaattttaacagcatttaaggtagttagaacattaaagactggatttggttttactaatgttactgcacatcaaaaatggaaattttctagaccaggtattagattattaagtgttaaagcacaaactgcccatattgttttagaagatggaactaaaatgaaaggttattcatttggacatccatcttcagttgcaggagaagttgttttcaatacaggattaggtggatacccagaagctattactgatcctgcttacaagggacaaattttaactatggcaaatccaattattggaaatggaggagctccagatacaactgctctcgatgaactcggactttctaagtaccttgaatcaaatggaattaaagttagtggacttctcgttcttgattattcaaaagattataatcattggcttgcaacaaaatcattaggacaatggcttcaagaagaaaaagttccagcaatttatggagttgacactagaatgttaactaaaattattagagataaaggtacaatgttgggaaaaattgaattcgaaggtcaaccagttgattttgtagatccaaataaacaaaatcttattgccgaggtttctactaaagatgttaaagtctacggaaaaggtaatccaactaaagttgttgctgtcgattgtggtattaaaaataatgtcattagacttttagttaaaagaggagcagaagtacatttagttccatggaatcatgattttacaaaaatggaatatgatggaattttaattgctggagggccaggaaatccagctttagcagaacctttgattcaaaatgttagaaaaattcttgaatctgacagaaaagaaccattatttggtatttcaacaggaaatttaattactggtcttgcagcaggagctaaaacatataaaatgagtatggctaatagagggcaaaatcaaccagttcttaatattacaaataaacaagcttttattactgctcaaaatcatggatatgctttggataatactctaccagcaggatggaaacctttatttgttaatgttaatgaccaaactaatgaaggaataatgcatgaatcaaaaccattctttgctgtacaatttcatccagaagtaactccaggacctatagataccgaatatttatttgattcatttttttctttaattaaaaagggtaaggcaactactattacatcagtattaccaaaaccagcattagttgcttcaagggttgaagtttctaaagttttaattttagggagtggtggactttctataggacaagctggagaatttgattattctggttcacaagctgtaaaagcaatgaaagaagaaaatgttaagactgttttaatgaatccaaatattgcaagtgttcaaacaaacgaagttggattgaagcaagcagatactgtttattttttaccaattactccacaatttgttactgaagttattaaagctgaacaacctgatggtttaattttaggaatgggtggacaaacagcacttaattgtggagttgaattatttaaacgaggtgttcttaaggaatatggagttaaagttcttggaacttctgttgaatctataatggctacagaagatagacaattgttttcagataaattaaatgaaattaatgaaaaaattgcaccaagttttgcagttgagagtattgaagatgctttaaaagctgctgacacaattggatatccagttatgattagaagtgcttatgcattaggtggacttggtagtggaatttgtccaaatagggaaactttaatggatttatcaactaaggcttttgctatgacaaatcaaattctcgttgaaaaatcagttacaggatggaaggaaattgaatatgaagttgttagagatgctgatgataattgtgttacagtgtgcaatatggaaaatgttgatgccatgggagttcatacaggagattcagtagttgttgcaccagcacaaactttaagtaatgcagaattccaaatgttaagaagaacatcaattaatgttgttcgacatttaggaatagtaggtgaatgtaatattcaatttgctttacatccaacatcaatggaatattgtattattgaagttaatgcaagattgtctcgaagttcagctctagcctcaaaagcaacaggatatccacttgcttttattgcagctaagattgctctaggtattccattgcctgaaataaaaaatgttgtttcaggtaaaacttctgcatgctttgaaccttcattagactatatggtaactaaaataccaagatgggatttagatagatttcatggaacatcatctagaattggatcttcaatgaaaagtgttggagaagtaatggctattggtagaacatttgaagaatcttttcaaaaagcacttcgtatgtgtcatccaagtattgaaggttttactccaagattaccaatgaataaagaatggccatcaaatcttgatttaagaaaagaattatcagaaccaagtagtactcgaatttatgctatagctaaagctattgatgataatatgtctcttgacgaaattgagaagcttacatatattgataaatggtttttatataaaatgagagatattttaaatatggaaaagacacttaaaggtttaaattcagaatcaatgactgaagaaactctaaagagagctaaagagattggatttagtgataaacaaatttctaaatgtttaggtttaacagaagctcaaactagagaattacgattaaaaaaaaatattcatccatgggtcaaacaaattgatacattagctgctgaatatccatcagtcacaaattatctttatgttacttataatggtcaagaacatgatgttaatttcgatgatcatggaatgatggttttaggatgtggaccttatcatattggttctagtgttgaatttgattggtgtgctgtttcctcaatacgtacattgcgacaacttggaaagaaaacagtagtagttaattgtaatccagagacagttagtactgatttcgatgaatgtgataaattatattttgaagaattatctttggaaagaattttagacatttatcatcaagaggcatgtggaggatgtataatttctgttggaggacaaataccaaataatctcgctgttccattgtataaaaatggtgttaaaattatgggaacttcaccattgcaaattgacagggcagaagatagatcaatcttttctgccgttctagacgaacttaaagtagcacaagctccatggaaagctgttaatactcttaatgaagcattagaatttgctaaatcagtagattacccatgtctacttagaccatcatatgttttatctggatcagctatgaatgtggttttctctgaagatgaaatgaagaaatttttagaagaagcaacaagagtttctcaagaacatccagtcgttttaacaaaattcgtagaaggagctagagaagtagaaatggatgctgtaggaaaagatggtagagttattagtcatgctataagtgaacatgtagaagatgctggtgtacattcaggagatgcaacattaatgcttcctactcaaactatttctcaaggtgctattgagaaagttaaagatgcaactaggaaaattgcaaaagcttttgctatttctggtcctttcaatgttcaatttttagtaaaaggaaatgatgttcttgttattgaatgtaatttacgagcttcaagatctttcccatttgtttcaaaaacattaggagttgattttattgatgtggctacaaaagtaatgattggtgaaaatgtcgatgaaaaacatcttcctactttagatcatccaattattccagcagattatgttgctattaaagctcctatgttttcttggcctcgtttacgagatgctgaccctattttaagatgtgaaatggctagtacaggagaagttgcatgttttggtgaaggaattcataccgcttttttaaaggctatgctttctactggttttaaaattccacaaaaaggtatattaattggaattcaacaaagttttagaccaagatttttgggagttgcagaacaattacataatgaaggtttcaaactttttgcaactgaagctacaagtgattggcttaacgctaataatgttccagcaaccccagttgcatggccaagtcaagaaggtcaaaatccttcattatcttcaattagaaaattaattagagatggatccattgatcttgttataaatttaccaaataataatacaaagttcgttcatgataattatgttattagaagaacagctgttgattcaggtattccattgttaactaatttccaagttactaaattatttgctgaagcagtacaaaagtcaagaaaagttgatagtaaatctctttttcattatagacaatatagtgctggaaaggcagct

SEQ ID NO: 43501 - DNA, 4500 bp, Artificial Sequence
  derived and/or modified sequence
atgacccggatcttgaccgcgttcaaagtggtgagaactctcaagactggttttggatttactaatgtgactgcccaccagaagtggaagttcagcagaccagggatccgacttctgagcgtcaaggctcagactgctcacatcgtgcttgaggacggtaccaagatgaagggctattcgttcggccacccgtcaagtgtcgccggagaagtggtgtttaacacgggactgggaggctacccggaagcaatcaccgacccggcctacaagggccaaatcctgactatggccaatcccattatcggaaacggaggagcgccggatactaccgccttggacgaattgggactgagcaaataccttgaatcaaacggaatcaaagtgtcaggactcctggtgttggattacagcaaggactacaaccattggctggccaccaagagcctgggtcaatggctgcaggaagaaaaagtgccagctatctacggagtggacactagaatgctgactaagatcatccgcgataagggcactatgttgggcaaaatcgagttcgagggccagccggtggattttgtggatccaaacaaacagaacctgatcgcggaggtgtcgaccaaggacgtcaaggtctacggaaagggtaatcccaccaaggtggtggcggtcgattgtggaatcaaaaacaatgtgattagacttctggttaaacggggagcagaggtgcatctggtgccgtggaatcacgacttcactaaaatggagtacgatgggattctgattgccggaggcccgggaaatccggcgctcgcggagccactgattcaaaatgtgcggaaaatcttggaaagcgataggaaagaaccactgttcgggatttcgactggaaacctgattaccggactcgcagcaggagcgaaaacctacaagatgtctatggctaaccgcggccagaatcagccggtcctcaacattaccaataagcaggccttcatcaccgcgcagaaccacggctacgcactcgacaacacgctgccagcgggatggaagcctctgttcgtgaacgtgaatgatcagactaatgaggggatcatgcatgaatcgaagccgtttttcgccgttcaattccatcccgaggttacgcccgggccgatcgacaccgaatacctgtttgacagtttcttctccttgataaagaaaggaaaagccactaccatcacttcggtgttgccgaagcctgccctggtcgctagccgcgtcgaagtcagcaaggtgctcatcctcggcagcggcggactgtcaattgggcaggccggcgaattcgactacagcggatcacaagcagtcaaggccatgaaggaggaaaacgtgaaaactgtgcttatgaaccccaatatcgcctcggtccagacgaatgaggttggactcaagcaggcagatacggtttacttcctgccaataacccctcagtttgtcacggaggtcattaaggcagagcagccagatggactcatccttggaatggggggacagaccgcgctgaattgcggagtggaattgttcaagagaggagtactcaaggagtacggcgtcaaggttttgggaacctcagtggaaagcatcatggcgaccgaggacagacagctcttctcagacaagctgaatgagatcaatgaaaagattgccccgagcttcgccgtggaaagcattgaggacgccctcaaagccgcggacaccatcggataccctgtgatgatccgctccgcctacgccctgggcggcctgggatccggtatctgtcctaatagggaaacgctgatggaccttagcaccaaggcgttcgcaatgactaatcaaatccttgtagaaaagtcggtgaccggatggaaggaaatcgaatacgaagttgtccgggacgcggatgacaactgcgtgaccgtgtgcaatatggagaacgtggacgccatgggagtccacaccggagatagcgtggttgtggcgcctgcccagaccctctccaatgccgagttccagatgctccggcgcacttcgattaatgtggtccggcaccttggcatcgtgggtgaatgtaacatccaattcgcgctccaccccacgtcaatggagtattgcatcattgaagtcaacgcaaggctctctcggtcatccgccctcgcctcaaaagccaccggatacccactcgcattcatcgccgccaagatcgcacttggaatcccccttccggaaatcaagaatgtggtgagcggtaagacttcggcctgcttcgaaccctccctggactatatggtcactaagatcccaagatgggatctcgacagattccatgggacttccagtcggattgggagctcgatgaagagcgtgggggaggtgatggcaattggacgcactttcgaagaatcattccagaaggctctgagaatgtgccacccgtctatcgaagggtttaccccacggctcccgatgaacaaggagtggccaagcaacctcgatctgcgcaaggagctcagcgaaccatcatccacgcgaatatacgcgatcgctaaggccatcgacgataacatgtcgctggacgagatcgaaaaactgacttacatcgataagtggttcctgtacaaaatgcgggatatcctgaacatggaaaaaactctgaaaggactgaacagcgaaagcatgactgaggagactctgaagagggccaaggagatcggattctcggacaagcaaatctcaaagtgccttggattgaccgaagcgcagaccagagaactgcgcctcaaaaagaacatccatccgtgggtcaaacaaatcgacactttggcggccgagtatccatccgtgaccaactatttgtacgtgacttacaacggccaggaacacgatgtgaacttcgatgaccatggtatgatggtgcttggatgcggaccataccacatcggttcttccgtcgaattcgattggtgcgctgtgagctccatccggacccttcgccaacttggaaagaaaaccgtagtggtgaactgcaatccggaaactgtgtccaccgacttcgacgaatgtgacaaactgtacttcgaagaattgtccctggaacgcatcctcgacatttaccaccaggaggcatgtggaggatgcatcatctcagttggtgggcagatacctaacaatctcgccgtcccgctctataagaatggagtgaagatcatgggaacgtcgcccttgcagattgaccgcgccgaggatagatcaatcttctccgccgtgttggacgagctgaaagtggcacaggcgccatggaaggcagtgaacaccctcaatgaggcgctcgagttcgcaaagagcgtggactacccatgcctgctgcgcccatcatacgtgctgtcaggaagcgctatgaacgtggttttcagcgaggatgagatgaagaaattcctggaagaggcaaccagggtgagccaagaacatccggtggtcctgacgaaattcgtggagggggccagagaggtcgaaatggacgcagtgggtaaggatggccgggtgatctctcatgcgatctcggagcatgttgaagatgccggagtccactcaggagacgccaccctcatgctgccgacgcaaactatctcccagggagccatcgagaaggtgaaggatgcgacccggaagattgctaaagcgtttgcaatctcgggaccttttaacgtgcagtttttggtgaagggcaatgacgtgctggtgattgaatgcaacctccgcgcctcgcggtccttcccctttgtgagcaagactttgggggtggacttcatcgacgtggcaaccaaggtgatgattggagagaacgtcgacgaaaagcacctcccgaccctggaccaccctatcattccggcagactacgtggcgatcaaggctccgatgttcagctggcctagactgagggacgcggatccgattctgagatgcgagatggccagcactggcgaagtcgcctgttttggggagggtatccacactgcgtttttgaaggcaatgctctccacgggatttaagatcccccagaaagggatcctgatcggaatccagcagagctttcggccgaggttcctcggcgtggctgaacaactgcacaacgagggcttcaagctgttcgcaaccgaggccacctccgattggctcaacgcgaacaacgtgccagcgactccggtcgcttggccttcgcaggagggccaaaacccgtcgctgagctcgatcagaaagttgattcgggacggctcaatcgacctcgtcatcaacctgccaaacaacaatactaaattcgtgcatgataactacgtgatccgcagaactgctgtggactcgggaatcccgctgcttactaacttccaggttactaagctgttcgccgaagccgtccaaaaatccagaaaagtggacagcaagtcactgtttcattaccgacaatactccgcggggaaagccgca

SEQ ID NO: 43502 - DNA, 4500 bp, Artificial Sequence
  derived and/or modified sequence
atgacccggatactcacagcttttaaggtggtgagaactttaaaaacaggatttggtttcacaaacgtgaccgcccaccagaagtggaagttctcccgcccgggcattcggttactgtccgtaaaagctcagacagcccatattgttctggaagacggcacaaaaatgaaggggtactccttcgggcatccctcctccgttgctggcgaggtggttttcaatactggtctggggggctatcctgaagctataacagatccagcttataagggccaaatccttaccatggcaaacccaatcatcgggaacggcggcgccccagacacaaccgccctggacgagctgggtttgtcaaaatatctggagagtaacggcataaaagtttcagggctgctggtgctggactacagtaaggactataatcattggctggctaccaaatccctggggcagtggctccaagaagagaaggtgcctgctatctatggggtggatacacggatgctgactaagataattagagataaaggcacaatgttaggcaaaatcgaatttgagggacagccggtcgattttgtggatcctaacaagcagaacttgatcgcagaggtgagcacaaaggatgtcaaggtttatggaaagggcaatccaactaaggtagttgccgtcgactgcggcattaagaataatgttatccgtctgctggtcaaaaggggtgccgaagttcacttagtgccatggaatcatgatttcaccaagatggagtacgacggcatactcatcgccggaggcccaggtaatcccgcactggctgagcccctgatacagaatgttagaaaaatcctggaaagcgacagaaaggaacccctcttcggcatatccaccggtaatttgatcactggcttagcagccggggccaagacctacaagatgagtatggctaatcgggggcagaaccaaccagttctaaacataaccaataaacaggcctttattacagctcagaaccacggctatgcactcgacaacactctgcctgccggctggaagcccttattcgttaacgtgaatgaccagaccaacgaggggataatgcatgaaagcaaacctttttttgccgttcagtttcaccccgaggtgacacctgggccaatagacactgaatatctttttgactcttttttttctctcatcaagaaaggaaaagcaactaccataaccagtgtcctgccaaaacccgctttagttgcctccagggtggaagtgagcaaggttttaattttagggtcaggcggcctttccatcggccaggcaggcgagttcgactacagtggtagtcaagccgtcaaggccatgaaggaagagaatgttaaaaccgtgctgatgaatccaaacatcgcaagcgttcagaccaacgaggtggggctcaagcaggcagatacagtgtattttctgccaatcaccccacagttcgtgaccgaggtgatcaaggccgagcagcccgatgggctgattctgggcatgggggggcagaccgctttgaactgcggtgttgagctgttcaaacgcggggtcctgaaggagtatggggtgaaggtgctgggcacctctgttgagtccattatggcaacagaagaccgccagctattctctgataagcttaacgaaattaacgaaaaaattgctccctctttcgcagttgagtctatagaagacgctctgaaagcagcagataccatcggatatccagttatgatcagaagtgcttatgctctgggcggtctcgggtccggtatctgcccaaatagagagactctgatggacctttccaccaaggccttcgccatgacaaatcaaatcctggtggaaaagtccgtcaccgggtggaaagagattgagtacgaggtggtgagagacgctgacgataactgcgtgactgtgtgtaatatggagaatgttgacgctatgggcgtgcacacaggggacagcgtggtggtcgcccccgcccaaacactgagtaatgctgagtttcaaatgttacgaaggacttcaataaacgttgtgcgccatctggggatcgtgggggagtgcaatatccagttcgcccttcaccccacctcaatggaatattgtatcattgaagtcaatgctcgactgtctcggtccagtgcactggccagtaaggccaccggatatccactcgcatttatcgctgctaagatcgccttagggatacccctgcccgaaatcaagaacgttgtcagcgggaagacaagcgcctgctttgagccatctctggactatatggtgaccaagataccccgctgggatctcgaccgcttccatgggaccagcagtaggatcggctcctcaatgaagagtgttggggaggtgatggcaatcggccgcacatttgaggagtcctttcagaaggccctcagaatgtgccacccaagcatagagggctttactcctcgcttgcccatgaacaaggagtggccctcaaacctggatttacgcaaagaactaagcgagccaagcagcacaaggatctatgctattgctaaagctatcgatgataacatgagccttgacgagatagagaaactgacctacattgacaagtggttcctgtacaaaatgcgggacatcttaaacatggagaagaccctaaagggtctaaactcagaaagcatgaccgaagagacactgaagcgagccaaggaaataggcttctctgacaagcagatttccaagtgtctcggactcacagaggcccaaacaagagagctgcgtctgaaaaaaaatatacatccctgggtgaagcagatcgatacactggccgcagaataccctagcgtgacaaactacctctacgttacctataacggtcaggaacatgatgtgaatttcgacgaccacgggatgatggtgctgggttgtggcccttatcatatcggctctagcgtggaatttgattggtgtgccgtgtcttccattcggaccctccgccaactcggaaagaaaaccgtcgtggttaattgcaacccagagacagtcagtacagactttgatgagtgtgacaaactgtacttcgaggagttatctttagagaggatcctggacatctatcaccaagaagcatgtggagggtgcattatcagtgtgggcgggcagatccccaataatttggccgtgccactgtacaagaatggggtgaagattatgggaacaagcccactgcaaatcgatagggctgaggatagaagcatttttagtgccgtgctggatgagctgaaagtggcccaggccccatggaaagctgtgaatacccttaacgaagctttagaattcgccaagagtgtggactacccatgcctgttaaggccatcttatgtcctctcaggttctgccatgaacgtggtcttctccgaggacgagatgaagaagttcctggaggaggccacccgtgtgagtcaggaacaccccgtcgtgctaaccaaattcgtggaaggggctcgcgaagtagagatggacgccgttggaaaggatggccgagtgatatctcacgccatcagcgaacacgtggaggatgccggggtgcattccggcgacgccacactcatgctccctacccagacaataagtcagggcgccatcgagaaggtgaaagatgctacacggaagatcgcaaaggcttttgctatctctggaccattcaatgtccaatttctggtgaaggggaacgatgtgctcgttattgagtgcaacttacgggccagcaggtcctttccatttgtcagcaagacactgggggtggactttatagacgttgcaaccaaggtgatgattggcgaaaatgtcgacgagaaacatctcccgaccctggaccatccaatcatacccgcagattatgtggccataaaagctcctatgttctcttggccacgcctgagagacgctgaccctatattgcggtgtgagatggcatctacaggggaggtggcatgttttggggagggcatccataccgctttcctaaaagctatgctgagcaccggcttcaaaatcccccagaagggaattctgattgggatacagcagtccttccgtcccagattcctgggcgttgccgaacaactgcacaatgagggatttaaactgtttgccacagaggcaacatctgactggctgaatgctaataatgtgcccgccacccctgtggcatggccttctcaagagggccagaatccttccttatctagcataaggaaacttattcgtgacggctcaattgatctggtgattaatctacccaacaataatacaaaatttgtccacgataattatgttatcagacggacagcagtggattctgggattcctctgttaaccaatttccaggtgactaagctttttgccgaggcagttcagaaaagtcgtaaggtggactccaaaagcctatttcactatcgacagtatagcgctgggaaggccgcc

SEQ ID NO: 43503 - DNA, 4500 bp, Artificial Sequence
  derived and/or modified sequence
atgactcgcatccttaccgcattcaaggtggtgcgtacgctcaagaccggattcggattcactaacgtcactgcgcatcaaaagtggaagttctcaaggcctggcattcggttactgtccgtcaaagcccagacggcacatatcgttctcgaagatgggactaaaatgaaaggctactcttttggacacccatcctctgtagccggggaagttgtcttcaacactgggctgggaggatatccggaagccatcactgaccccgcctacaaaggtcagatactcaccatggcaaatccaataatcggaaacggaggcgctcccgacacgacagccctggacgaattagggctgagcaaatacctggaaagcaacggcataaaagtcagcggcctgcttgttctggactactcaaaggattataatcattggcttgcgactaagagcctgggtcagtggctgcaggaagaaaaagtacccgccatttacggggtggacacacgcatgctgaccaagatcattcgagataagggtacaatgttaggtaaaatcgaattcgagggacagcccgtggacttcgtggatccaaacaagcaaaacctgattgctgaggtttctactaaggatgtaaaggtctacggaaagggtaacccaacaaaggtcgtcgccgtagactgtgggatcaagaataatgtgatcaggttattggtgaagcggggggctgaggtacacctggtaccttggaaccatgatttcacaaaaatggaatacgatggaatcctgatagccggcgggcctggtaatccagccctcgcagagccgttgatacagaatgtacgcaagatcctggaaagtgaccgcaaggagcccctatttgggataagcactggcaatcttatcacaggacttgccgctggggcaaaaacatacaaaatgtcgatggcgaataggggccaaaaccagcccgtgctgaacattaccaacaaacaggcttttattaccgcccagaatcacggatacgcactcgacaacacactgccagccggttggaaacctctgttcgtcaacgtcaatgaccagacaaacgagggcattatgcatgaatcgaagccatttttcgccgttcagtttcaccccgaggtcaccccgggccctattgacaccgaatacttgttcgacagctttttctcactcattaagaagggtaaggcaaccaccattaccagcgttttgcccaagcccgcgctggtggcttcccgggtggaggttagcaaagtactgattcttggatctgggggtctgagtattggacaggctggtgagttcgattatagcggaagtcaagcagttaaagctatgaaagaggaaaatgtgaagactgttctgatgaatccaaatattgcatccgttcagaccaatgaggtgggcctgaagcaggccgacactgtctatttcctccctattactccccagttcgtgactgaagtaattaaggctgagcaaccagatggactgatcctgggaatgggcgggcagaccgctcttaactgcggcgtggagctgttcaagcggggagtgttaaaggagtatggcgtgaaagtcttggggacctctgtcgagagtataatggccactgaggacagacagctgttttccgacaagctcaacgagattaatgaaaaaatcgctccatcctttgcagtcgaatccatcgaggatgcccttaaggccgctgacaccatcggctaccctgtcatgattaggagcgcttacgccctcggagggctcggcagcggcatatgtccaaacagggaaactctgatggacttgtctaccaaagcattcgccatgaccaaccagatactggtggagaagagtgttaccggttggaaagaaatcgagtacgaggtggtgagggatgccgatgacaactgcgttacagtgtgcaatatggagaacgttgacgctatgggtgtgcatacaggggattccgtcgtggttgcccccgctcagacactctccaatgccgagttccaaatgttacgcagaacctccataaacgtagttagacacctgggaatcgtgggcgagtgcaatatccagttcgcgctgcaccccacgagtatggagtattgcattatagaagtcaacgcccgcctgtctcgatcctcagcgctggcttccaaggcgactggctatcctttagccttcatcgcagctaaaatcgccctcgggatacccctgccggagataaagaacgtggtgtcaggtaagaccagcgcgtgcttcgagccgtcattagattatatggtcactaagatccctcgatgggacctcgatagatttcacgggacttcctccaggattggatcatcaatgaagtccgtgggcgaagtgatggcgatcggcaggacattcgaggagtcatttcagaaagcactgagaatgtgtcatccaagcattgaaggcttcacaccaaggcttccaatgaataaagagtggccaagcaaccttgatcttcggaaagagctgagcgagcccagctccaccaggatttacgccatagctaaggccatcgatgataatatgtccctcgatgaaattgagaagctcacatacatagataaatggtttttgtacaaaatgcgagacatccttaacatggaaaaaactctgaagggtttgaacagcgagtccatgacagaggagactcttaaacgagccaaagagatagggttctcagacaaacaaataagcaaatgcctggggctaacggaagcccagacacgcgagctccgtctgaaaaagaatatccatccctgggtgaaacaaatcgacaccctggccgctgagtacccctccgtgactaattacctctacgtgacctataacggccaggagcacgacgtcaattttgatgatcatggtatgatggtgctcggatgtggcccttaccacataggcagtagcgtcgaatttgattggtgtgcagtgtcatcaatcaggactcttagacaactgggaaaaaagactgtcgtcgtaaattgcaaccctgagactgtcagtaccgatttcgacgaatgcgacaagctgtacttcgaggagctgtcattagagcgcattcttgatatctatcatcaggaggcttgtgggggctgcatcattagcgttggcgggcagatcccgaataacctggccgtcccactctataagaacggagtaaaaatcatgggcaccagccctctccagatcgaccgtgcagaggatagatcgatattctctgcggtgctggatgagctgaaggtggctcaggccccatggaaggccgtgaacaccctgaatgaggctctggagttcgccaagtctgtggactacccatgtttgttacggcctagctacgttttgtctgggtcagctatgaacgtagtcttttccgaagatgaaatgaagaagttcctggaagaggctactcgagttagtcaggaacatccagtcgtccttacaaaattcgtagagggtgcccgggaggtcgaaatggacgctgttggaaaggatggtcgcgtcatctcacacgccatctcggagcacgtggaggatgctggggttcattccggggacgctacacttatgctgcccacacagaccatctctcagggagctatcgaaaaggttaaggatgcaacccgcaaaattgcgaaggcatttgcaatttcaggcccgtttaacgtacagttcctggtgaaggggaatgatgtgctggtgatcgaatgtaatctgagggcatcacggagcttcccttttgtctctaagactctcggcgtagacttcattgatgtggccacaaaggtgatgatcggggagaatgtggatgaaaagcacctgcctacgttggatcatccaatcatccctgccgactatgtagctatcaaagcacccatgttttcctggcctcggctccgggatgctgatcctattctgcgctgcgagatggcatccacgggagaagtcgcttgtttcggtgagggaatacatactgctttcctcaaagctatgttgagcactggcttcaagattcctcagaaaggcatcctcatcggaatccagcagagttttcgcccacggttcctgggtgtggccgaacagctccataatgaggggttcaaactgttcgcgactgaagccacgagcgattggctcaacgccaataacgtgcccgctacccctgtggcatggccctcacaggagggccaaaatcctagtctctcttctatccgcaagctcatccgggacggaagtatcgacctcgtcatcaatcttcctaacaataataccaaattcgttcacgacaactacgtgatcaggagaaccgctgttgattcaggaatccctctcctcacgaactttcaggtcacaaaactgttcgctgaggctgtgcagaaatcacgcaaggtggattcaaagtcactgttccactataggcagtactcagccggcaaagctgcg

SEQ ID NO: 43504 - DNA, 4500 bp, Artificial Sequence
  derived and/or modified sequence
atgacccgtatacttaccgctttcaaagtcgtgcgcactctgaaaactggtttcggctttaccaacgtgaccgcacatcagaagtggaagttcagcagaccaggtatacgcctgctttccgtgaaggcgcagaccgcacatattgtacttgaagatgggactaagatgaagggatattcttttggacatccgagctccgtggcaggggaggttgtgttcaatactggcctcggaggataccccgaggcgatcactgacccagcatacaagggacagattctcactatggccaatccaatcattggcaacggaggtgctccggatactactgccttggacgaacttggtctttcgaaatacttggagtcgaatggaataaaggtgtcaggactgctcgtgctcgattactcaaaagattacaaccattggttggcaaccaagtccttgggacagtggctgcaagaagagaaggtccctgcaatttacggcgtcgatactcgcatgttgactaagattattcgcgacaaaggtaccatgctgggaaagatcgagtttgaagggcagcctgttgactttgtggatcctaataagcaaaatctgattgcagaagtgtcgaccaaggacgttaaagtctacggaaagggaaaccctactaaggtggtcgctgtcgattgcggcatcaaaaacaatgtgatcaggctcctggtgaaaaggggggcggaagtgcatctggtcccatggaaccacgattttaccaaaatggagtacgacggtattctcatagcaggaggacccgggaaccctgccctggcggagccacttattcaaaacgtccgcaagattcttgaaagtgaccgaaaggagccactctttggaattagcaccggaaatctgattactgggctcgcagcaggcgcaaagacttacaagatgagcatggcaaacagaggccaaaaccaaccggtgcttaacatcacgaataaacaggccttcattactgcgcagaaccatggttacgccctcgacaacactcttcccgcaggttggaagccactttttgtgaatgtcaacgaccaaaccaacgaaggtattatgcatgagagcaaaccctttttcgctgtccaatttcatccggaagtgactccaggccccatcgacactgaatacctgttcgacagtttcttttcgctgatcaaaaagggtaaggcaaccacgattacctcagtactgccgaaaccggcccttgtcgcatcccgggtggaagtatcgaaggtgctgattctcggatcaggcgggctcagcattggacaagcaggagaattcgattattctggatcgcaggcagtgaaggcaatgaaggaagaaaacgtcaaaactgtgttgatgaaccctaacatcgcttccgtccaaaccaatgaagtcggcctcaagcaggcagatactgtctactttcttcccatcaccccccagtttgtgaccgaagtgattaaagcagagcaacctgatggactcatcctgggtatggggggccaaaccgcgttgaattgcggcgtcgaattgtttaagcgcggggtccttaaggaatacggagtgaaggttcttggaacctccgtagaatcgattatggccaccgaagatcggcagcttttttcggataaacttaatgagataaacgaaaagattgcacctagcttcgctgtggagagcattgaagatgcactgaaggcagccgacaccatcggataccccgtgatgattcgttctgcctacgcacttggcgggctcggtagcggcatttgtcctaaccgcgagacgctgatggatctgtcgactaaggcctttgctatgactaaccaaatactcgtcgagaagtcggtcacgggttggaaggaaatcgagtacgaagtggtgagagatgcagacgataattgtgtgaccgtgtgtaacatggaaaacgtggatgccatgggtgtgcatactggagatagcgtggtggtggcgcctgcacagaccttgtcgaatgcagagtttcaaatgctgcggagaacttccataaatgtcgtgcgtcatctgggtatagtgggagaatgtaacattcaatttgcgctgcatcctacttccatggaatattgcattattgaggtgaatgcaaggctttccagatcctccgcccttgcctctaaagcaaccgggtacccgctggcattcattgcagccaagattgcacttggtatcccactgcctgaaatcaagaacgtggtcagcgggaaaacgagcgcgtgttttgaaccctcattggattacatggtcactaagattccaaggtgggacctggaccggttccatggcacttcctcgagaataggcagcagcatgaagtcagtgggcgaagtgatggcaattggaagaacttttgaagagagcttccaaaaggcacttcggatgtgtcaccctagcatcgagggctttaccccccgacttcctatgaacaaggaatggccatccaatttggatctccggaaggaactgagcgaaccttcatcaacccgcatatacgccattgccaaggctatcgatgataacatgtcgttggacgaaatcgaaaagctgacttacattgataaatggtttctgtacaagatgagagacattttgaacatggaaaagactcttaagggtctgaactcggagagtatgaccgaagaaacccttaagcgagcaaaggagattggtttttccgacaaacagattagcaaatgtctgggactgaccgaagcacaaacccgtgagcttcgacttaagaagaatattcatccgtgggtgaaacaaattgatacgctcgccgcagaatacccctcagtgaccaattacctgtacgtgacttacaatggacaggagcacgacgtgaacttcgacgatcatggaatgatggtgctgggatgcggaccataccacatcggaagttcggtggaatttgactggtgcgcagtctcatccattcgtacccttcgccagctgggaaagaaaactgtcgtggtgaactgcaatccagaaacggtttcgactgattttgatgaatgtgataaactgtactttgaagaacttagcctggagcgcatcctcgatatctatcatcaggaagcatgtggaggttgtatcatatcagtggggggtcaaattccaaacaatctggcagtcccattgtacaagaacggagttaagataatgggcacctcacctctccaaattgatcgagccgaggataggtccatctttagcgcagtgttggacgagctgaaagtggcacaggcgccttggaaggcggtgaacactctcaacgaggcactggagttcgctaagtccgtggattacccatgtctcctccgcccatcatacgtcctttcgggaagcgcaatgaacgtggtgttctcggaggacgagatgaaaaagtttctggaagaagcaactagagtgtcccaggaacatccagtcgtgcttaccaagttcgtggaaggggcaagagaagtggagatggatgcggtcggtaaagatggaagagtcatcagccacgccatcagtgaacacgtcgaagatgcaggagtccactccggtgacgccaccctcatgcttccgacgcagaccataagccagggggcaattgagaaagtgaaggacgcgacccgaaagattgcaaaggccttcgccatctccgggccttttaacgtgcaattccttgtgaagggcaacgatgtgctggtcatcgaatgtaaccttagagcgtcgcggtccttccctttcgtgtccaagacgcttggtgtggactttatcgacgttgccactaaggttatgatcggagaaaatgtcgatgaaaagcacctgcctaccttggatcatccaattatcccagctgactacgtggccattaaggcacctatgttctcatggcctcgacttagagatgcagatccaatcctgcggtgcgaaatggcatctacgggtgaagtggcttgctttggtgaaggaatccacaccgctttcctgaaggcgatgctttcaaccgggtttaagattccacaaaaaggtatcctgatcggaattcagcaatcatttcgccctcgctttctgggcgtggccgagcaacttcataatgaaggttttaagctctttgctaccgaggcgacctcggactggcttaatgctaacaatgtcccggccacccctgttgcttggccttcgcaagagggccagaaccccagtctgtcctcaattagaaaactcattagggatggatcgatagatctggttatcaaccttcccaacaataacactaagtttgttcacgacaactacgtgatcagaagaactgcagtagattccggtatacctctgcttactaacttccaagtcacgaaactgtttgctgaggcagtgcaaaagtcgcggaaagtggattccaagtcgctcttccactaccgtcagtattcagcaggcaaggcagcc

SEQ ID NO: 43505 - DNA, 4500 bp, Artificial Sequence
  derived and/or modified sequence
atgaccagaatcctgaccgccttcaaggtggtgcgcactctcaagaccgggttcggattcacaaatgtcacggcccaccagaagtggaaatttagcaggcccggaatccggctgctttccgtaaaggcacaaaccgctcacattgtattggaggacggcacaaaaatgaaaggctattcattcgggcacccttcctctgtggcaggcgaggttgttttcaatactggactgggtggttatccagaggcgatcactgacccagcatacaagggccagattttgaccatggcaaaccccatcatcgggaacggcggcgcaccggacactacagcactcgacgagcttggcctgtccaaatatctagaatctaacggcatcaaagtctctggcctgcttgtgcttgattactccaaggactataaccactggcttgctactaaatccctcggacaatggttgcaggaggagaaggtgcccgcaatctacggtgttgatactcgcatgctcacgaagattatacgggacaagggcacaatgctcggtaaaatcgaatttgaagggcagcctgtagactttgttgatcccaataaacagaatctcatcgccgaagtgtccactaaagacgtcaaggtctatggaaaaggaaacccgacgaaagtcgtggccgtcgattgcgggataaaaaacaatgtcatccggctgctcgtgaaaaggggtgctgaagtccatctcgtgccttggaatcacgattttacaaagatggaatacgacggaatcctgatcgcgggaggccctggcaacccagctctagcggagccactgattcagaacgttcgcaaaattctggagtcagataggaaggagcctctgttcggcatctccaccggtaacctgatcactggactggcagccggggccaagacctataagatgagtatggcgaatcggggtcaaaatcagccggtgctcaatataaccaacaagcaggcatttatcacagcgcagaatcatggctatgcactggacaacacgttaccagcgggttggaaaccactcttcgtcaatgtgaatgatcagacaaacgaaggaattatgcacgaaagtaaacctttcttcgcggttcagttccacccggaagtaacccctgggcctatcgatacagaatacctctttgacagtttcttttcgctcattaagaagggcaaggctaccactatcacctccgtgcttcccaaacccgctttggtcgctagtcgcgtggaggtgagcaaagttctgattctgggctccggagggctatcgatcggtcaggctggcgagttcgactacagcggctctcaagcagtcaaagcgatgaaggaggaaaacgttaagacagtgctgatgaacccgaacatagccagcgtgcaaactaacgaagtgggactcaagcaggccgacactgtctactttctgccaattaccccccaatttgtgactgaggtaattaaagctgagcaacctgatggcctgatactcggcatgggaggtcagactgccctcaactgcggagtggagctgttcaagagaggcgtgctcaaggaatacggtgtcaaagtgcttggcacttctgtcgaatctattatggccactgaggacagacagctcttctcagacaaattaaatgagattaatgagaagattgcaccctcgtttgccgtggaaagcattgaggacgcactgaaagccgctgacactattggatacccagtgatgattaggtctgcctacgccctggggggtctcggcagtgggatttgcccaaatcgcgagacgttgatggacctgagcaccaaggccttcgcgatgactaatcagatactcgttgagaaaagtgtgacgggatggaaagaaattgagtatgaggtcgttagagacgctgacgataattgtgttactgtctgtaacatggaaaacgtcgacgcaatgggcgtccacacaggggattcggttgtggtggcccccgctcagacgctctctaatgcagaattccagatgctgaggagaacctctattaatgtggtacggcaccttggaatagtcggggaatgtaacattcaatttgccctgcaccctacatcaatggaatactgcatcatcgaagtgaacgccaggttgagccggtccagcgctctggccagcaaggcaactggatacccccttgcattcattgccgccaaaatcgctcttggcatccccctgccagagattaaaaacgtggtgagtggtaaaaccagcgcatgtttcgagcccagtttggactatatggtgactaaaatcccgcgatgggacctagacaggtttcatggcacatcctctcgcattggcagttccatgaagtctgtgggcgaagtaatggccattggcagaacattcgaagagagctttcaaaaagcattgcggatgtgccaccccagtatagaagggttcaccccaaggcttccaatgaacaaggagtggcctagcaacctggacctgagaaaggaactgtccgaaccgtcatcaacacgaatttacgcaatcgctaaagcaattgacgataacatgtctctcgacgagatcgagaaattgacctacatcgacaagtggttcctctataagatgcgggacattttgaatatggaaaaaactcttaaaggactgaattcagagagcatgacggaagaaactctgaagagagccaaggaaattggttttagcgacaagcagatttccaaatgcctcggattgacagaggcccagactcgcgagcttcggctcaagaagaacattcatccttgggtcaaacagatagacactctggccgccgaatacccaagtgtcacgaattatttgtatgtgacatacaatgggcaagaacacgacgtgaacttcgatgaccatggtatgatggttttgggatgtggcccataccatatcggcagctctgtagagtttgattggtgcgcagtgtcctctatccgcactttgcgccaactcggtaagaagacagtggtggtcaattgtaatccggaaacggtatctaccgacttcgatgagtgcgataaactttatttcgaggagctgtcactcgagaggattttggatatctatcaccaagaggcgtgcggagggtgtatcatatctgtgggtggtcaaatccctaacaacttggcggtgcccttgtataaaaacggtgtcaagattatgggcacaagcccactgcaaatcgaccgggccgaggaccgctctatttttagcgccgtgctggatgagctcaaggttgcgcaggccccctggaaggccgtgaatacactaaacgaagcactagagtttgcaaagtccgtggattatccttgcctgctgaggccctcatatgtcctctctggcagcgcgatgaatgttgtgttttcagaagatgagatgaaaaagttcctggaagaagcaactagagtgagccaggagcaccccgtggtcctaaccaaattcgtcgagggcgccagggaagtcgagatggatgccgtggggaaggacggacgcgtgatctcacacgcgatttccgagcacgtggaagatgctggtgtgcactctggggatgctacactgatgcttcccacacagaccatatcccagggagccattgaaaaggtgaaggatgcgacgcgaaagatcgccaaagcattcgccattagcggccctttcaacgtccagttcctggtgaagggcaacgacgtccttgtaatcgagtgtaatctgagagcctcccgtagtttcccgtttgtttcaaaaactctgggagtcgatttcattgacgtggcaacaaaagtgatgattggtgaaaatgtagatgagaaacaccttcccactttagatcaccccatcatcccggccgactacgtggctatcaaggcacctatgtttagctggccgagactacgagacgcagatccaattctccggtgtgagatggcatccacgggtgaagttgcatgcttcggcgaagggattcacactgcctttctcaaagcgatgttgtccactggcttcaagatccctcaaaagggcatattgattggcatccagcagagctttcggccccggtttctgggagtggctgagcagctgcataacgagggcttcaagctattcgccacggaggcaacctcagattggcttaacgcaaacaatgtcccggccacacccgtggcttggcccagtcaagaagggcagaacccgtccttgagttcaattcgcaaactgatccgggacgggagcattgacctcgtgatcaatttgcctaacaacaataccaagtttgtgcatgacaactacgttattagacggacagcagtggacagcggaatacctctgctaacgaacttccaggtgacgaagctgttcgctgaggcagtgcagaaaagccgcaaggttgattccaagtccttattccattaccggcagtactccgccgggaaagccgca

SEQ ID NO: 43506 - DNA, 4500 bp, Artificial Sequence
  derived and/or modified sequence
atgacgcgtatcctgactgcatttaaagtagtgcgcacgctgaaaaccggcttcggttttactaacgtcactgcccaccagaagtggaagttctcccggccgggcattcgcctcctgtcggtaaaggcccagacggcacacatagttttggaagacggtacgaagatgaagggttattcgttcgggcacccgtcaagcgtggccggagaagttgttttcaacaccggattgggaggatacccggaggctatcaccgaccctgcttacaaaggccagatcttaactatggctaatccaatcatcggcaacggaggcgcacctgataccaccgctctagatgaattagggcttagtaagtatctcgagtcgaacgggataaaggtgagcggacttctcgtgttagattacagcaaagattataatcattggcttgcgacaaagtccttgggtcaatggcttcaggaagagaaggttccggcaatctatggggtcgacacccgcatgcttaccaagatcattcgtgacaaggggaccatgttaggaaaaatcgagtttgaggggcagccggtggattttgttgatccgaacaagcagaatctcatcgctgaagtctctaccaaggacgttaaggtttatggcaagggaaaccccaccaaagtggtagcagttgattgtggaatcaagaacaacgtcattcgtttgctagtcaaacgcggcgccgaagtgcacctggtcccctggaaccatgactttactaaaatggaatacgacggcattttgattgccggcgggccgggaaatccagcattggcggagcctctgattcaaaacgttcgcaagatcctggagagcgatcgaaaggagccattgtttggtattagcacgggcaatctgatcacaggcttggccgctggcgctaaaacctataagatgtcgatggcaaaccgaggtcagaatcagcccgttctgaacataactaacaagcaagcttttatcacagcccagaaccatggatacgctctagacaacacgttgccagcagggtggaagcctcttttcgtcaacgttaatgatcagacaaacgaaggtatcatgcatgagtccaagcccttcttcgccgtccagttccatccagaagttacccctggccccatcgataccgaatatctcttcgacagcttttttagtctgattaagaagggtaaggcgacgacaattacttcggtcctgcccaaacccgccctggtggccagtcgcgtagaggtctctaaggtcttgatcttgggcagtgggggactctcaatcgggcaggcgggtgaattcgattacagtggctcccaagcggtcaaagcgatgaaggaggaaaacgtgaagaccgttctaatgaatccgaacatcgcatctgttcagaccaacgaagttggtctaaagcaggcagatactgtgtatttcctacccattaccccgcaatttgtcacggaggttattaaggctgagcaacccgatggtctcatcctgggaatggggggacagactgctcttaattgcggagtggagttgtttaagcggggtgtgctcaaagaatacggagtcaaagtcctcggtactagtgtcgagtccatcatggccacagaggatcgccagttgtttagcgacaagctgaatgagatcaatgagaagatcgccccttcgtttgccgtggagtcgattgaggacgctctcaaagccgcggacacgattggttatcccgtcatgattcggtccgcgtacgcactcggcggcttgggcagtgggatctgtcctaatcgagaaactctcatggacctgtccactaaggccttcgcgatgaccaaccagatcttggtcgagaaaagtgtaacaggttggaaggaaatcgagtatgaggtggtgcgggatgcagacgacaattgcgttacagtttgtaatatggagaacgttgacgctatgggggtccatactggtgattcggttgtagtagcccctgcccaaaccctgtccaacgcagaattccagatgctgcgccgaactagcattaatgtggtccgccacttaggcatagtcggcgaatgtaatatccagtttgctttgcacccgaccagcatggaatattgcatcatagaggttaatgcaagactttctcggtctagcgcattggcctcgaaggccaccggctacccactcgcttttattgccgccaaaatagcgctgggaatcccactccccgagatcaaaaacgtcgtttcgggaaagacaagtgcatgcttcgagccttcccttgactacatggtgacaaagatacctcgctgggatctcgatcgattccatggtacgtcgtcacgcatcgggagttccatgaaatcggttggggaggtgatggccatcggcaggacattcgaggaatccttccaaaaggcgctccggatgtgccacccctcaatcgagggattcacgcctcgactccccatgaacaaagaatggccatcaaatttggatctcagaaaggagctctcggaaccctcgtccacacgcatctacgctatcgccaaggctattgacgataacatgagccttgatgagatcgaaaagctgacctatatcgacaagtggttcctatacaaaatgcgcgatatcctcaatatggaaaaaactctcaaggggctgaattcggagtcgatgacggaggaaactctgaagcgcgctaaggagataggattcagcgacaaacagatttcaaaatgcctcggtctaactgaggcacagacacgcgagttgcgtttgaaaaagaacatccacccttgggtcaaacaaatcgatacactcgcggctgagtacccgtcggtcacaaattatttgtatgtgacgtacaatggccaggaacacgatgttaatttcgacgaccacggtatgatggtcttgggttgtggtccgtaccacatcggctctagtgttgaattcgactggtgcgctgtgtcgtccattcgcacactgcgccagctggggaaaaagacagttgtcgtcaattgtaatccggagaccgtgagtaccgatttcgacgagtgtgataagttatacttcgaggaactgagcttagaaaggatcttggacatttaccatcaggaggcctgtggagggtgtataatctctgttggaggccagattccaaacaacctggccgtccctctatataagaatggggtcaagataatgggcacttccccactgcagatcgatcgcgctgaggatagaagtatttttagcgcggtccttgatgaactaaaggtagcacaggcgccatggaaggcagttaatacactgaatgaggctctggaattcgccaaaagcgtggattatccatgcttgctccgcccgagttacgttctgtcagggtctgcaatgaatgtagtattctcagaagacgagatgaagaagttcttggaggaagcgactcgggtttcacaggagcacccggttgtccttactaagttcgtggagggggcccgtgaggttgaaatggacgcagtcgggaaagatggccgcgttatttcccatgccatctctgaacatgtggaggacgcaggagttcactcgggcgatgccaccctaatgctgccaacacagacaattagccagggggccatagaaaaagttaaggatgcgaccaggaaaattgcgaaggcctttgctatttcgggtccgttcaacgtacagttcctggtcaagggcaatgatgtgctggtaatcgaatgcaacctgcgagcttcccgttctttcccattcgtctcgaaaaccctgggggttgatttcatcgacgtggcgactaaagtgatgatcggtgagaacgttgatgagaaacatttgccaacgctagatcacccgataattcctgccgattatgtagccatcaaagcgcccatgttttcatggcctcggctgagagatgcagatccgatcctgcggtgcgagatggcctccacaggggaagttgcctgctttggggaagggattcatacagcttttctgaaggcgatgttgagcacgggatttaagatccctcaaaagggaattctgattggcattcaacagtcgtttagaccccgtttcttgggtgtagcagaacagttacacaacgaaggcttcaagcttttcgcaaccgaagccacctcggattggctcaatgctaacaatgtccccgccactcctgtcgcctggccctcacaggaggggcagaacccatcgttgtcttctatccgcaagttgatccgtgacgggtcaatagatttggttatcaacttgccgaacaacaacaccaaattcgttcatgacaactatgtaattcgtagaaccgcggtggactcaggcatcccgcttttgaccaacttccaggtcacaaagctatttgccgaggctgttcagaaatcgcgcaaagtagacagtaaaagcctctttcattatagacagtattcagccggtaaggctgca

SEQ ID NO: 43507 - DNA, 4500 bp, Artificial Sequence
  derived and/or modified sequence
atgactcgaatcctcactgcttttaaggtcgtgagaacgctcaaaacaggttttggattcacgaatgtcaccgcccaccaaaagtggaagttctcgcgtccaggcatccgcctgctgagtgtaaaggcacaaaccgctcacatagtgcttgaggacggcaccaagatgaaggggtactctttcggacacccatcatccgtagcgggggaggtcgtctttaacaccggcttgggtggctatccagaggccatcaccgaccctgcctataaaggtcagattctgactatggccaaccctatcatcgggaatgggggggctcccgacaccaccgcattggatgaactaggattgagtaagtacctggaatccaatggaatcaaggtttccggccttctggtgctggactacagcaaggactacaaccactggctggcaacaaaatccctgggccaatggctacaggaggaaaaggtcccagctatatatggagtcgatacccgcatgctgacaaagatcatccgcgacaaaggaactatgctgggaaagatagagtttgagggtcaacctgtggactttgttgaccctaacaaacagaatctcatcgcagaagtgtccacaaaagacgttaaagtgtacggcaaaggaaatcctaccaaggtggtcgccgtggactgcggtatcaaaaacaatgtcattcgcctcctggtcaagcgtggagcagaggttcacctggtgccctggaatcatgattttaccaaaatggagtatgacggcattttaatcgccgggggcccaggaaacccggccctcgcagagccattaattcagaatgtccggaaaatcctggaaagtgatcgaaaggagcctttgtttggaataagcacggggaatctcatcacagggctcgctgcaggagctaagacatacaagatgtcaatggctaaccgcggtcaaaaccaacctgtgttaaatattactaataagcaagctttcattaccgcacagaaccatggttatgcactagataatactttacctgccgggtggaaaccgctgtttgtgaacgtcaatgatcagaccaatgaaggtatcatgcacgagtccaagccctttttcgccgtccagtttcatcccgaagtaactcccggacctattgacaccgagtatctgttcgactccttcttcagcttgataaaaaaaggaaaagccacaactatcacatccgtgctcccaaaacctgctcttgtggcgtctagggtggaggtttccaaagttcttatcctgggctccggtggactctccattggacaggccggggaattcgattactccgggagtcaagccgtgaaagccatgaaggaagagaatgtgaagaccgtgctcatgaaccccaacatcgccagtgtgcagacaaacgaggtgggacttaaacaggcggacacagtttacttcctgcccataacccctcagtttgtgacagaagtaatcaaggctgagcagccagacggcctgattctgggcatggggggtcagaccgctttaaactgcggggtggaattgttcaagaggggtgtgctcaaggaatacggcgtcaaagtgctcgggacaagcgtggagtcaatcatggctaccgaagaccgccagctgttcagcgataagctgaacgagatcaatgaaaaaatcgcaccttcctttgccgtggagtctatcgaggatgcgctcaaggcggccgataccatagggtatcccgtgatgatcaggagcgcgtatgcactggggggcctgggttcaggcatctgtccgaaccgcgagaccctcatggacctatctacgaaggcattcgccatgactaaccagattcttgtggaaaaatccgtgactggatggaaggagatcgagtacgaggtcgtgagagacgctgatgacaactgcgtcaccgtctgcaacatggagaatgtagatgcgatgggagttcacactggcgacagtgtcgtcgtggccccggctcagaccctgtcgaacgccgagttccagatgctgcgcaggactagtatcaacgtcgtgaggcacttgggcattgtcggtgagtgtaatatccagttcgcactccatcctacatctatggaatattgcatcattgaagtcaatgccagactcagtaggagtagcgccctggctagtaaggctactggctaccccctcgcctttatcgctgctaaaatcgctctgggtatcccacttcccgaaatcaagaacgtggtttcaggtaagaccagtgcctgcttcgaaccttcccttgactatatggtgacaaagatcccacggtgggacttagacaggttccacgggacatcatcacgcattgggtccagtatgaagagcgtcggagaagtcatggcaatcggcaggacctttgaggagtcctttcagaaggccctaagaatgtgtcacccaagcatcgaggggttcaccccacggcttcctatgaacaaggagtggccatccaatctcgacctgcgaaaagagttgagcgaaccaagttccaccaggatttacgcgattgcgaaagccatagatgacaatatgtcattggacgagattgagaagctcacatacatcgataagtggttcctgtacaaaatgcgtgacattctgaatatggagaagacactgaagggtctgaattccgaatctatgacagaggaaactctgaaacgggcaaaagagattgggttctccgataaacagattagtaagtgcctggggctcaccgaggcccagactcgggaactgcggctgaaaaaaaacattcacccttgggtgaaacagattgacaccctggccgccgaatacccatcagtgaccaattacctttacgtgacttataatggtcaggagcacgacgttaattttgatgaccacgggatgatggtcctcgggtgtggaccataccatatagggagttccgtggaattcgactggtgcgccgtgtcttctatccgcactctcagacagttaggcaagaagactgttgtggtgaactgtaacccggagacagtctctacagattttgacgagtgcgacaagctatatttcgaggaattaagcctggagaggatactcgacatctaccaccaggaagcctgcggtggctgtattatttcagtgggcgggcagataccgaataacttggcagtgcccctgtataagaatggagttaaaatcatggggacaagccccctccagatcgatcgcgcagaagacagatctatcttttctgccgtgctggatgaactgaaggtagcccaagccccatggaaggctgtgaacactctgaacgaagccctggaattcgcaaagtcagtcgactacccctgtctccttcgccccagttatgtgttgtccggctctgcgatgaacgtggtcttctctgaggatgaaatgaagaaattcctcgaagaggcaacgagggtcagccaagagcaccccgttgttctcactaagtttgttgagggggcacgagaagtggagatggacgccgtcggcaaagatggcagggtcatttcacacgcaatttccgaacacgtagaggacgccggggtccactcaggtgacgctacgctgatgctgcccacccagaccatcagtcagggcgctatcgaaaaggtgaaggacgcaacgagaaaaatagccaaggcattcgccatctcaggaccgttcaacgtgcaattcttggtgaagggtaatgacgtgctggtcattgaatgcaacttgagagcgtctagatcattccccttcgtaagcaaaaccctgggagttgactttatcgacgtggcaactaaggtaatgataggtgaaaacgtagatgaaaagcacctgcccacactagaccatccaatcattccagcagactatgtagccatcaaggccccaatgttcagctggcccaggctgagggacgcggatcccattttgcggtgtgaaatggcaagcacgggggaagtggcctgcttcggagagggaatccatacagcttttctcaaagcaatgttgtctacaggctttaagattccccagaagggcatcctgatcggaatacagcagagctttcgcccaagattcctgggcgtggctgaacagctgcacaacgaagggttcaaactcttcgcgaccgaggctaccagcgactggctaaacgccaacaatgtgccagctaccccagtcgcatggccatcccaggaggggcaaaacccatccctgtcctcgattcgcaagctgattcgagatggttcaatcgatttagtgatcaacttgcccaataacaacacaaaatttgttcatgataattatgtgatccggaggacggccgtggactcagggatccctctgttgaccaatttccaggtgaccaagctgtttgccgaggcggtacaaaaaagtcgcaaggttgatagtaagagcttgtttcattataggcaatacagtgctggtaaggcagcc

SEQ ID NO: 43508 - DNA, 4500 bp, Artificial Sequence
  derived and/or modified sequence
atgactcggattctgactgcatttaaggtcgtccggacccttaagaccgggtttgggttcacgaacgtaactgcgcatcaaaagtggaagttttcgcggcccggcattcgtctgctgagcgtcaaggcacagactgcacacatcgtacttgaagatggcactaaaatgaagggctacagtttcggacatccaagcagcgtggcgggcgaggtggtgttcaacaccggacttggtggataccctgaggcaattactgatcctgcgtacaaggggcagattcttactatggcaaacccaattatcggtaatggcggagcacccgacactactgcccttgatgaacttggcctctcaaagtacctggaatccaacggcatcaaagtctcgggacttcttgtcctggattactccaaggactacaaccattggcttgctactaagtccctgggacaatggcttcaggaagaaaaagtgcccgcaatttacggagttgatacccgcatgctcactaagattatccgtgataagggaaccatgctgggaaagatcgaatttgaagggcaaccagtcgattttgtggatcccaataaacaaaacttgattgccgaagtaagcactaaggacgtgaaagtgtatggtaagggtaaccctacgaaggtggttgctgtggattgtggaattaagaacaatgtcatcaggctgcttgtgaaacgaggtgcagaggtccacctggtgccatggaaccacgatttcaccaaaatggaatacgatggaatactcatcgcgggtggtcccgggaaccctgcacttgcagagccactcatccagaacgtgaggaagatccttgaatccgatagaaaggagcctttgtttggtatatcgaccggaaatctcattaccgggcttgccgccggagcgaaaacctacaagatgagcatggcaaatagagggcaaaaccaaccagtgctgaacatcaccaacaagcaggctttcattactgcccagaatcatggatatgcactcgataatactctgcctgccggatggaagcccctctttgtcaacgtgaacgaccaaactaacgaaggcattatgcatgaatcaaaacctttctttgccgtgcaatttcatcccgaggtgactccgggaccaatcgacaccgagtatctgtttgactcgttcttttccctgattaagaaaggcaaagccaccaccattacgtcggtgctgccaaaaccggcactggtggcttcgagagtggaggtgtctaaggtgctgatattgggcagtggtggtttgtcgattggccaggcaggtgaatttgattattcaggaagccaggctgtgaaggccatgaaagaggaaaacgtgaaaaccgtcctcatgaaccctaatatcgcatccgtgcaaaccaacgaagtgggacttaagcaggcggacactgtgtactttcttcctataaccccgcaatttgtgaccgaagtgatcaaggccgaacaacctgacggtcttatcctgggaatgggagggcaaaccgcacttaattgtggggtggagttgtttaagagaggagttctgaaagaatacggagtcaaagtgctggggacgtccgtggaatcaattatggccacggaggacagacaactgttctcggacaagctgaatgagattaatgaaaagattgctccatcattcgcagttgagtcgatcgaagatgcactcaaggcagcagatactatcggttaccctgtgatgatccggtccgcttacgcactcggcggacttggctccggaatctgtcccaaccgcgaaactctgatggatttgagcaccaaggcgtttgccatgaccaatcaaatacttgtcgaaaagtcagttaccggatggaaggaaatagaatacgaagtggtgagagacgcagacgacaactgtgtgaccgtgtgcaatatggagaacgtcgacgcaatgggagtccataccggagacagcgtggtggtggcaccggcacaaaccctttcaaacgccgaatttcagatgctgcggcggacctccatcaatgtggtacgccatctgggtatagtgggcgagtgcaacatacagtttgccttgcatccaaccagcatggagtactgtatcattgaagtgaacgcacggctgtcgcgctcctccgctctggcatcgaaagccactggttaccctcttgcattcattgcagcgaagattgcactggggattccacttcccgaaatcaaaaatgtcgtttccggtaagacctccgcatgttttgaaccatcacttgattacatggtgaccaagataccacgttgggatcttgatagattccacggaactagctcgagaataggctcgtcaatgaagagcgtgggagaagtgatggcaattggaaggacgtttgaggaatcgtttcaaaaagcgttgcgaatgtgtcatccctccatcgaaggctttacccctagacttccaatgaacaaagaatggccttctaacctggatcttcgtaaggaactgagcgaaccatcgagcactaggatttacgctatagcaaaagcaattgacgataacatgtcgcttgacgagattgagaagctcacttacatagacaagtggtttctgtacaagatgagagatattcttaacatggagaaaactctcaaaggtcttaactcggagtcaatgacggaagagactctgaaacgtgcaaaagaaattggattcagcgataagcaaatttcaaaatgtttgggactgaccgaagcacaaactagagaacttaggctgaagaagaacatccatccttgggttaaacaaatcgatactctcgctgccgagtacccatccgtcactaactatctttacgttacctacaatggacaagaacacgatgtcaacttcgacgatcacggcatgatggtgctcgggtgcggcccttaccatattggctcctccgtggagtttgattggtgcgccgtgtcctccatccgtacgctgcggcagctgggaaaaaagacggtggttgtcaattgtaaccctgagactgtgtcgaccgattttgatgaatgcgataagttgtacttcgaagaactcagcctcgaaagaatcctggacatctaccatcaggaagcctgtggagggtgcatcatctcagtcggtggacaaattccaaataaccttgcggtccctttgtacaaaaatggcgtcaagatcatgggaaccagccctcttcagattgatcgggcagaagatagatcaatcttttccgcagtgttggatgaactgaaagtggcacaggcaccctggaaagcagtcaatacgctcaatgaggcactcgaatttgctaagtcagttgactacccatgcctgcttaggccttcatacgtgctgtcgggcagcgctatgaatgtcgttttttcggaggatgaaatgaagaagtttctcgaagaggcgactcgcgtctcccaagaacacccagtagtcctgaccaagtttgtcgagggggcgagggaagtggagatggatgccgtgggcaaggatggtcgagtgatttcccatgcaatttccgaacatgtggaggacgcaggggtgcacagcggcgacgcaaccctgatgctgcctacccaaactatcagccagggtgcaatcgagaaggtgaaggatgcgactcgtaagattgccaaggcatttgcaatctcaggtcccttcaacgtgcagtttctggtgaaaggaaatgatgtgcttgtgatcgaatgcaaccttcgggcctcgaggtccttcccgttcgtgtcaaagaccctcggggtggacttcatcgatgtggccaccaaggtgatgattggggagaacgtggatgagaaacacctgcctactctggatcatcccatcattcctgcagactacgtggcaataaaggctcctatgttctcgtggccgcggctgcgagacgcggacccaattcttcggtgtgagatggcgtcgacgggggaagtcgcatgtttcggagaagggattcacacggcttttctcaaagcaatgttgtcaactggctttaagattccgcagaagggaattctcatcggaattcagcaatcgttcagaccaaggtttcttggtgtggcagaacagcttcacaatgaaggttttaagctgttcgcaaccgaagcgacctcggattggctgaacgcaaacaacgtgccggccacgcccgtcgcttggcctagccaagaaggtcaaaacccttccctctcctctataagaaagctcataagggatggatcgattgatctcgtgatcaatttgcccaataacaacactaagtttgtccatgataactacgtgatcaggaggactgccgtagactctggtattcctctgctcaccaatttccaagtgaccaaactgttcgcagaagcagttcagaagtccagaaaggtcgacagtaaatccctttttcattacaggcagtactccgcaggaaaggccgcc

SEQ ID NO: 43509 - DNA, 4500 bp, Artificial Sequence
  derived and/or modified sequence
atgactaggatactgacggccttcaaggtggtgcgcaccctgaaaaccggctttggatttaccaacgtgacggcgcatcaaaagtggaagttttcaagaccaggaataaggctgctgagcgtcaaggcgcaaactgcacatatcgttctggaggacgggaccaaaatgaaaggctattccttcggccatccttcctcggtggcgggagaggtcgtattcaataccggactgggaggatacccggaagcgatcaccgatccggcgtacaagggtcagattctgacgatggccaacccgatcatcggcaacggaggggcgccagacaccacggcccttgatgagctgggtctttcgaagtacctggagagcaatgggattaaggtttcagggctcctggtccttgactacagcaaggattacaaccattggctcgccaccaagtcgctgggtcagtggctgcaggaagaaaaggtcccagccatctacggagtggatacccggatgcttactaagatcatccgcgataagggcactatgctgggaaagattgaattcgagggacaacccgtcgacttcgttgacccgaacaagcaaaacctcattgcggaggtcagcaccaaggacgtcaaagtctacggaaagggtaatccaaccaaagtggtcgccgtggactgtggaatcaaaaacaatgtcatcaggctcctggtgaagcgcggagctgaggtgcatctggtgccgtggaaccatgacttcaccaagatggagtacgacggcatccttatcgcaggtgggccagggaacccagcgctggcagaaccccttatccagaacgtgaggaagatcctggaatccgacaggaaagagccgctgttcggaatcagcaccggaaaccttatcaccggactggccgcgggggctaaaacttacaagatgtcaatggcaaaccggggacagaatcaaccagtgttgaacattaccaacaaacaggcgttcatcaccgctcagaaccatgggtacgctttggacaacaccctgccggccggatggaagcctctgttcgtcaatgtgaacgatcaaaccaacgagggcatcatgcatgaatcaaagcccttttttgccgtgcagttccacccggaggtgactcccggcccgattgacaccgaatacctcttcgattcgttcttttccctgatcaaaaaaggaaaggccacgactatcacgtccgtgctgccaaagccggcattggtcgcgtcgcgcgtggaagtgtcaaaggtcctgatcctgggatccggcggactgagcatcgggcaggctggcgagttcgactactcaggatcgcaggctgtcaaggccatgaaggaggagaatgtcaaaaccgtcctcatgaaccccaatattgcgtccgttcagactaacgaggtgggactgaagcaagccgacaccgtgtacttcctgcctatcactccacagttcgtgactgaagtcattaaagcggaacagccggatggactgatccttgggatgggtggtcagactgccctcaattgcggagtggaactgttcaaacgcggcgtgctgaaggagtacggcgtgaaggtgcttggaacttccgtggaatcaatcatggctaccgaggacagacaactgttctcagacaaactcaatgagatcaacgagaaaatcgccccatcgttcgcggtcgagtcgatcgaagatgcgctgaaggccgccgacactatcggttacccagtgatgatccgcagcgcttacgctcttggcggcctgggaagcggaatctgtccgaaccgcgaaaccttgatggacctctcgacgaaggcattcgcgatgaccaaccagattctggtggaaaaatcagtcactggatggaaggaaattgaatacgaagtggtccgggacgcagacgataactgcgtgaccgtgtgcaacatggaaaatgtcgacgcaatgggggtccacactggagatagcgtcgtggtggctccagcacagaccttgtcgaatgcagaatttcagatgcttagacgcacttcgatcaatgtggtgagacacctcggcatcgtcggagagtgcaacatccagttcgctttgcacccgacctccatggagtactgcatcatcgaagtgaacgccagactctccaggagttcggctctcgcctccaaggctactggatacccactggcatttatcgccgcaaagatcgccctgggaatcccgctgcctgaaatcaagaatgtggtttcgggtaagaccagcgcatgtttcgaaccgtcactggactatatggtgactaagatcccgagatgggaccttgatagatttcacggaacttcgtcacgaatcggttcgtcgatgaaatcagtgggagaagttatggcaatcggcaggaccttcgaagaatcgttccaaaaggctctgcggatgtgtcacccgagcatcgagggatttacccctcgactcccgatgaataaggaatggccgagcaaccttgatttgcggaaggaattgtcggaaccgtcgtccactaggatctacgctatcgcaaaggcgatcgacgacaacatgtcgctggacgagattgagaaactgacttacatcgataaatggttcctttacaagatgcgggatatcctgaacatggaaaaaaccctgaagggccttaattccgagtcgatgactgaggagactttgaagcgcgctaaggagatcggcttctccgataagcagatctccaaatgtctgggcctcacggaagcccaaacccgggaactgagactgaagaagaacatccacccgtgggttaaacaaatcgacaccctggcggctgagtacccgagcgtgactaactacctctacgtcacctacaatggccaagaacacgacgtgaacttcgatgaccatggcatgatggtgctgggctgcggaccttatcacatcggaagctccgtggaattcgactggtgcgccgtgtcctcgatcagaaccctgcgccagctgggaaaaaagacggtggtggtgaattgcaacccagaaactgtctccactgacttcgacgaatgtgacaagctgtattttgaggaactgtccctggagcggatcttggatatctaccaccaagaggcttgcggcggctgcatcatctcggtcggtggccagattccgaacaaccttgcggtgcccctttacaaaaatggcgttaagattatgggaacctccccgctccagatcgatcgcgccgaggaccgctcgatcttttccgcggtgctcgacgaactgaaagtggctcaggccccgtggaaagccgtgaacaccctgaacgaggccctggagttcgctaagagtgtagactacccatgcctgttgcggccatcgtacgtgctctcgggatccgcgatgaatgtcgtgttcagcgaagatgaaatgaagaagtttctcgaggaggcgacccgggtgtcccaagaacaccctgtggtgctcaccaaatttgtggaaggcgcccgggaggtcgagatggacgccgtgggaaaggacggaagggtgatctcacacgcgatctccgagcacgtggaagatgccggagtccactcaggtgacgcgaccctgatgctgccgacgcaaaccatcagccagggagcgattgagaaagtgaaggacgcaacccgcaagattgctaaggctttcgctatctcgggaccattcaatgtccaattcctcgtgaagggaaacgacgtgctggtgatcgaatgtaacctgcgagcgtcccgctcattcccgttcgtctccaaaaccctgggagtggatttcatagacgtcgcaaccaaagtgatgatcggagaaaacgtggatgagaagcatctgcccaccctcgatcaccccatcatcccggctgattacgtcgccattaaggctccgatgttctcctggccgaggctgcgggatgcagatcccattctgcgctgcgaaatggcatcgaccggcgaagtggcatgctttggggaaggcatccacactgccttcctcaaggccatgctttcaaccggcttcaagatcccccagaagggcatcctgattggaattcagcaatcgttccgcccacgattcctgggagtggccgaacaactccacaacgagggctttaaacttttcgcgactgaagcaactagcgactggctgaacgcaaacaatgttccggccactccagtggcgtggccgtcgcaagagggacagaatccgagcctgagctccatcaggaagctgatcagggacggaagcatcgatttggtgatcaacttgccgaacaataacaccaaattcgtgcatgacaattacgtgatccgccggacggccgtggattcggggatcccgctcctgaccaatttccaggtgactaaactcttcgcagaggcagtgcagaagagccgaaaggtggattcgaagtcgttgttccactaccgtcagtactctgccggcaaggccgca

SEQ ID NO: 43510 - DNA, 4500 bp, Artificial Sequence
  derived and/or modified sequence
atgactaggattcttaccgcatttaaggtggtgcgtacccttaagaccggcttcggctttaccaatgtcaccgcccatcaaaagtggaagttctcgcggcctggaatccggctgctttcggtgaaggcccaaaccgcacacattgtgttggaggacgggactaaaatgaaagggtatagcttcggacatccatcatcggtcgccggagaagtcgtgttcaatactggtttgggcggctacccggaggcaattaccgacccggcatacaagggccaaatactgactatggccaaccccatcattggtaacggtggggcacctgataccaccgcgctcgatgagttgggactgtcaaagtacctggagtcaaacggaattaaggtatcgggccttctcgtgctcgactactcgaaggactataaccattggcttgcaaccaagtcacttggacagtggttgcaggaagaaaaggtgcccgcaatctacggagtggatactagaatgctgaccaagattattcgagacaaaggcactatgctcggtaaaatcgagtttgagggacagcctgtggactttgtcgatccaaacaagcagaaccttattgcagaagtgtctaccaaggatgtcaaggtgtacgggaaaggcaacccgaccaaggtggtcgcagttgactgcgggattaagaacaatgtcattcggttgctggtgaaacgaggagccgaagtgcatctcgtgccttggaatcacgattttaccaagatggaatacgatggcattctgatcgcgggtggaccagggaacccagcactcgcagaacctctgattcagaatgtcagaaagattctggagtccgatagaaaggaacctcttttcgggattagtaccgggaacctgatcaccggactggcggcaggggccaagacttacaagatgtcgatggcgaacagaggtcagaaccaacctgtccttaacataactaataagcaggccttcattaccgcacaaaatcacggatacgcacttgataacactcttcctgcaggatggaagcccttgttcgtgaacgtgaatgatcagacgaacgaaggaataatgcatgagtcaaaaccatttttcgcggtccagtttcaccctgaagtcaccccgggtcccattgatactgaatacttgttcgactctttcttttcgctgatcaaaaagggaaaagcaaccactattacttcagtgctgccgaaaccagcccttgtggcgagccgcgtcgaagtgtccaaagtcctgattctcgggagcggtgggctctcgattggacaggcaggagaattcgattactcgggttcacaggccgtgaaggcaatgaaggaagaaaatgtcaagaccgtccttatgaacccaaacatcgccagcgtccaaacgaacgaggtgggacttaagcaagctgatactgtgtacttccttcctatcaccccccagtttgtgactgaagtcattaaggcagaacaacccgatggacttattctgggtatgggagggcaaaccgccctcaactgtggcgtggagctgttcaagaggggggtgctgaaggaatacggggtcaaggtgctgggaacttccgtggagtcgattatggcaacggaagatagacagctcttttcggacaaattgaacgagatcaacgagaaaattgcaccgagctttgcagtggagtcaattgaagatgcactcaaggccgccgataccataggttaccccgtgatgattagatccgcgtatgcactgggcggcctgggatcaggaatatgccctaacagggaaaccctgatggatctttcgaccaaggccttcgccatgaccaaccagatcctcgtggaaaaaagcgtgactgggtggaaggagatcgagtacgaggtggtccgggatgccgatgataactgtgtcaccgtctgtaacatggagaatgtggacgcaatgggcgttcataccggtgattctgtggtcgtggcccctgcccaaaccttgtcgaacgcagagtttcagatgcttaggcggacgtccatcaacgtggtgcgccacctgggtattgtgggtgagtgtaacatccaattcgcactgcatcctaccagcatggaatactgtattatcgaagtcaatgcccgcctgagccggagcagcgcactggcatcaaaggcaaccggatacccccttgcatttatcgctgcaaagattgctcttggaattccactgccagagattaagaacgtggtgtcaggcaagacctcggcttgctttgagccatccctggactacatggtgaccaagatacctcgctgggatctcgaccgcttccatggtacctccagccgtattggctcctccatgaaaagcgttggtgaggttatggctattggtagaacctttgaggaatcgtttcaaaaggcactccggatgtgtcacccatcgattgaaggttttactccaagacttcctatgaacaaggaatggccgtcgaatctggatctccgaaaagaactctcagagccatcgtcgaccaggatatatgcaattgccaaggcaattgatgataacatgtcacttgacgagatcgagaagctcacctacatcgataagtggtttctctacaagatgcgggatattctgaatatggaaaagacccttaagggactcaattccgaaagcatgaccgaagaaaccctgaagagagcgaaggaaatcggattttcggacaagcagatcagcaagtgtttgggtcttactgaggcacaaacccgcgaacttaggcttaagaaaaacatacatccttgggtgaagcaaattgataccctcgcagcagagtatccttcggtcacgaattacctctacgtcacgtacaatggacaggaacacgatgtgaactttgacgaccatggtatgatggtgctgggctgtggaccgtaccatataggctcatctgtggagttcgattggtgtgcagtctcctccatacggactctgcgccaacttggtaaaaagacggtggtcgtcaactgcaaccctgaaaccgtgtcaacggactttgatgaatgcgataaactgtactttgaagaactcagcctggaacgcattctggacatataccaccaggaagcatgtggaggttgcattatctccgtgggaggtcagattccaaacaatttggcagtcccgttgtacaagaacggggtgaagatcatgggaacttccccgctccaaatcgatcgggcggaagatagatccatcttcagcgcggtgctggatgaactgaaggtcgcgcaggcgccatggaaggctgtgaatactcttaacgaggccctggagtttgcaaagtcagtcgattacccttgtctgctccgcccttcctacgtcctctcaggatccgccatgaatgtggtcttttcggaagatgaaatgaagaagtttctcgaggaagcaactcgagtgtcgcaagagcatccggtcgtccttaccaagttcgtcgaaggtgcccgggaagtggaaatggacgctgttggtaaggatggccgcgtgatttcccatgcaattagcgaacacgtggaggacgcgggggtccattctggagatgcaacgctgatgcttcccacccaaaccattagccaaggtgccatagaaaaggtgaaagacgcaacgcggaaaatcgccaaggcgtttgctatatctggcccttttaacgtccagtttcttgtgaagggtaacgacgttctggttattgaatgtaatctccgagcgagccgctcgtttccctttgtgtccaaaacgctgggagtggactttatagacgtggcaaccaaggtgatgattggggagaatgtcgacgagaagcatctccctactcttgaccatcccattatacctgccgactacgtcgcaatcaaagcaccgatgttttcgtggccacggctcagggacgccgaccctatcctgcgatgtgaaatggcatccaccggtgaagtggcttgttttggcgaaggtattcatactgcctttctgaaagccatgctgtcgacggggtttaagattccgcaaaagggaattcttatcggaattcagcaatcgtttcgtcctagatttctgggtgtcgctgaacaactgcataacgaagggtttaagctgtttgccactgaagcaacctcggactggctgaatgcaaacaacgtgcctgccactccggtcgcgtggccgtctcaagaaggtcaaaatcccagcttgtccagcattcgcaaacttatccgggacggcagcatcgatctcgtgatcaacctgcctaacaacaacaccaagttcgtgcacgataactacgtgatcagacggaccgccgtcgattcaggtatcccactccttactaacttccaggtcactaagctgttcgcagaagcagtccagaagtcgcgcaaggtggatagcaagtcgctttttcactacagacagtactcggccgggaaggcagcc

SEQ ID NO: 43511 - DNA, 4500 bp, Artificial Sequence
  derived and/or modified sequence
atgacacgcatcttgacggccttcaaggtagtccggactttaaaaacaggttttggcttcaccaacgtaactgcccatcagaagtggaagttcagccgcccagggattcgattactgtccgtgaaagcccagacagcccatattgtactggaagatgggacaaaaatgaaaggctactctttcggccacccctcctctgtggctggggaggtggtcttcaatacgggactcggcggatatcccgaagccatcaccgatccagcatataaagggcagatcctcacaatggcaaatccaatcattggtaacggtggcgcacctgatacaaccgcactggatgagctcggtctcagtaaatatctggagagtaacggaatcaaggtttctggcctgctggtgttggattatagcaaagactacaaccactggctcgctaccaagtccctggggcagtggttgcaggaggagaaagttccagcaatttatggagtagatactcgcatgctgacgaagataatcagggataaggggaccatgctcggtaagatagagttcgaaggtcagcccgtggacttcgtcgaccccaacaaacagaatcttatcgccgaagtctctacgaaggacgttaaggtgtacggcaaaggcaacccaactaaagtcgtggcagtggattgcgggatcaagaataacgtcattcgactcctagtcaagcggggtgctgaagtgcatctggtcccctggaaccacgactttacgaaaatggagtatgatgggattctgatcgccgggggaccaggcaatcctgctctggctgagcccctcatccaaaacgtgcgaaaaattctcgaatctgacagaaaggaacctttattcgggataagcacagggaacttgatcactgggctggccgctggcgcgaaaacctataagatgtccatggccaatcgcggacagaaccagcccgttcttaacattaccaataaacaggcatttattaccgcccagaaccacggctatgccctggataatacactgccagccggctggaaaccgttgttcgtgaacgtcaatgaccagactaacgagggcatcatgcacgaatccaagcccttcttcgcggtgcagtttcatcccgaagtcactcctggcccaatagataccgaatacttgttcgacagctttttttcactgatcaagaaggggaaggcgacgaccattaccagtgtgttgcctaagcccgctctggtagcctcgagggttgaggtgtctaaggtcctaattctgggctctggtgggttaagcatcggccaggccggggaatttgattatagcggatctcaggccgtgaaggccatgaaagaagagaacgtaaagactgtcctaatgaacccaaatatcgcttccgtacagactaacgaagtcggcctaaagcaggctgatacagtgtatttcttgccaattacaccccagttcgtgacagaagttattaaagctgagcagcccgacggcttaattctggggatggggggccaaactgccttgaactgcggagtcgagctgttcaagagaggagtcctgaaggagtacggcgtgaaggtcttgggcacgtcagtcgaatccattatggcaacagaagaccgtcagctgtttagcgacaaactgaatgagatcaacgaaaaaatagcaccatcttttgcagtggagagtattgaagatgctcttaaagctgcggacacaatcggctatccagtcatgatccgcagtgcctacgcccttggtggtctggggagcgggatatgtccaaacagggagactctaatggatttgtcgactaaagctttcgccatgacaaaccaaatcttagtggaaaaatccgtgaccggatggaaggaaattgaatatgaggtggtccgggacgccgatgacaactgcgtgacggtgtgcaacatggagaatgtcgatgctatgggggtgcataccggggatagtgtggtggtcgcccctgctcaaaccctgtctaacgccgagtttcaaatgctcaggcgaacaagtattaacgtggtgagacatctgggaattgtaggagaatgtaatatccagtttgctctgcaccctacatctatggaatactgcattatcgaagtaaacgcaaggctgagtcgatcttctgcattagcctccaaggccactggctatccactggcctttatcgcagcgaaaatcgccctagggattccccttcctgagatcaagaacgtcgtgtctggaaagacttctgcttgtttcgaaccttccctcgattatatggtgactaagatacctcggtgggacctggatcggttccacggcacaagctcacgcatcggatctagcatgaagtcagtgggtgaggtgatggccatcgggagaacttttgaggagtcttttcagaaggctctgcgaatgtgccacccatccatcgagggattcaccccgcggctgcccatgaataaggaatggccctcaaacctggacttaaggaaggaactaagcgaaccctccagtacgcggatatacgccatagccaaggcgattgatgataacatgtccctggatgaaatagagaagttgacatatatcgataagtggtttctctataagatgcgtgatattctgaacatggagaaaacccttaaaggcctgaacagcgagagcatgactgaagagacgctgaagcgagccaaggagatcggtttctccgataagcagatctccaaatgtctcggcctgacagaagcacagacacgggaacttagattaaaaaagaatattcatccatgggtcaaacagatagacacattagctgcggagtatccctcagttactaattacctctacgtgacttacaacggacaagagcacgacgtgaactttgacgatcacggcatgatggtgctcggatgtggcccttatcacattgggagctcagtggaatttgactggtgtgctgtttcatcaatccgcaccctgcgccaactggggaaaaaaaccgttgtggtgaattgtaatcccgagaccgtgtcaacagattttgacgagtgtgacaaattgtactttgaggagttaagtctggaacggatcctcgacatataccatcaagaggcttgtggagggtgtatcatcagcgtgggaggccagatccccaacaatctagctgtacccctgtataaaaatggggtcaaaatcatgggcacctctcctttgcaaatcgatcgcgcagaggaccgcagcatttttagtgccgtattggacgaactgaaggtggcccaggccccatggaaggcggtcaacacattgaacgaggccctagagtttgctaagagtgtcgactatccatgtctcctgcgtccttcatatgtgttgagcggctccgcaatgaacgtagtgtttagtgaagatgagatgaagaaattcctggaggaggccaccagggtaagccaggagcatccggttgtgctgaccaaatttgtggaaggtgcgcgggaggtggagatggatgcagtgggcaaggatgggcgggtcatttctcacgctatatctgaacacgtggaggacgcaggagttcactccggggatgcaacccttatgctgcccacgcagactatcagtcagggggccatcgaaaaggtgaaagacgccacgcgtaagatcgcaaaagcgtttgcaataagcggcccattcaatgtgcaattcctggtcaaagggaatgacgttctcgtcatcgagtgtaatttgcgagcctcacgctccttcccattcgtttcaaagaccctgggagttgatttcatcgacgtggcaactaaggtaatgatcggcgaaaatgtggacgagaagcacctgccaactctggaccatcctattatccctgctgactatgttgcaataaaggctcctatgttcagctggcccaggttgagagatgctgaccccatattgagatgtgagatggcctcgacaggggaagtggcatgcttcggggaaggcattcacacagcatttcttaaggcaatgttgtcaactggcttcaagatacctcagaaggggatcctgatagggatccaacaaagtttccgaccacgatttctgggggttgctgagcaactccacaatgaaggctttaaattattcgcaaccgaggctacctccgactggctgaatgcaaataatgttccggcaaccccagttgcctggccctctcaagagggtcagaatccgagcctttcgtccatccgaaaactgatccgggacggctccatagacctagtgataaacctacccaataataacaccaagttcgtgcatgataattatgttataaggaggacagccgtggacagtggaattccgttgcttaccaattttcaggtgaccaagctgttcgctgaagctgtccaaaaatcacggaaagtggattctaagagtttattccattacaggcagtatagtgccggcaaggctgca

SEQ ID NO: 43512 - DNA, 4500 bp, Artificial Sequence
  derived and/or modified sequence
atgacacgcattttgacggcttttaaagttgtccggacactcaagacgggatttggtttcactaacgtgactgcacaccaaaagtggaagttttctcgccccggcattcgactgttgtcggtgaaggcacaaactgcacatatcgttcttgaggatggcactaaaatgaaaggatactcttttggacacccatcgtctgttgctggagaagttgtgtttaacacaggcctaggaggttaccccgaggcgattactgaccccgcctacaagggacaaatcttaacaatggctaatcctattattggcaacggaggagctccagacacgactgcacttgatgaacttggactctctaaatacctggaatcaaacggtattaaagttagtggcttacttgtcttggactacagtaaggactataaccattggctcgctacaaagtcccttggacagtggcttcaagaagagaaagttccagccatatatggagtcgataccagaatgcttactaaaattatcagagataaaggaactatgctcggaaaaattgaatttgaaggacaacctgttgattttgtagatccgaacaaacagaaccttatcgcggaggtatctacaaaggatgtaaaagtatatggtaagggaaatccgaccaaggtcgtcgccgttgattgtggcattaagaacaatgtcattcgacttcttgttaaacgtggcgcagaagtgcatctggtgccatggaatcatgacttcactaagatggaatacgatggcatactgattgccggagggccaggtaacccagctttggctgaaccacttatccaaaacgtaagaaaaattttggaatctgatcgtaaagaacccctctttggaatctccactggaaatctaattactgggctagccgcaggcgctaaaacttataagatgtcaatggccaatcgaggacagaatcaaccggttttgaacattactaataagcaggcttttatcactgctcaaaaccatggatatgcgttggacaatacattaccagctggatggaaaccactttttgtgaatgttaatgatcaaactaacgaaggaattatgcacgaatcaaagcctttctttgcagtacagttccatccggaagtcacaccgggcccaattgatactgagtacttattcgacagtttcttctcgctaattaagaaaggtaaggcgacaaccattacgagtgttttgccaaaaccggcgctagtggcgtcacgtgtggaagtttctaaagtccttatactcggatctggcggtttgtccattggacaagcaggagagtttgattacagcggatctcaagcagtaaaggccatgaaggaggaaaatgttaaaacagtgctgatgaacccaaacattgcatctgtgcaaacaaatgaagttggactcaaacaagcagataccgtctattttttaccgatcaccccacaattcgtaacagaggtcatcaaagcagaacaaccagatggactcattctaggaatgggaggccaaacagctttgaattgcggagtggaactcttcaaacgtggagttctaaaagagtacggagtgaaagtattaggaacttcagttgaaagcataatggctactgaagatcgccaactctttagcgacaagcttaatgagatcaatgagaaaatagcaccaagtttcgcagtcgagagcattgaagacgctctgaaagcggctgataccatcgggtatccagtaatgatacgatcagcctatgccttaggaggtctcggaagtggaatatgtccaaaccgtgagacgctaatggatttatctacaaaagcttttgcaatgaccaatcaaattctggtggagaaatcagtcactggttggaaggaaatcgaatacgaagttgtccgtgatgctgatgataattgtgttacagtttgcaacatggaaaacgttgacgcaatgggagttcatacaggtgactctgtcgttgttgctcctgcacagactctgtctaacgcagagttccagatgttgcgacgtacaagcataaatgttgtccgacacttgggcatcgttggagagtgcaatattcagtttgccttgcatcccacgtctatggagtactgcattatagaagttaacgcgcgtctgagccgatctagtgctttagcctccaaagctactggatatccactggccttcattgcagctaaaattgcactaggaattcctctcccggaaattaaaaacgttgtttcaggtaagacatccgcttgtttcgagccctcgctagactacatggttactaagattccgcgttgggatctggacagattccatggaacatcaagtcgtatagggtcatcaatgaaatcagtaggagaagttatggctatcggaagaacttttgaggaatcatttcaaaaagccttgcgtatgtgccatccatcgattgaaggatttactccaaggctgcctatgaacaaagaatggccaagtaatctggatttgagaaaagaacttagcgagccaagcagtacgcgaatctatgctattgccaaagcaatcgatgataatatgagtttggacgaaattgaaaagctaacttatatagataaatggtttttatataagatgagagatatacttaatatggaaaagactcttaaaggattgaatagtgagtcaatgactgaggagacactgaaacgggctaaagaaattggattctccgacaagcaaatttcaaagtgtctgggactcacggaggctcagacaagagaacttcggctaaagaaaaatatacatccatgggtcaagcaaatagacacacttgctgccgaatatccatcagtaacaaattacttgtatgttacctacaatggacaagaacacgatgttaacttcgacgatcatggaatgatggtcctgggttgtggaccataccacatcggatcctctgttgagtttgattggtgtgccgtgagttccattagaacattgcggcaacttggaaaaaaaacagtggtcgttaactgtaatcctgagacagtctcgacagattttgatgagtgtgataagttgtactttgaggaactttctctggaacgaatccttgacatttaccaccaggaagcatgtggagggtgtattatttctgttggtggacaaatcccaaacaatctcgctgttccgttgtataaaaatggagtcaaaataatgggtacctcaccactgcagatcgatcgtgctgaagacagatctatattttcggcagtgctggatgaattgaaagtcgcgcaggccccatggaaggccgtgaatactttgaatgaggcactcgaattcgccaagtctgttgattatccgtgcttgctccgcccatcatatgtcctctcgggatcggctatgaacgttgttttttcagaagatgagatgaaaaagttcttggaagaggcaacaagagtttctcaggagcatccagtcgtcctaacgaaatttgttgaaggtgccagagaagttgaaatggacgctgtcggaaaagatgggcgggttatcagtcatgctatctcggaacatgttgaggatgcgggtgttcattcaggtgacgccacccttatgttgcccactcagacgattagccagggagcgatagaaaaggtcaaagacgccacaaggaaaatagcaaaagctttcgcgatctctgggccattcaatgtccaattcctggtgaaaggcaatgatgtcttggtcattgaatgtaatcttagagcttctcgttcatttccattcgtctctaagactttaggtgtggacttcattgatgttgccactaaagtgatgattggagagaacgtagatgaaaagcatctcccaacactggatcatccgataattcctgcggattacgttgcaatcaaagcaccaatgttttcatggccgagacttcgggatgcagatcctatcttgagatgtgaaatggcatctacaggcgaagtggcatgtttcggtgaaggtattcacaccgcattccttaaggcgatgctttcaacgggatttaagattccgcaaaaaggaattctaattggaattcagcagtcctttcggccgcgtttcctgggtgtggctgagcagctccataacgagggcttcaaactgtttgctaccgaagctacatcagattggttgaatgcgaataatgtaccagccacaccagtggcgtggccgtcacaggagggacaaaatccttccttgtcgagtattcgaaaactcattcgtgacggatcgatagaccttgtcataaatttgccgaataacaatacaaagtttgtccatgataactacgttattcgacgaacagctgtcgattccgggattccgttgttgaccaacttccaggttacaaaattgttcgcagaggctgtgcagaagtccagaaaagtcgactcaaagtctctgttccattatcgccaatactcggcgggaaaggctgct

SEQ ID NO: 43513 - DNA, 4500 bp, Artificial Sequence
  derived and/or modified sequence
atgacgaggatcctcactgcatttaaggtggttaggaccctgaagacgggcttcggatttaccaacgtcacagcacaccagaagtggaagtttagccgccccggcatcaggttgctgtctgtgaaggcgcagaccgctcacattgtgcttgaagatgggaccaagatgaaaggatactcttttgggcacccaagctccgttgcaggagaggtcgtgttcaatactggcttgggtggctatcccgaagctatcaccgaccctgcctataaaggacagatcctgacaatggcaaacccaattattgggaacgggggagcacctgatactactgccttagacgagttagggctgtctaaatacctcgaaagcaacgggattaaggtgagcggtctcttagtcctcgactactccaaggattacaatcactggttggccacaaaaagcttgggacaatggcttcaggaagaaaaagtgcctgccatttacggagtggacacgcgaatgttgaccaagatcatcagagacaagggcaccatgctgggaaaaatcgagtttgaaggccagccggtagacttcgtagatcccaataagcagaacctgattgcagaagtttctacgaaagacgtgaaagtctatgggaagggcaacccgacaaaggtcgtcgctgtagactgcggcataaagaataacgtgatcagactgctggtgaaacgaggggccgaggtgcacctggtcccatggaatcatgacttcactaagatggagtatgatggtattctgattgcaggcggccccggtaaccccgctctggctgagccacttatccagaatgtgcggaagatactggagtcagatcggaaggaacctcttttcggtatatccacaggcaatttaattacgggcctagcggcaggagctaaaacctataaaatgagcatggcgaacaggggtcagaaccagcctgtgcttaatatcaccaataagcaggcattcatcactgcccagaatcacggatatgctctggacaacaccctgccagcaggctggaaaccattgtttgtcaacgtgaacgaccaaactaatgaaggtatcatgcacgagagtaaacctttctttgctgttcagtttcacccagaggttactccaggtccgattgacacagagtacctgttcgattcattcttctcgctcataaagaaaggtaaggccaccactataacctcagtgctcccaaaaccggccctggtggccagccgcgtggaagtctcgaaggttttgatcctcggatccggaggcctcagcattggtcaggctggcgagttcgactactcaggctctcaggctgtgaaggcaatgaaggaagagaacgttaagacagtgttaatgaatcccaatatagcgagcgtacagacaaatgaggtgggtctgaagcaggccgatacagtttacttcttgccaatcactccacagtttgtgaccgaagtgattaaggctgagcagcctgatggactcatactcgggatgggaggccagactgcactgaactgcggcgtcgaactattcaagcggggcgtgctgaaggaatacggggtgaaagtcctgggaacttcagtcgagtcaattatggccaccgaagacaggcagttgttttctgacaagttaaacgagattaatgagaagatcgcaccgtcattcgccgtggagtcaatcgaagacgctcttaaggctgccgataccatcggatacccggttatgatacgttctgcatacgcactgggaggcctgggctctggcatctgccctaaccgcgaaaccctgatggacctgtcaacaaaggcttttgccatgaccaaccagatccttgtcgagaaatcagtcaccggctggaaggaaattgagtatgaggtagtgagagatgctgacgacaactgcgtgaccgtgtgtaacatggaaaatgtcgacgccatgggggttcacaccggtgacagtgtagttgtcgctcctgcgcagactctttcaaacgcagaattccagatgctccgtaggacctctatcaacgtggtacgccatctgggtattgtgggcgaatgtaacattcagttcgctttgcatccaactagcatggagtactgtatcattgaggtgaatgcacgcctgagccgatctagcgcgctcgcctctaaagctaccggatatccactcgcattcattgccgccaaaattgcgttgggcattccactgcctgaaatcaaaaacgtggtttcaggcaagacatccgcttgttttgagcctagtctggactatatggttactaagattccccgctgggacctggaccgctttcacggcaccagtagcaggattggttctagcatgaagtcagtgggcgaagtcatggcaattggcagaaccttcgaggagagtttccagaaagcccttcggatgtgccatccgagcattgagggatttaccccgagattgccaatgaacaaggagtggccaagcaacttagatctgcggaaagaactgtctgaaccgtcctccactcgcatctacgctatcgctaaagctatcgatgataatatgtctctcgatgaaatcgaaaagttaacttatatcgacaagtggtttttatacaaaatgcgcgatatccttaacatggagaaaacgctaaaggggctaaacagtgaaagcatgactgaggagacacttaagcgggctaaggaaataggtttttccgacaaacaaatttctaagtgcctggggctgacagaagcccagactagggaactgaggctgaagaagaacattcatccttgggtcaaacagatagacacccttgccgcggaatatcccagtgtcacaaactatttgtacgtcacctacaacggtcaggagcacgacgttaacttcgatgatcatggcatgatggtgcttggctgtggaccttatcatatcggatcctctgtggagttcgattggtgcgccgtttccagcattaggactttgcggcagttgggaaagaagactgtggtggtgaactgtaatccagaaacagtgagcaccgactttgatgagtgtgataaactgtattttgaagagctcagcctggagcgtatcctggacatctatcatcaggaagcctgcggaggctgcattatcagcgtgggcggacaaatccccaataatctcgctgttcctttgtataaaaacggtgtgaaaatcatggggacctctcccctgcaaattgacagggctgaggacaggagcatctttagcgctgtgctagatgagctcaaggtggcccaggctccatggaaggctgttaatactcttaacgaagctctggaatttgccaagagcgtcgactatccttgtctgctaaggcccagctacgtactctccggatccgcaatgaatgtggtcttttctgaggacgagatgaaaaagttcttggaggaagctacccgggtgtcgcaggagcaccccgtggtgctaacgaagtttgtagaaggagcaagggaagttgaaatggacgctgtcggcaaggatgggcgcgtgatcagccacgcgatctctgagcatgtggaagatgcgggcgtgcactcaggtgacgctaccttgatgctcccaacccagaccatcagccagggcgctatcgagaaagtgaaagatgctacaagaaagatcgcaaaagcgtttgccatttcagggccattcaacgtccagtttcttgttaagggcaacgacgttctggtgattgaatgcaatctgcgcgcttcaagaagcttccccttcgtgagcaagaccttgggagtggatttcatcgatgtggccacaaaggtaatgatcggagaaaacgtggacgagaagcatctgcctaccttggatcacccgatcattccagctgattacgtggctataaaggccccaatgttcagttggccccggttaagggacgccgaccctatcttgaggtgcgaaatggcgtctacaggggaggtcgcatgttttggggaaggaattcatacagccttcttgaaggccatgctgtcaacaggatttaagatcccccagaaaggaatactcattggcattcagcagagctttcggcctcgcttcctgggggtcgcggaacagctgcacaatgagggtttcaagctttttgctaccgaagcaacaagtgactggctgaatgccaacaacgtgcccgccacgcccgtggcctggcccagccaggaaggacagaatcccagcctgagttctatcagaaaactgattagagatggctcgattgatctcgtgattaacctgcctaataataataccaagtttgtgcatgataactacgtcatcagaaggacggccgtggatagtggaattccgctcttgactaacttccaagtcaccaagctgttcgccgaggccgtccagaaaagcaggaaagttgattccaaatccctgttccactacagacagtatagcgctgggaaggccgct

SEQ ID NO: 43514 - DNA, 4500 bp, Artificial Sequence
  derived and/or modified sequence
atgactagaatcctgaccgccttcaaggtggtccgtactctcaagacggggttcggattcacgaacgtcactgcacaccagaagtggaaattcagccgcccggggatcaggctgctctctgtcaaggcccagactgcgcacatcgtgctcgaagatggaactaagatgaaaggatactctttcggacatccctcatcggtggcgggggaggtggtgtttaacaccggcctcgggggctatcctgaagccatcactgatccggcgtacaagggacaaatcctgactatggcaaaccccatcatcggaaatggtggagccccagacaccaccgcattggatgagctcggactttctaagtacctggagtcaaacggaattaaggtatccggcctgttggtgcttgactactccaaggattacaaccattggctggccaccaaatcgctgggacagtggttgcaggaagaaaaagtgccggcaatctacggcgttgatacgcgcatgctcactaagattattcgcgataaaggaactatgctcgggaagatagagtttgagggccagccagtcgacttcgttgatccaaacaagcagaatctcatcgcagaagtgtcaaccaaggacgtcaaggtgtatggcaagggtaatccaactaaagtggtcgctgttgactgtggtatcaagaataacgtgatcagacttctggtcaagaggggcgcggaagtacacttggtgccttggaatcacgacttcaccaagatggagtacgatggaatcttgatcgctggtggaccaggaaacccagcgctggcagaacctctgatccagaatgttcgcaaaatcctcgaaagcgatcggaaggagccccttttcggtatctccacgggaaatctgatcactggacttgcagcaggagctaagacttacaagatgtcgatggctaaccgaggccagaatcagccggtcttgaatatcactaataagcaagcgttcattaccgcacaaaatcatgggtacgctctggacaatacgctgcctgcgggatggaaaccactcttcgtgaacgtgaacgaccagaccaacgaaggaatcatgcacgaatcaaagccgtttttcgcagtgcagttccacccggaggtgaccccgggaccgatcgacaccgaataccttttcgactcgtttttcagcctcatcaagaagggtaaagccaccaccatcacgagtgtgctgccgaagccggcgctcgtggcctcacgcgtggaagtgtccaaagtgcttatcctgggaagtggcggactcagcattggacaagccggcgaattcgattactcggggtcccaagcggtgaaggcgatgaaagaggaaaacgtgaaaaccgtgctgatgaaccccaatattgcctcggtccagaccaatgaggtggggctgaagcaagcggacaccgtgtacttcttgcccatcactccgcaattcgtgaccgaggtgatcaaggccgaacaacctgatggtcttatcctcggaatgggaggacagacggcactgaattgtggagtagagctgttcaagcgtggcgtcctcaaggaatacggagtcaaagtgctgggcacgtccgtggaatcgatcatggctaccgaggaccggcaactgttttccgacaaactgaacgaaatcaacgagaaaatcgcaccgtccttcgccgtcgagtcgatagaagatgctctgaaggccgccgataccatcggatacccagtgatgatcagatcggcatacgcactcggaggactcggaagtggaatctgcccgaaccgcgaaacgctgatggacctgtcaactaaggcgtttgccatgaccaaccagatcctcgtggagaaatcggtcactggctggaaggaaattgagtatgaggtggtcagagatgcagatgataactgcgtgaccgtgtgcaatatggagaacgtggatgccatgggtgtgcatactggagacagcgtagttgttgccccggctcagaccctgtctaacgcagagttccaaatgcttcgcaggacttcaatcaacgtcgtgcgccacctcggtattgtgggggaatgtaatatccaattcgccctgcaccctacttccatggagtactgtatcatcgaggtgaatgcccgcctctcaaggtcatccgctctggcatcgaaggcaacgggatacccgctggcgttcatcgccgccaagattgcgctcggaattccgcttccagagatcaagaatgtagtctccggaaaaacgagcgcctgctttgagccttcgttggactacatggtcactaagattccgcgatgggaccttgacagatttcatggaacttccagccgcatcggtagcagcatgaagtcagtcggcgaagtgatggccatcggacgcacctttgaagagtcctttcagaaagccctgcggatgtgccacccgtccatcgaggggttcaccccccgcctcccaatgaacaaggaatggccctcgaacctcgacctgagaaaagaactgtcagaaccaagctcaacccgaatctacgctatcgcaaaggccatcgacgacaacatgtcactcgatgagatcgaaaagctgacttacatcgacaaatggtttctctacaagatgcgggacatcctcaacatggaaaagactctcaagggcttgaactccgagagcatgactgaagagactcttaagcgggccaaggaaatcggattcagcgacaagcagatcagcaagtgtctcgggctgaccgaagcgcagacccgggaactccggctgaagaaaaacatccatccctgggtgaagcagatcgatacccttgcagccgagtatccctccgtcacgaactacttgtacgtgacctacaatggacaagagcatgacgtgaatttcgatgatcatggaatgatggtgctgggctgcggtccgtaccacataggttcctcggtggagttcgattggtgtgccgtgagctcgatacggactttgcggcagctcggaaaaaagacggtggtggttaattgcaaccctgaaactgtcagcaccgactttgacgaatgcgacaagctgtacttcgaggagctttccctggaacggatcctggacatttaccaccaggaagcgtgcggagggtgcatcatcagtgtgggcgggcagatcccgaacaatctggccgtcccgctctacaagaacggcgtgaaaatcatggggactagcccactccaaattgatcgggcggaagataggtccatcttttccgccgtgctggacgaattgaaagttgcgcaggcgccctggaaggcagttaacaccttgaacgaagcactcgaattcgcaaagagcgtggactacccgtgcctgctgcgcccatcctatgtgctctcaggctcggcaatgaatgtagtgttctcggaggacgagatgaagaaattcctggaagaggccacccgagtgtcccaagagcatcctgtggtgctgactaagttcgtcgaaggggcccgcgaggtcgagatggacgccgtgggaaaggatggtagagtgatcagccacgcaatctcggaacacgtggaggatgccggtgtccactcgggcgatgcaaccctgatgctgcctacccagaccatctcgcagggagcgattgaaaaggtcaaagacgccaccagaaagattgccaaggcgttcgctatatcgggccctttcaacgtccagtttctggtcaagggaaacgatgtcctcgtcatcgaatgcaatctgcgggcgtcacggtcattcccgttcgtctccaagactctgggagtggacttcatcgatgtggccaccaaggtgatgattggggaaaacgtggacgagaagcacctcccgacgctggaccacccgattatccccgccgattacgtggcaatcaaagcccctatgttttcctggccgaggctgagagacgcggacccaatcctgcgctgcgagatggcgagcactggagaagtggcctgtttcggggaaggcatccataccgcgttcctcaaggcgatgctttcgactggattcaagatcccacaaaaaggaatcctgatcggaatccagcagtcttttcggccacggttcctgggcgtggccgaacaactgcataacgagggcttcaaactgtttgcgaccgaagctacttcggactggctgaacgctaataacgtccctgctaccccggtggcttggccgagtcaagagggccagaatccttcgttgtcctcaattcgcaaactgattagggacggtagcattgacctggtcatcaacctgccgaacaataacacgaaattcgtgcacgacaactacgtgatccgccggactgccgttgactcgggcatccccctgttgaccaacttccaagtgaccaaattgttcgctgaagccgtccagaaaagcagaaaagttgacagcaagtcattgttccactatagacaatattccgccggcaaggccgct

SEQ ID NO: 43515 - DNA, 4500 bp, Artificial Sequence
  derived and/or modified sequence
atgacacgcatacttacagctttcaaagtcgtacgcacattaaaaactgggttcgggttcacaaacgtgactgcacaccagaaatggaaattttcccggcctgggatacgcctcctcagtgtgaaagctcagactgctcatatagtgctcgaagatggaactaagatgaaaggatattcgtttggacacccttcttccgtcgccggggaggtagtgtttaacacagggctcggggggtatcctgaagccattacagatcctgcctataaagggcagatcctcacaatggctaatcccataatcggaaatggaggggccccagatacaacagccttagacgaactaggattgtctaagtatctggaatctaatggaattaaagtgtcaggactccttgttttagactactctaaagactataaccattggctcgccacaaaatctttagggcagtggctccaggaagaaaaggtccccgctatatatggagttgatactcgcatgctcacaaagataatccgggataaagggacgatgctagggaaaatcgagttcgaagggcagcccgtagatttcgtggatcctaataaacagaacctcatcgctgaagtgtccacaaaagatgtcaaggtgtatgggaaggggaatccaactaaggtggtggcagtggattgcggaattaaaaataatgtaataaggctgttggtgaaacggggggccgaagtccaccttgtgccttggaatcacgatttcactaaaatggaatatgatggaatactgatcgccgggggacctgggaatccagcccttgcagaacccttgatccagaatgtgaggaagatactagagtctgatcgcaaggagcctcttttcgggatatctacagggaatctcatcactggactcgctgcaggggccaaaacatacaaaatgtccatggccaaccggggacagaaccagcctgtgcttaacataacaaacaaacaggccttcataacagcccagaaccatggatacgctctcgataatactctgcctgctgggtggaaaccactcttcgttaatgtgaatgatcaaacaaacgagggaatcatgcacgagtcaaagcccttttttgcggttcagttccaccccgaagtcacaccaggaccaatagatacagaatatctgtttgactccttcttttctctgataaaaaagggaaaagccactacaattacaagtgttctgcctaaaccagctcttgtggcttctagggtcgaagtgtctaaagtgcttatacttggatctggagggcttagtatcgggcaggccggggagtttgactatagtggatcccaggcagtgaaagccatgaaagaagagaacgtcaagacagtcctcatgaaccctaacatcgcctccgttcagacaaatgaagttggattaaaacaggctgatactgtgtacttcttacctatcacaccccagttcgtgactgaggtgataaaagctgaacagcccgatgggctcatactggggatgggggggcagacagctctgaactgtggagtcgaactgttcaagagaggagttctcaaagaatatggggttaaagttctgggaacttctgttgaatctatcatggctactgaagataggcagcttttttctgataaactcaacgaaattaatgaaaaaattgctccttcctttgctgtcgagtccatagaagatgccttgaaggccgcagatacaattggataccctgtgatgataaggtccgcatacgcactggggggacttgggtcaggaatctgtcctaatagggagactttaatggatctctctacaaaagctttcgccatgactaaccagatattagtggaaaaatctgtcactggatggaaagaaatcgagtacgaagtcgtgcgcgatgcagatgataactgtgtgacagtgtgtaatatggagaatgtcgatgctatgggagtccatacaggagattctgtggtggtagcaccagctcagactttgtctaacgcggaatttcagatgttgagaaggacttccatcaatgtggtacgacatttggggatcgtaggagaatgtaatattcagtttgcattgcatcctacttctatggaatactgtattatcgaagtgaatgctcgcctctcccgtagtagtgcgctagcttctaaagccactggatatcctctcgcattcatcgctgctaaaatagcactcgggatacccctgcctgaaatcaaaaacgtggtgtctggaaaaacgtcggcttgttttgaaccgtcattagactacatggtaacaaaaatccctcggtgggatctggataggttccatgggacaagttcacggatcgggagttctatgaaatcggtgggggaagtaatggccattgggaggacatttgaagagtctttccagaaggcccttaggatgtgccacccctctatcgaagggttcactcctaggctccccatgaataaagagtggccttctaacctcgatctcaggaaagaactctccgaaccatccagtactcgaatttatgccatcgccaaagccattgatgataacatgtctctagatgaaatagagaaacttacttatatagataaatggtttctatataaaatgcgggatatccttaatatggaaaaaacattaaaaggactgaactccgaatctatgacagaagaaacacttaagcgagccaaagaaataggattctccgataaacagatctccaaatgcctcgggctgacggaagctcagacaagggagttgcggcttaaaaaaaatatacatccttgggtaaaacagatcgatacacttgcggccgagtacccatctgtcacaaattacctttatgtcacttacaatggacaggaacatgacgtcaactttgatgatcacgggatgatggtactgggatgtgggccatatcatatcggaagttctgttgagtttgattggtgtgctgtcagttccatacgcactctcaggcagctcgggaaaaaaactgttgttgtcaattgtaaccctgaaactgtaagtactgatttcgatgaatgtgataaactctacttcgaagaactgagtcttgaaaggatccttgatatttaccatcaggaggcctgtggaggatgtatcataagtgttggagggcagatccccaacaacttagctgtcccattatataaaaacggggtcaaaatcatggggacttcccccctgcagatcgatagggcagaggatagaagtatcttttctgctgtcttagatgagctgaaagtcgcacaggcaccttggaaagccgtgaacacgttgaatgaagctctggagttcgcaaaatctgttgattatccctgtctccttagaccctcttatgttttgagtgggtcagcaatgaatgtcgtattctccgaagatgaaatgaaaaaatttctggaagaagccacgagggtctcccaggaacatccagtggtgctcactaagttcgtcgaaggggcccgagaagttgaaatggatgccgtgggaaaagatggaagagtgatttctcatgcaataagtgaacatgtggaagacgcaggggtacatagtggggatgccactctcatgctccctactcagactatctcacagggagctatcgaaaaagttaaagatgctactagaaagatagccaaagcatttgcaattagtggaccttttaatgttcagttcctcgtcaagggaaatgatgtacttgtgattgaatgtaacttgagggcttccagatcatttcccttcgtatctaaaactttaggggtggacttcatcgatgtggccacaaaagtcatgatcggagaaaacgttgatgaaaaacatctccctactcttgatcaccctattatacccgcagattacgttgctatcaaagcacctatgttttcctggcctcggttgcgggacgctgatcccatcctgaggtgcgaaatggcttccactggagaggtagcatgtttcggagaaggaattcacactgccttcttgaaagccatgctttcaacaggattcaaaataccacagaaagggatattaatcgggatacagcagagttttagacccaggttccttggagtggcagaacagctccataatgaagggttcaaacttttcgccactgaagccacatctgactggttgaacgccaataacgtgcctgcaactcctgtggcctggccttcccaggaagggcaaaatccctccctctcttctatccgcaaattaatcagagacggatctatagatctggttatcaacctccctaacaataacacaaaattcgtgcacgataactatgtgatccggaggacagctgtggattccggaatacccctcctgactaacttccaggttacaaaactatttgcagaagccgtgcagaaaagtcggaaagttgatagtaaatctcttttccactatcggcagtactctgcgggaaaagccgcc

SEQ ID NO: 43516 - DNA, 4500 bp, Artificial Sequence
  derived and/or modified sequence
atgacaaggattctcacggccttcaaggtggtccggactctcaagacaggcttcggcttcaccaacgtcaccgctcaccagaaatggaaattttccaggcctgggattaggcttttgagcgttaaggcccagacagcccatatcgtgctggaggacggcactaagatgaagggatactctttcggacaccccagcagcgtggccggagaggtagtttttaacaccggcctgggaggctaccctgaagctattaccgatccagcgtataaaggccagattctgacaatggcaaatcctatcataggaaatggcggtgctccagatacaactgcccttgatgagctcggcctttccaagtacctggagtctaatggtatcaaggtgagtggtctcttggtccttgattactcaaaagattacaatcactggctcgccaccaaatctctgggtcagtggttgcaggaggaaaaagtgcccgcaatttatggagtcgacacaaggatgttgacaaagattatcagagacaagggtactatgttggggaagattgagtttgagggccaacccgtggattttgttgaccctaacaagcagaatctgattgcagaggtatcaaccaaagacgttaaggtgtacggaaagggcaatcctaccaaagtggtggcggtggattgcggcatcaaaaacaatgtgattaggctgctggtcaaacggggagccgaagtgcacctcgtcccttggaatcatgacttcaccaaaatggagtatgacggtatccttattgccggcgggcctggtaatccagcattggccgagcccctgatccaaaatgtgcggaagattctggaatccgaccgcaaggagccactcttcggtattagcaccggaaatcttattacaggactcgccgccggcgctaagacttataaaatgtccatggctaatcggggacaaaatcagcccgtgctgaatattactaataagcaggcgtttatcactgcacaaaaccacggctacgctttggacaatactctgccagctgggtggaagcctctgtttgtgaatgtaaatgaccaaacaaacgagggcatcatgcatgaaagcaaaccattttttgccgtgcagttccacccggaggttacaccagggcccattgacaccgagtacttgttcgattcctttttcagcctgataaagaagggaaaggccactaccatcaccagtgtgctgcctaaaccggctctcgtggcatctcgagtggaggtgtccaaagtattgatcctgggatccgggggtctcagcataggccaagctggagagttcgactacagcggctcacaggcagtcaaggcgatgaaagaagaaaacgtcaagaccgtcctgatgaaccctaacattgccagcgtgcagacaaacgaagtgggcctcaaacaggccgacacagtgtatttcctgcccattacacctcagttcgtgacggaagttataaaagcagagcaacccgatggtttgatactgggaatgggtgggcagaccgcacttaattgtggcgtggagctctttaagcggggagtgttgaaggaatatggagtgaaggttcttggtacctctgtggagagcataatggccactgaagacagacagctgttttctgacaagctgaacgagattaatgagaagatagctccttctttcgctgtggaatcaatcgaagacgccctgaaggctgcagacaccataggataccccgtaatgattcgatccgcctacgctctgggcgggctgggatctggaatctgtccaaatagggagactctgatggacttgtccacgaaggctttcgctatgacgaaccagattttggtagagaaaagcgtcactgggtggaaggagatcgagtatgaggtggtgcgggatgcggacgacaactgcgtgacagtctgcaacatggagaatgtggacgccatgggcgtccacaccggcgactctgtggtggtggcaccagcccagacactgagcaatgctgaatttcagatgctgagacgcacttccatcaacgtggtccggcatctgggtattgtcggagagtgcaatatccagtttgcactccatcccacgagcatggaatactgtataatcgaggtgaatgctagactgtcacgatcttctgcgctggcgtccaaggctacaggctacccattggcattcattgctgccaagattgcacttgggatccccctccccgagatcaagaacgtggtgtctgggaagacttctgcctgcttcgagccttctctcgactacatggtcactaaaatacctagatgggacctcgatcggttccacggtacctccagccggatcggttcaagcatgaaaagtgtgggtgaagtcatggccatcggcagaaccttcgaggaatcctttcagaaggccctgaggatgtgtcaccccagtatcgagggatttacacccagactgcccatgaataaggaatggcccagcaaccttgatctgagaaaggagctttccgaaccaagcagcacccggatatatgccatagccaaggccattgatgacaacatgtctctggatgaaattgagaaattgacttatattgacaagtggttcttgtataagatgagagacattctcaacatggaaaaaaccctgaaggggctcaacagcgagagcatgacagaggagaccttgaagagagccaaggagatagggttcagtgacaagcagataagtaaatgccttggtttgaccgaggcccagacacgggagctgaggttgaagaagaatattcacccgtgggtgaaacagatagataccctggcagccgagtatccctccgtcaccaattacctttacgtgacatataatggtcaggaacatgatgtcaatttcgatgaccacggcatgatggtgctgggctgcggtccttaccacatcggctcatccgtcgagttcgactggtgtgctgtcagctccattagaaccctgaggcagctgggaaagaagaccgtggtagtaaactgcaaccctgagacagtgagcaccgactttgacgagtgcgacaagctgtatttcgaggagctttccctggaacggatcctggacatctaccatcaagaggcctgcggaggttgtatcatttccgtggggggccaaatcccaaataatctcgcagtccctctgtacaagaatggggtaaaaattatgggaacctctcctctccagattgatagggccgaggatcggagcatcttctcagcagtgctggacgagctgaaggtggcgcaggccccctggaaggccgttaacacgttgaacgaagccctcgaattcgctaagtccgtggattatccctgtttgctgcgccctagttatgtactgagtggatctgccatgaacgtggtattttccgaggacgagatgaagaagttcctggaagaggcaacgagagttagtcaggaacacccagtcgtgctgacaaaatttgtcgaaggtgcaagagaagtggagatggacgctgtgggaaaggacggtagagtgattagtcacgcgatctcagaacacgtagaggacgcaggagtgcactcaggcgacgcgactctgatgctgccaacacagactatcagccagggagccatcgagaaagtgaaggacgcgactagaaaaatcgcaaaagcattcgctatctcaggcccgtttaacgtacagttcctggttaaagggaacgatgtactggtaattgagtgcaatctgcgcgccagtcgcagcttcccatttgtgtctaagacactcggggtggacttcatcgatgtagcaaccaaggtcatgatcggggagaacgtggacgagaagcacctcccaaccctcgatcatccgataatacctgcggactatgtggctatcaaagcccctatgttctcttggcccagactccgggacgccgacccaatcctcagatgtgaaatggccagtaccggagaggttgcctgctttggagaaggtattcacaccgcctttctgaaggcaatgctctctaccggattcaagatcccacagaaagggatcctgattggtatccagcagagcttcaggcctaggttcctgggagttgcagagcaactgcacaacgaagggttcaagctcttcgcgacagaagccacatccgattggttgaacgccaacaatgtccccgccacccctgtagcctggccttcccaggaggggcaaaatccatcactgtcttctatccggaagcttatcagagacggctccattgacttggtcatcaatttgcccaataacaacactaagtttgtccacgacaattacgttattaggcgaacagcggtagactcaggaatccctctgctgaccaatttccaggttaccaagctgtttgcagaggccgtacaaaaaagtcgaaaagtggattctaaaagtcttttccactacagacagtattctgctggcaaggcagcc

SEQ ID NO: 43517 - DNA, 4500 bp, Artificial Sequence
  derived and/or modified sequence
atgactcgcattttgaccgctttcaaggtggtgcgtacgctgaagactggatttggatttacaaacgtgacggctcatcagaagtggaagtttagccggccgggcatccgattgttgtcagttaaagcccagactgcacacatcgtccttgaagatggtaccaagatgaagggatacagttttggacaccctagcagcgtagccggagaggtcgttttcaatactggcttaggggggtaccccgaagcgatcacagacccagcttataaggggcagatacttactatggctaatcccataatcggcaacggcggggccccggatactaccgctttggacgaactgggcttatcgaagtacctggagtccaacgggataaaggtcagtggacttctggtgctggattactcaaaagattacaatcactggctcgcaacaaagagtctaggtcagtggctgcaggaggaaaaagtacctgccatatacggggtggatactagaatgctgacaaaaatcatacgggataagggtaccatgctcggaaagatcgaatttgaggggcagccagtcgacttcgtggatcccaataagcaaaacctgatcgcagaggtgagcacaaaagatgtcaaggtgtacgggaagggcaatcccacaaaggtggtggctgtagactgtggaattaagaataatgtcattcggctgctggtcaaacggggcgctgaggttcacttggtgccctggaatcacgattttacaaaaatggagtacgatgggatcctgattgccggcgggcctggaaatcccgctctcgccgagcctctgatacagaatgtgcggaaaatattggagagtgacaggaaggagcccttgttcgggataagcacaggtaacctgatcacagggctggcagctggggctaaaacttataaaatgtctatggccaaccggggacaaaatcagcctgtccttaatatcacaaataagcaagccttcattaccgcgcagaaccacggatatgcactggacaacacattacctgccgggtggaaacctcttttcgtcaacgtgaacgatcagaccaatgaaggcattatgcatgaaagtaaacctttttttgctgtccagttccaccctgaagtgacgccgggtcccatcgatacagagtacctgttcgactctttcttctctctgatcaaaaagggaaaggctacgacaatcacttcagttcttcccaaacccgctctcgttgcctcccgcgtggaagtgagcaaggtgcttattctcggatcggggggcctctcaataggtcaggctggcgaatttgattactctggcagtcaggcagtaaaggccatgaaagaagaaaatgttaaaaccgtactaatgaaccccaatatcgcctccgtgcagaccaatgaagtcggtctgaagcaagctgatacggtttatttcttgccgatcacacctcagtttgtcacagaggtgatcaaggccgagcagcccgatggcctcatcttagggatgggaggtcagactgctctaaattgcggcgtcgagctgttcaagcggggtgtgctgaaggagtacggagtgaaggtgcttgggaccagcgtggagagcataatggctactgaagatcgccagcttttcagcgataagctgaacgagataaacgaaaagattgcaccttcattcgctgttgagagtatcgaagacgccctcaaggccgccgatacaataggctaccctgtgatgatacgcagtgcctatgccctggggggcctgggatctggcatctgcccaaacagagagaccctgatggatctgagtacgaaagcattcgctatgacaaatcagatcctcgtagagaaaagtgtgacaggctggaaagagatcgagtatgaagtagtccgggacgcagacgataattgcgttactgtttgtaacatggagaacgtggatgccatgggagtccatacgggagactccgttgtcgttgcacctgcacagaccctgtcaaatgcagaatttcagatgctgaggcgcacttccataaatgtggtgagacacttgggtatcgtcggagaatgcaacattcagttcgctttacatcccacaagcatggagtattgtatcatcgaagtcaatgcaaggctgagccgatcttcagcactggcttcgaaggccaccggatatcctcttgcctttattgctgcaaaaatagccttgggcatcccactccccgagattaagaacgtggtgtcaggaaagacatcagcgtgcttcgagccaagcctcgattacatggtcaccaaaatcccccgatgggacctggaccgctttcacggcacctcctcccgaatagggtcttcaatgaagtccgttggagaggtcatggctattggccgcacctttgaagaaagttttcagaaagcactgagaatgtgccatccctcaatcgagggtttcaccccgagattgcccatgaacaaggaatggccttccaacctcgatcttcgtaaagaactctccgagccatcttccacacgcatatatgccatcgcgaaggctatcgacgacaatatgtctttggacgagattgagaagctgacgtacatcgacaaatggtttctctataaaatgcgtgacatactcaacatggagaagacccttaagggtctgaattctgagtcaatgacggaggagacgttgaaaagagccaaagaaattggattctcagataagcagatttccaagtgtctgggcctgaccgaggcgcagacacgcgagctccgcctcaagaaaaacattcatccctgggttaaacagattgatactttggccgctgaatatcctagcgtgaccaactacttgtatgtgacctacaatggacaggagcacgacgtgaatttcgacgaccacggcatgatggttctcggatgcggtccgtatcatatcgggtcctcagtagagttcgattggtgcgccgtcagctccatcaggacactgcgccagcttggaaagaagactgtcgtagtgaactgcaacccggagaccgtgtctacagatttcgacgagtgcgacaagctgtattttgaggagctgagcttggagaggatccttgacatctaccaccaagaagcatgtgggggttgtatcatctccgtgggagggcaaatccctaataatctggccgtcccactgtataagaacggggtaaagatcatgggtactagccctcttcagattgatcgggctgaagaccgaagcattttttccgctgtgctcgatgagctgaaggtggctcaagccccctggaaggcagtgaacaccctcaacgaagctctcgagtttgctaaatccgtcgactatccatgcttactgaggccgtcgtacgtactttccggttcagccatgaacgttgttttcagcgaggacgaaatgaagaagttcctcgaggaggctacaagggtgtcccaggaacacccagtagttctcactaagttcgtcgaaggagccagagaagtggagatggatgccgtgggcaaagatgggagggtgatctcccatgctatttcggagcatgttgaggatgccggcgtccacagcggtgatgccaccctcatgctacctacacaaaccatctcacaaggggcaatcgagaaggtaaaggacgctactagaaagattgctaaagcatttgccatttccgggccctttaatgtccagttcttagtcaaagggaatgatgtgctggtgatcgagtgcaatttgcgggcatcaagatcctttcctttcgtctccaaaacattgggcgtggacttcatcgatgtagccacaaaggttatgattggagagaatgtggatgaaaaacacctgccgacattggaccatccgatcattccagccgattatgtagccattaaggcccctatgttcagttggcccaggctccgggatgctgaccccatcttgaggtgcgagatggcctcgacgggtgaggttgcttgcttcggtgaaggcatccacaccgcattcctgaaggcaatgctgtcaacaggtttcaaaataccacagaagggcatcttgattggtattcagcagtccttccggccgcgcttcctgggagtagccgaacaactccataatgagggctttaaactgtttgctaccgaagccacctccgactggttgaacgccaataatgtgcctgcgactccggtagcctggccaagccaggaaggacaaaatcctagcctcagcagtattaggaagttaatccgcgatggaagcatcgatctagttattaacctgcctaataacaatacaaaattcgtgcacgataactatgttatcaggaggactgcagttgattccgggatccccttgttgaccaacttccaggtgaccaagctgtttgcagaggccgtgcagaaatcaaggaaggttgattccaagtccttattccactataggcaatattcggcgggcaaggctgcc

SEQ ID NO: 43518 - DNA, 4500 bp, Artificial Sequence
  derived and/or modified sequence
atgactaggatccttactgccttcaaggtcgtcagaaccctgaaaactggatttggatttaccaatgttactgcccaccagaaatggaagttcagccgccctggcatacgactgctgtctgtgaaggcacagaccgcgcacatcgtgcttgaggacgggactaagatgaagggctactcttttggacatccgtcgtcagtggctggcgaagtcgtctttaacactggtctgggcggataccctgaagcgattaccgacccggcatacaaaggacaaatcctgaccatggcgaaccctatcatcgggaatggaggagctcctgacaccactgctctcgatgagcttggattgtcgaagtacctggagtctaacggcattaaggtgtccggactcctggttctggactactcgaaggactacaatcactggctggccaccaaatcactgggacaatggctccaggaagaaaaggtgcccgcgatctacggagtcgacacccgcatgctcactaagattatccgcgacaaaggtactatgctcggtaagatcgaattcgagggacagccggtcgacttcgtggatccgaacaagcagaacctgatcgcggaagtgtcaactaaggacgttaaggtgtacgggaagggtaatccaactaaggtggttgccgtggactgtggcatcaagaacaacgtcatcaggctgctcgtcaaacgcggcgccgaagtgcacctcgtcccgtggaaccatgattttaccaagatggagtacgacggaatcctcatcgcgggcggaccgggcaatccagccctggccgaaccactgatccaaaacgtaagaaagatccttgagtcggatcgcaaggagccacttttcggcatctccaccgggaacctcattaccggcctggctgctggcgccaagacgtacaagatgtcgatggccaatagaggacagaaccagccggtgctgaatatcactaataagcaagcatttatcactgcccagaatcatggatacgcactggacaacaccctcccagcaggatggaagcctctcttcgtaaacgtgaacgaccaaaccaatgaaggaattatgcacgaatcgaagccgttcttcgcggtgcaattccaccctgaagtgaccccggggcctatcgatacggaatacttgttcgacagcttcttctcgctgatcaagaagggaaaagccaccaccatcacctcggtgctgcctaaaccggccttggtggcttcaagagtcgaagtcagcaaggtcctcatccttggaagcgggggactttcaatcggacaggcaggggagtttgactactcgggatcgcaagccgtgaaggcaatgaaggaggaaaacgtaaaaaccgtcctgatgaacccgaatatcgcttcggtgcaaactaacgaagtaggattgaaacaggcggacacggtgtatttcctgccgatcaccccacagttcgtaactgaagtgatcaaggcagagcagcctgacggactcatcctcggcatgggtgggcaaaccgccctcaactgcggagtggagctcttcaagcggggggtgttgaaggagtacggggtcaaggtgctgggaactagcgtggaatcgattatggccaccgaagatcggcagctcttttccgacaagttgaacgaaatcaacgaaaagattgcaccatcattcgctgtggagtctatcgaagatgctctcaaggcagcggacacgatcggatatccggtgatgattcgcagcgcttacgccctgggaggactgggatcaggcatctgccccaatcgcgagactctgatggacctgtctaccaaagcgttcgcgatgacgaaccagatcttggtagagaagtcggtgacgggatggaaggagatcgaatacgaggtggtgcgcgacgcagatgataattgcgttactgtctgtaatatggaaaacgtggacgccatgggggttcatactggggattccgtggtcgtcgctccagcgcaaaccctgagtaacgctgagttccaaatgctccgccggacctccatcaacgtcgtccggcacctcggcatagtgggagaatgcaacatccaatttgccctgcacccgactagcatggaatattgcatcatcgaggtcaacgcgagactctcccggtcatccgcgctcgcctccaaggccaccggataccctttggctttcatcgctgccaaaatagctctgggcattccgctgcccgaaatcaagaacgtggtgtccggcaaaacctccgcatgcttcgaaccttccctggattacatggtcaccaaaatcccacggtgggacctggacagattccacggcacttcctcacgcatcggatcctcgatgaaatcagtgggagaggtcatggcgataggtaggactttcgaggaatcctttcagaaggcgctgcggatgtgccacccgagcatcgaaggatttacgccgcgtctcccaatgaataaagaatggcctagcaatctggacctgcggaaagagctgagcgaacccagctcgacgcgcatctacgctatcgccaaggccatcgacgacaacatgtccctcgatgagatcgagaaactgacctacattgacaagtggttcctttacaagatgcgggatattctcaacatggaaaagactctgaaaggacttaactccgaaagcatgactgaggagactctgaagcgggcgaaggaaatcggattttcagataagcagatcagcaagtgcctgggactcaccgaggcgcagacgcgcgagctgaggctgaagaaaaacatacacccgtgggtgaaacagattgacacccttgccgccgaatacccgtcggtgactaactacctgtacgtgacctataatggtcaggaacacgatgtcaacttcgatgaccatggcatgatggttctcggatgtggaccgtaccatatcggaagctcagtcgaatttgattggtgcgccgtgagctccatccggactctcaggcagctggggaagaaaaccgttgttgtcaactgtaatccggaaaccgtctccaccgacttcgatgagtgcgataagctgtacttcgaggagctcagcctcgagagaatcctggacatctaccatcaggaggcctgtggaggctgcatcatctccgtaggaggtcagatccccaacaacctggccgtgccattgtacaagaatggagtcaagattatggggacttcgccgctccagatcgacagggccgaagatcgctccatctttagtgcggtgcttgacgaactgaaggtcgcacaagcaccgtggaaagcggtgaacaccctcaatgaagcactggaattcgccaaatcggtggactacccgtgcttgttgcgaccgtcttacgtcctgtctgggtccgcaatgaatgtggtgttcagcgaggacgagatgaaaaagtttctggaagaagccacccgggtttcgcaggagcatccagtggtcctgactaaattcgtggagggagcaagagaggtggagatggacgctgtgggaaaagacgggagagtgatcagccacgccattagcgagcatgtcgaagatgctggcgtgcactcgggcgatgccaccttgatgctgccgacccaaaccatttcgcaaggtgcgattgaaaaagtgaaggatgcgacccggaaaatcgctaaggccttcgccatcagcggacccttcaatgtgcagttcctggtgaagggaaacgacgtgctggtcatcgaatgtaatctgcgggcatcccgctctttcccattcgtgtcgaaaacgttgggcgtggacttcatcgatgtggctactaaggtgatgattggtgaaaacgtggatgagaagcatctgcctactctcgaccacccgatcatcccggctgactatgtcgcaattaaggcaccaatgttttcgtggccgagactgcgagacgccgacccaatcctcagatgcgaaatggccagcactggggaggtggcctgcttcggggaaggcatccacacggccttcctgaaggcgatgctttctaccggttttaagattccacagaagggtattctgatcggcatccaacaatcgtttcgcccgagattcctcggagtcgctgaacagctgcacaatgaaggattcaagctcttcgccaccgaggccactagcgattggctgaacgcaaacaatgtccctgccaccccagtggcctggccctcgcaggagggacaaaacccctcgctgtcgtcaattcggaaactgatcagagacggcagcatcgatctggtgatcaacctccccaataacaacaccaagttcgtgcatgacaattacgttatccgccgcactgcggtcgattccggcatcccgctgttgaccaatttccaggtgactaagttgttcgcggaagcggtgcaaaagtccaggaaggtggactcgaaatcactgttccactatagacagtactcagcaggaaaggcggcc

SEQ ID NO: 43519 - DNA, 4500 bp, Artificial Sequence
  derived and/or modified sequence
atgactagaattttgactgcattcaaggtggtgcgcaccctaaaaacaggatttggcttcaccaatgtgaccgcccatcagaagtggaagttctctaggcccggtatccggcttttgtccgtcaaggcacagactgcccatatcgttctggaggatggaactaagatgaaaggctacagcttcggacacccatctagtgtcgctggtgaggtcgtcttcaacactggactcgggggttaccctgaggccatcactgacccagcatataagggacaaatcctcacaatggcgaaccccattatagggaacggcggcgccccagacactaccgctctggacgaattgggcctgagcaaatacctcgagtctaatggcatcaaagtgagcggactgctcgttttggactacagtaaggattacaaccattggttagccaccaagtccctcggccagtggctccaagaggagaaagtgcccgcaatttacggagtcgatactagaatgctcactaagatcattcgagataaaggcaccatgctggggaagattgagttcgaaggacagcctgttgattttgtggaccctaataagcagaacttaatcgcagaggtctctacaaaggatgtgaaagtttacggcaagggaaaccctaccaaggtggtggccgtggactgcggaatcaagaataacgtgatccggctcctcgttaaacgcggcgcagaagtccacctcgtaccatggaaccatgattttacaaaaatggagtatgacggtattttgatcgcgggcggacccggcaatcccgcgctcgctgaaccgttgatacagaacgtgcgcaaaatcctggagtcagacaggaaggagcccctctttgggatctcaaccgggaatttaattacaggcttggccgcaggagctaagacatacaagatgtcaatggccaatcggggacaaaaccaacctgttctgaacattaccaacaagcaggcctttataaccgctcagaatcatgggtatgcactagataacacccttcctgcagggtggaagccactcttcgttaacgtcaacgatcagacaaatgaaggtatcatgcacgaaagtaaacccttttttgccgtgcagttccacccagaagtcacccctgggccaatagacaccgaatatctgttcgactcgttcttcagtctcattaaaaagggaaaagccacaaccattacctccgtcttgcccaaaccagccctcgtcgcgtctagggtggaggtgtctaaggtccttatattaggatctggagggctctccataggtcaggccggggagttcgactactccggcagccaggcggtgaaagctatgaaagaggagaatgtcaaaacagtgcttatgaaccccaacatcgccagtgtgcaaacaaacgaggtggggctcaagcaggcagataccgtctatttcttacctattactcctcagtttgtaacagaggtgattaaagctgagcagccggacggactgatcttgggcatgggtgggcagacggcacttaattgtggcgtggagctctttaagcgtggagtgctgaaggagtacggagtgaaggttctggggaccagcgtggagtcaatcatggccaccgaggaccgccagttgtttagcgataagctgaatgagattaatgaaaaaatagcaccatcctttgctgtggaaagcatagaggacgccctaaaggccgccgacacaatagggtatccagttatgataagatccgcgtatgcattaggaggattaggcagcggaatctgcccgaaccgcgagactttgatggacctctcgacaaaagcatttgctatgaccaatcagatcctggtggagaagtcagtgaccgggtggaaagaaattgagtatgaagtagtccgggatgccgacgacaattgcgttacagtctgcaacatggagaacgtagacgcaatgggcgtacacactggcgacagcgtggtggtggcgcccgcccagacattgtccaacgccgaattccaaatgctgaggcggacaagcattaacgtggtcaggcacttgggaattgtgggagagtgcaatatccaattcgcactccacccaaccagtatggagtactgtattattgaagttaatgcccggctctcccgtagctcagctctggcctctaaagccacgggctatccactggcattcattgctgctaaaatagctctgggcatacccctgccggagatcaagaatgtcgtctccgggaagacttctgcgtgctttgaaccgagtctggattacatggttactaaaatcccgcgatgggacctcgataggtttcacggcacttcttcgagaatcggatcttcaatgaaatcggttggagaggtgatggcaatcggacgtacttttgaagagtcctttcagaaggccctgaggatgtgccatccatctatcgagggctttacccccaggctgccaatgaataaggagtggccgagcaatctcgacctccgaaaagagctctccgagccttcttcgaccaggatctacgctatagcaaaagcaattgacgacaatatgagcttggacgagatcgagaaattgacttatatagacaagtggtttctttataagatgcgcgatatactcaacatggagaaaacactcaagggattgaacagcgagtctatgacagaggaaactctcaagcgggctaaggagattggattttctgataaacagatcagcaaatgtctcgggctcaccgaagctcagacaagagagctaaggttgaagaagaacattcacccctgggtgaaacagatcgataccctcgctgccgagtatccttctgtgaccaactatctctatgtgacttacaatgggcaggagcacgacgttaattttgacgaccatggcatgatggtcctcgggtgtggcccatatcacataggctcctccgtggagtttgattggtgtgccgtgtccagtattcggaccctgcggcagctgggcaaaaagactgtggtcgtgaattgcaaccccgagactgtgtcaaccgatttcgatgaatgcgataaattgtatttcgaagaactgagcttggagagaattctagatatataccaccaggaagcttgcggggggtgtatcatctctgtgggcggccagattcctaataatctggcagtgccactgtacaaaaatggagtaaagatcatgggcacttcacctttacagattgatcgtgctgaggacagaagcatattttctgcagttctcgacgagctgaaggtcgctcaggcaccatggaaagcagtgaacaccctgaatgaggccctggaatttgcgaagtcggtggactacccctgtcttctcaggccgagttacgtgttaagtggctccgcaatgaatgtggtgtttagcgaggatgagatgaagaaattcctggaagaggccacgagggtttcacaggaacatccggtggtgctcaccaaatttgtggagggggctagggaggtggaaatggatgcggtgggaaaggatggccgggtgatctcacatgcaatttcggaacatgtggaggacgctggggtgcatagtggggacgcaacccttatgctgccaacccagacaataagccaaggcgccattgaaaaagtgaaagatgcaactcgcaagattgcgaaggcgttcgcaatttccgggccttttaatgtccagttcttagtaaaggggaacgatgtgctagtaatagaatgcaacttgcgggcctctcggagctttccatttgtatcaaagaccctcggagtggactttattgacgtggcaacaaaagtgatgataggcgagaatgtcgatgaaaaacatctgccaacactggaccatcctatcatacctgctgattacgtagcgattaaagctccaatgttcagttggcctcgccttcgcgatgcggatcccatactccgctgtgagatggcatctacaggggaggtggcgtgcttcggagaggggatacacaccgcctttctgaaggccatgctatctaccgggttcaaaattccccaaaagggtatccttatcggcatccaacagtcatttcggcccaggtttctgggcgtggcagaacagctacataatgaaggatttaagctcttcgccaccgaagctacctctgattggctgaacgccaataacgtacctgccacccccgtggcctggccttctcaggaggggcagaatccatctttatctagtatcaggaaattaatccgggatggctcgatcgatctggtgatcaacctgcctaacaataataccaaatttgtccacgacaattatgtcattcggcggaccgccgtggattccggtatccccctcctcaccaatttccaggtcacaaaattgtttgccgaagccgtgcagaagtcacgaaaggttgactccaagtcactgtttcactaccggcagtactctgcaggaaaggccgct

SEQ ID NO: 43520 - DNA, 4500 bp, Artificial Sequence
  derived and/or modified sequence
atgaccagaatactgacggcctttaaggtcgtgaggacgctgaagaccggcttcggattcaccaatgtcacagcccaccaaaaatggaagttctctcgccctggtataaggctgctgtcagtgaaagcccagacggcccacatcgtgttggaggacggaactaagatgaagggctactccttcggccacccctcatctgtggctggcgaggtggtctttaacaccggtctcggaggttacccggaggctatcactgaccccgcctataagggacaaatcctgacgatggctaatccgatcattggtaacggaggagctcctgatacaactgctctggatgaactgggtctgagtaaatacctcgaatctaacggcatcaaggtctctggtctgctggtgctcgactacagtaaagattataaccattggctggcgacaaaatccctcggtcagtggctccaagaggagaaagtccctgcaatctacggcgttgatactagaatgctgactaagattatccgcgataagggcacgatgctgggcaagatcgagtttgagggccaacctgtcgacttcgtcgatccaaacaagcagaatctcatagcagaggtgtccacaaaggacgtgaaggtctacggcaagggtaaccccaccaaggtcgtggcggtagactgcggcatcaagaacaacgttatcaggctcctggtgaaacgcggtgccgaggtccacctggtgccgtggaatcacgacttcactaagatggaatacgatggcatacttatcgcaggcggtccaggaaacccggcactcgctgagcccctgatacagaacgttagaaaaatcttggaaagtgaccgcaaggaaccactgtttggaatcagcaccggaaacttgattacaggccttgctgccggtgcaaagacgtataagatgagcatggccaacagaggacagaaccagcccgtcctgaatataacaaacaagcaggcattcatcaccgctcagaaccacggttacgccctggacaataccttgcctgcgggttggaagccacttttcgtcaacgtgaatgatcagaccaatgaaggcattatgcacgaatccaagccttttttcgctgttcagttccatccagaagttacccctggccctatcgataccgagtatttgttcgacagctttttcagtctcataaaaaagggcaaagctaccactataacctccgtgcttccgaaacctgcgctcgtggcaagcagagttgaggtcagcaaggtgctgattcttggcagtggtggtctctccattggccaggcaggcgagttcgactactcaggaagccaggcggtgaaggctatgaaggaggagaacgtgaagacggtcctgatgaatcccaacatcgcatcagtccaaacgaacgaagtcggactcaaacaggcagacacagtctatttcctgccaataacaccacagtttgtgacagaagtgattaaggccgaacagcccgacggcctgattctgggaatgggtggtcaaaccgctcttaactgcggcgttgagctgttcaagaggggagttctcaaggagtatggagtaaaagtgctgggcacttccgttgagagtatcatggctaccgaggacagacaattgttctcagacaaacttaacgagatcaacgaaaaaattgcaccatccttcgccgtggaatctattgaggacgctctcaaagcagccgataccattggctatcctgtcatgatccgcagtgcctacgccttgggcggcctgggaagtggcatttgtccaaatcgcgaaaccctgatggacctgtccaccaaagctttcgctatgactaatcagattctggtggagaagagcgtgaccggctggaaggaaatcgaatacgaagtcgttagggacgcagatgataactgcgttacggtttgtaacatggaaaatgtagatgcgatgggtgtgcacacaggtgattctgtggtggtcgcccccgcacagactttgtctaacgcagagtttcagatgctgagaaggaccagtataaacgttgtccgccacctgggaatagttggagagtgtaacatccagtttgctcttcaccctacttcaatggaatactgtatcatcgaggtgaatgcaaggctttcccgcagcagtgcactcgcttccaaggcaactggttatccccttgctttcatcgctgctaaaattgcgctcggcattcctctgcccgaaatcaagaacgtggtatccggtaagaccagcgcttgcttcgagccttcactggactacatggtcacaaaaataccccgctgggatttggatcgcttccatggcacttccagcagaatcggaagcagtatgaaaagcgttggtgaagtgatggcgataggaaggacctttgaggagagctttcaaaaagccctgcgcatgtgccacccatctattgaaggtttcacgccaaggctgcccatgaataaagaatggccgtctaatctcgatttgaggaaggagctgtcagagcctagttccaccagaatctacgccatcgctaaggccattgacgataacatgagtctggacgagatagaaaagctgacatacatcgacaagtggttcctttataaaatgcgcgacattctcaatatggagaaaaccctcaagggtctgaattcagaaagcatgacagaggagacactgaaaagggccaaggagattggctttagcgataagcaaatttccaaatgcttgggattgacggaagcccagacccgcgaattgcgcctcaagaagaacattcacccgtgggtaaaacagatcgacactctcgcggctgagtacccgagcgtgacaaattatctgtacgtgacctataatggtcaggagcatgacgtcaactttgacgatcatggtatgatggtcttgggatgtggtccttatcatatcggaagctcagtcgagttcgattggtgcgccgttagctccatcagaacgctccgccaactgggtaagaagactgttgtggtcaactgcaacccagaaacagtgtccacggacttcgacgaatgcgacaagttgtatttcgaggagctgtccctcgaacgcatcctggatatctaccaccaagaggcgtgtggcggctgcatcatttcagtgggcggtcagatcccgaataatctcgcggtccctctgtacaaaaatggcgttaaaataatgggtactagtccccttcagatcgatcgcgcggaagacaggtcaatcttctccgccgttttggatgagctgaaggttgcacaagctccgtggaaggcagtcaacaccctgaacgaggcgctggagttcgcaaagtctgtcgactatccgtgcttgctccgcccctcttacgtattgtcaggttcagctatgaacgtggtctttagcgaggatgagatgaagaaattcctggaggaggcaacaagagtctcccaggaacatccggtagtcctcactaagtttgtggaaggagctcgcgaggtggagatggacgcagtgggcaaggacggaagggttatctcccatgcaatctctgagcacgttgaggatgcgggagtccattctggcgacgcgacactgatgttgccgacccagacgatctcccaaggtgcgatcgaaaaggttaaggacgccactaggaaaatcgccaaagcttttgcaatatccggacccttcaacgttcagtttctggtaaagggtaatgacgtactggttatcgaatgtaatctccgcgcttctagatccttccctttcgtctccaaaactctgggagtcgatttcatcgacgtagccactaaggttatgatcggtgagaacgtggacgagaaacatctgcctactctcgaccatccaattatacccgctgattacgtggctatcaaggccccaatgttctcctggcctagactcagagatgctgacccgatactgaggtgtgaaatggctagtacgggtgaggttgcttgcttcggagagggcatccacacggcttttctcaaggccatgctctctactggctttaaaattccccagaagggcatcctgatcggaatccagcaatctttcaggccaagatttttgggtgtagccgaacagctgcacaatgagggtttcaagctcttcgcaactgaagctactagcgactggcttaatgctaataacgtccccgccactcccgtcgcctggccttctcaggagggacagaatccctcactttcctcaatccgcaagttgatccgcgacggctccatcgatctggtgatcaacctccctaacaataacacaaagttcgtgcatgacaattatgtgatccgcaggactgcagtggacagcggcatccctctcctgactaactttcaggtcacaaagctcttcgccgaggctgtccagaaaagccgcaaagttgactctaaaagtcttttccactatcgccaatacagcgccggtaaagcagcc

SEQ ID NO: 43521 - DNA, 4500 bp, Artificial Sequence
  derived and/or modified sequence
atgactaggattctgactgcattcaaagtcgtgcggaccctcaagacaggtttcggcttcaccaacgtcactgcccaccagaagtggaaattttctcgtcccggaattcgcctgctttcggttaaggcacagaccgcccacattgttttggaagatgggacaaagatgaaggggtacagctttgggcacccctcgagtgttgctggggaggtggtgtttaatactggcttggggggctatccagaggccattacggatccggcatataaaggtcagatcctgaccatggccaatcccataattgggaacgggggggcccctgatactacggccttagacgaactgggcttgtctaagtatctggaatctaacggtatcaaggtttccggactgctggtgcttgactactccaaggattacaaccactggctggctaccaagtctctcggacaatggctgcaggaagagaaggtcccagctatctacggtgtcgacacccggatgttaactaagataattagggacaaggggacaatgttaggcaagatcgagttcgagggacagcctgtcgattttgtcgacccgaacaagcagaatctgattgcagaagtatccactaaagatgtgaaggtttacgggaaggggaatcccactaaggtggtcgcagtagactgtggtattaaaaataatgtgattcggctgctggtcaaacggggggcagaggtgcaccttgtgccttggaaccacgattttactaagatggaatacgacggcatcctgatcgccggcggacctggtaatcctgccctcgccgagcctctgatccagaatgtccgtaagatcctcgaatcagaccgcaaagagcccctgttcgggattagtacgggaaacctcattaccgggttagccgcaggtgccaagacatacaaaatgtctatggccaacagagggcagaaccagcccgtgctgaacatcacaaacaaacaggcctttattacggcacagaaccacggttatgccctggacaacacactgcccgccggttggaagcccttgtttgtgaatgtcaacgaccagactaacgaggggattatgcacgaatcaaaaccattcttcgcagtccagtttcacccagaagttacccccgggcccatcgataccgagtatctattcgatagtttctttagtctgattaagaaaggcaaggcaactaccatcacctcagtattacccaagcccgcacttgtggcctcacgggtcgaggtgtcaaaagtgttaatcctcggttctggtggactgtcgatcggccaagccggcgagttcgattatagtggatcgcaggctgtcaaggctatgaaggaagagaatgtgaagaccgtgctgatgaacccgaatatagccagcgtgcagaccaatgaggtaggtttaaagcaagccgataccgtgtactttctgcccatcacaccacaattcgtcacagaggttatcaaggccgagcagcccgatggtttaatcctgggcatgggaggacagaccgcactgaactgcggggtggagcttttcaagcgaggcgtactgaaagagtatggcgtgaaggttcttggcacctctgttgagagtataatggccactgaggatcgccagctgttttctgacaagctgaacgaaatcaatgaaaagattgcaccaagctttgcggtcgaatccatcgaagacgctttaaaggctgccgacactataggctacccggtgatgatcagatccgcctacgctctaggggggctcgggtcggggatatgtcctaacagagagacactgatggacctctcaacgaaagcgttcgccatgaccaatcagatcctggtagagaagtcggtcacagggtggaaagagattgaatatgaggttgtgagagatgctgatgacaactgcgtcaccgtctgcaacatggagaatgtggacgccatgggagtgcataccggtgactccgtggtggtcgctcctgcacagactttaagtaacgccgagtttcaaatgttacggcggactagcatcaatgtggtgcgccacctgggtattgtcggggagtgtaacattcagtttgcattgcaccctacatctatggagtattgcattatcgaagtaaacgccagactctcccgatcatcagccttagcttcaaaggcgacaggttaccccctggccttcatagcagcaaaaatcgccctgggcatacctctgcccgagatcaagaacgtcgtaagtgggaaaacaagcgcgtgttttgagccctcactggactacatggtcactaaaattccaagatgggacctggatcggttccacggtacaagtagcaggattggtagctccatgaagtccgttggggaggtcatggccatcgggaggacctttgaagaatccttccaaaaggcactgcgcatgtgccatcccagcatagagggctttacaccgcgtctgccaatgaacaaggagtggccaagcaacctcgatctgcgcaaagagctcagtgaaccttccagtacaagaatctacgccattgcaaaagcaattgatgataacatgtcacttgatgagatagagaagctgacttacattgacaagtggttcctgtacaagatgcgggatattttgaacatggagaagacactcaaggggttgaactctgagagcatgacagaagagaccctcaagcgcgccaaggagataggtttctctgacaagcaaatctccaaatgtcttggtttgactgaggcccagacacgcgagcttaggttaaagaagaacattcacccgtgggtcaagcaaatcgatacgttggccgccgaatatccatctgtgactaactatttgtatgtaacatacaacggccaggagcacgacgttaacttcgatgaccacggcatgatggttctcggctgcggtccctaccacattgggtcaagtgttgagttcgactggtgtgccgtgtcgagcatccgcacactccgccaactgggaaaaaaaacagtcgtggtgaactgcaatcccgaaacagtctctaccgacttcgatgagtgcgataaactgtacttcgaagaactctcattggaacgtattctggacatctatcaccaggaagcatgcgggggatgtataataagcgtaggagggcagatccctaacaatctcgcagtaccgctgtataagaatggggtcaagataatgggcacgtccccgctccagatagaccgtgccgaagacaggtcaattttctctgcggtgctggatgaacttaaagtagcacaggctccgtggaaggcagtcaatacactcaacgaggcactcgagttcgccaaatcagtcgattatccctgcctcctacgccccagctatgtacttagtgggtccgctatgaacgtggtgttttccgaagacgagatgaagaagttccttgaggaagcgacaagagtgtcccaagagcaccctgtggttctcaccaaattcgtggagggtgcgagggaggtggagatggatgcagtgggaaaggacggacgcgtgatctctcatgctatcagtgaacacgtcgaggacgccggggtccatagcggggacgctaccctgatgcttccaacacagacaatttcccaaggcgccattgaaaaagtaaaagacgccactaggaagatcgcaaaagcgtttgccatatcaggaccatttaatgtgcagttcttagtgaagggcaacgatgtgctggtgattgagtgcaatctgcgtgcctcccgcagttttcccttcgtctccaagacactaggagtcgactttattgatgtagctaccaaagtcatgatcggcgagaacgtggatgaaaagcatctgcctaccttagaccacccaattattcctgcagactatgttgccatcaaagcccctatgttttcgtggcccaggctgagagatgccgaccccattttgagatgcgaaatggcctccacgggcgaggtggcttgttttggagaaggtatccacacagcgtttctgaaagccatgcttagcacgggttttaagattccgcagaaaggcatcttaattggcatacagcaatcctttagacctagatttctgggcgtagctgagcagctgcataacgaggggtttaagttgtttgccacggaagccacgagcgactggctcaacgccaacaacgtgcccgccaccccagtagcgtggccttctcaagaaggacagaacccctctctttctagtatacggaagctcatcagggacggtagtatcgaccttgtgattaatctgccaaataacaatactaaattcgtccacgataactatgtgatccgcagaaccgccgttgactcgggtataccacttctcacaaacttccaggtgacaaagctttttgcggaggccgtacaaaagtcccggaaggtcgattctaagtcactgttccattaccgccagtatagtgcaggaaaagccgcc

SEQ ID NO: 43522 - DNA, 4500 bp, Artificial Sequence
  derived and/or modified sequence
atgactcgaatactgacagcctttaaagtggtaagaacactgaagactggattcggattcacaaacgtgacagcccaccagaaatggaaattttctagacccggaatcagattattaagtgtaaaagctcagacagctcatatagtgttggaagatgggacgaaaatgaaaggatactccttcgggcatccttcttccgttgcaggagaggtggttttcaatactggactaggagggtatccagaagctataacagatcctgcttataaagggcagatcctaacaatggctaaccccattataggaaatgggggagcccccgatactacagccttggatgaactaggactaagtaaatatctggaatctaacgggattaaagtatctggactccttgtgctagactactctaaagattataaccattggttggctacaaaaagtctgggacagtggctccaggaagaaaaggtgcccgccatttacggggttgatacacgaatgctaactaaaatcattagggataaagggacgatgctaggaaaaatcgaatttgagggacagcccgtggactttgtagatccaaataagcagaatctgatcgctgaagtttctacaaaggatgtaaaagtgtatggaaaagggaaccccacaaaagtggtggccgttgattgcgggattaaaaataacgtcatccggctcctagtaaagcggggagctgaggttcacctcgtaccctggaaccatgattttactaaaatggaatatgatgggatcctcatagccgggggaccaggaaatcctgcccttgccgagcctctgatccagaatgtgcggaaaatcctggagtccgatcgaaaagaacccctctttggaatctccacagggaatctaatcactggactcgccgcaggagctaagacttataaaatgtcaatggctaacagaggacagaaccagcccgtactgaatatcacaaacaaacaggcctttataactgcccagaaccatgggtatgccctcgataacacactccctgccggatggaaacctcttttcgttaatgttaacgatcaaactaatgaaggaataatgcatgagtctaaaccattttttgccgttcagtttcacccagaagtcacaccagggcctattgatactgaatatctttttgactcattcttcagtttaataaaaaaagggaaggctactactataacaagtgtcttacccaaacctgccctcgtggccagtcgggtagaagtctccaaggtgctaatactgggaagtggaggattgtccatagggcaggcaggagaatttgattatagtgggtcacaggccgtgaaggctatgaaagaggagaacgtaaaaactgttctaatgaatcccaatatagcgtctgtgcagacaaacgaagtaggactgaaacaggcagatacggtgtatttcctccctatcacaccccagtttgttacagaggtgatcaaagctgaacagccagacggactgattcttggaatggggggacagactgcattaaactgtggggtagaattattcaaacgcggggtgctcaaagagtatggggttaaagttctaggaacatccgtcgagtctataatggctacagaagataggcagctcttctctgataaactgaacgaaataaatgaaaaaatagcccccagttttgctgttgaatctattgaagatgcactgaaagctgccgacacaataggatatcctgtgatgatcaggtctgcatatgccctggggggactagggtccggaatttgccctaacagagaaactctgatggatctctcaacaaaggcgtttgctatgacaaaccagatcctcgttgaaaagtctgttacagggtggaaggaaatagaatatgaagtagtacgtgacgctgatgacaattgtgtgactgtgtgcaacatggaaaatgtggatgccatgggagttcatacaggggattctgtggtagtggcgcccgctcagacactctctaacgctgaatttcaaatgctaaggagaacttctatcaacgtagtcagacatcttgggatagtgggggagtgcaatatacagtttgctctacaccccacatccatggagtattgtataatcgaagtaaacgctagactgtcgagatcttctgcattggcttctaaagcaacaggatatcctctggcctttattgcggccaaaatcgcactgggaataccactaccagaaataaagaatgtggtttctgggaaaacttccgcatgcttcgaaccttccctggattatatggtaacaaagatacctagatgggacctcgacaggttccacggaacgtcttctaggatcggaagttccatgaaatccgtaggagaagtgatggctatagggcgcacttttgaggagtcttttcagaaggctctgcggatgtgccatccttccatcgaggggtttacacccagattacccatgaacaaagagtggccctccaacctggatttgcggaaagaactgtctgaaccttcctctacacggatttatgctatcgctaaagcaatagatgataatatgtctcttgatgaaatcgaaaaactgacatatatcgataaatggttcttatataaaatgcgagatatcctcaatatggagaaaacactaaaagggttgaattctgagtcaatgacagaggaaacactcaaacgggctaaagaaattggattttcagataaacagatatctaagtgccttggacttactgaagcacagacaagagaactgcgccttaaaaaaaatatccacccttgggtgaaacaaatcgacactctcgcagccgagtatccctctgtgacaaactatctgtatgtcacatacaacggacaggaacatgatgtgaacttcgatgatcatggaatgatggtgctggggtgtggaccatatcacataggatcctcagtggaattcgattggtgtgcagttagtagtattcggacactgagacagctcggaaagaaaactgttgtcgtgaattgcaacccagaaactgtttcgacagatttcgatgaatgcgataaattatatttcgaagagctttctctggagcggatcctcgatatctaccatcaggaggcatgtggggggtgtataatctcagtgggggggcagatccccaataatttggcggtgcctctatacaaaaatggggtgaaaataatggggacatcgccattgcagatcgatcgggcagaggatcggagtatcttttcggctgttctggatgaactgaaagttgcacaggcgccatggaaagccgtcaatacacttaatgaggccctggaattcgctaaatccgtggattacccctgcttgctcaggccgtcatatgtcctttcaggatcagctatgaacgtagtcttttcagaagatgaaatgaaaaaattcctagaggaagccacacgggtttctcaggaacaccccgtggtcctgacaaaattcgtggaaggggctcgtgaggtcgaaatggatgctgttgggaaagatgggagggtgatctcacacgctatatctgagcatgtggaagatgcaggagtacatagtggagatgccacactcatgctcccaacacagacaatatctcagggggctatcgaaaaagtcaaggatgccacaaggaagatagccaaagcttttgcaatctctggaccattcaatgtgcagtttctagtcaaaggaaacgatgtgctagtgatagaatgtaatctacgcgcttccagaagtttccctttcgtaagtaagacactcggggtggattttatcgacgtcgctactaaagttatgataggagaaaatgtggacgaaaaacaccttcctactttggatcacccaataatccctgctgattatgtggctataaaagctccaatgttctcttggccccgattacgggatgctgatccgatacttaggtgtgaaatggccagtactggggaagtcgcctgtttcggagagggaatacacacggcctttctgaaagccatgctaagtactgggtttaaaattcctcagaaaggaattcttatcgggattcaacagtctttcaggcccagattcctcggagtggctgaacagctccacaatgaaggatttaaactgttcgcaacagaagcaacaagtgattggttaaatgccaacaatgtacctgcaactcccgtagcttggccttcacaggaagggcagaacccctcacttagttccatccggaaacttatcagggatgggagtatagatttagttatcaatctacctaataacaacacaaaattcgtgcatgacaattatgtaatacgcagaactgccgtggattctgggatccccctgctgacaaatttccaggtaacaaaacttttcgctgaagccgtgcaaaaatctaggaaggtggatagtaaatcactttttcactatagacagtattctgcaggaaaagctgcg

SEQ ID NO: 43523 - DNA, 4500 bp, Artificial Sequence
  derived and/or modified sequence
atgacgcggatcctcaccgcttttaaggtcgtgcgaactctcaagacgggattcggtttcaccaacgtgaccgcgcaccaaaagtggaagttttcgcgccccggaatccggctgctttcggtgaaggcccaaaccgcccatatagtgctggaggacgggaccaagatgaagggctactcgttcggacacccgtcctcggtcgcaggggaggtcgtctttaacaccggcctggggggatacccagaagcgatcactgacccggcctacaagggacagatcctgaccatggctaaccctatcatcggaaatggaggtgccccggatacgacggcccttgatgaattgggactgagcaagtatttggaatcaaacggcatcaaggtgagcggacttcttgtgctcgattactccaaagactacaatcattggctcgctaccaagtcgctgggccagtggcttcaagaagagaaagtgccggccatctacggcgtggatactcggatgctgaccaagatcatccgcgacaagggcacgatgctggggaagatcgaattcgaggggcaaccagtggactttgtggacccgaacaagcagaatctgatcgccgaggtgtcgaccaaggatgtgaaggtctacggaaagggaaaccctaccaaggtcgtggcagtggactgcggcataaagaacaacgtcattaggctcctggtgaaacgcggtgccgaagtgcacctggtcccgtggaaccacgacttcactaagatggaatacgacgggattctcattgccggcggacctggaaaccctgccttggcagagcccctgattcaaaacgtgcggaaaatcctcgaaagcgatcggaaggaacccctcttcggaatctcgacgggaaacctgattaccgggctggcagcgggagcgaaaacttataagatgtcgatggcgaacaggggacagaaccagcccgtgctgaacatcaccaataagcaagcgttcatcaccgcccaaaaccacggatacgcccttgacaatactctccccgcaggttggaagcctctgtttgttaacgtgaacgaccagactaatgagggcattatgcacgaatctaaaccgttcttcgcagtgcaatttcatccagaggtgacgccgggtcccatcgacaccgaatacctcttcgattcattcttcagtctcatcaaaaaaggtaaggccacgaccatcacttccgtgctgccgaaacctgcactcgtggcatcgcgcgtcgaggtgtcgaaggtcctgatcctcggctcggggggcctctcgatcgggcaggccggtgaattcgactactccggaagccaggctgtcaaggctatgaaggaagagaatgtgaaaactgtcctcatgaacccgaacatcgcgtccgtgcagactaacgaagtggggctcaaacaggcggataccgtttacttccttcctatcacccctcagttcgtgactgaagtcatcaaagccgagcagccggacggactgatcttggggatgggtggtcagaccgccctgaactgcggagtggagctgttcaagagaggtgttctgaaggaatacggggtgaaggtgctgggtacctcggtggagtccattatggctaccgaggaccgccagctgttctcagacaaacttaacgaaatcaacgaaaagattgccccgtccttcgctgtggagtccatcgaggatgcactcaaggctgcggacacgatcggataccccgtgatgatccgaagcgcgtacgcactgggtgggctcggatccggcatctgcccgaaccgggaaactctgatggatctgagcaccaaggccttcgctatgactaaccagatcctcgttgaaaagtcggtgactggatggaaggagattgaatacgaggtggtgcgcgacgctgacgacaattgcgttaccgtctgcaacatggagaatgtggatgcgatgggggtgcatactggtgatagcgtcgtggtggccccggcacaaacgctgtcgaatgccgaatttcagatgcttagacgcacttcgatcaacgtggtgcggcacctggggatcgtgggtgaatgtaacatacagtttgcgctgcatccaacctccatggaatattgcattatcgaagtcaatgcgcgccttagccgtagctccgcgctggcatcaaaagccaccggatacccccttgccttcatcgccgcgaaaatcgcgctcggaatcccgcttccggaaatcaagaatgtcgtgagcggaaaaacctcagcctgcttcgaaccgtccctggactacatggtgactaagatcccgcggtgggacctggatcgctttcacgggacgtcgtcacggatcggctcaagcatgaagtcagtgggagaagtgatggccatcggccggactttcgaagagagcttccagaaggcgctgcggatgtgccatccgagcatcgaaggattcaccccgcgccttccaatgaataaggagtggccatcaaacctggacctccgtaaggagctgtcggagccgtcatcgaccaggatctacgcgatcgctaaggccatcgatgataacatgtcgttggatgaaatagaaaagctgacttacattgacaagtggttcctgtacaagatgcgggatatcctcaatatggaaaagacgctgaagggccttaactcggaatcgatgaccgaggaaactctcaagcgcgcaaaggagatcggtttctccgacaaacaaattagcaagtgcctgggattgacggaggcacagacccgggagctgcgcctgaagaaaaacatccatccttgggtcaagcaaatcgacactcttgcagccgaatacccgagcgtgaccaattacttgtacgtgacttacaatggccaagagcacgacgtgaatttcgatgatcatggaatgatggtcctgggatgcggtccgtaccatatcggctcatcagtggaattcgactggtgtgccgtctcgtcgatccgcactctgcgccagcttggaaagaaaactgtggtggtgaactgcaaccccgagactgtgtcaaccgacttcgatgaatgtgataaactgtacttcgaagaactctcgctggagagaattctggacatttatcaccaggaggcctgtggcgggtgtatcatttcggtcggaggacagatcccaaacaaccttgccgtcccgctctacaagaacggagtgaagatcatgggcacctccccgctgcaaatcgatagagcagaggaccgttcaatcttttccgccgtcctcgatgaacttaaggtggctcaggccccttggaaagctgtcaataccctcaacgaagccctcgagtttgcaaagtccgtcgattacccgtgtctcctgcgtccatcatacgtgctgtccggatcggccatgaacgtcgtgttctcagaagatgagatgaaaaagttcttggaggaagccactagagtttctcaggaacaccccgtcgtcctgaccaaattcgtggaaggagctcgggaggtggaaatggacgcggtgggaaaagacggaagagtcattagccatgcgatctcggaacatgtcgaggacgccggagtgcacagcggtgatgcaaccctgatgctccccacccagaccatcagccagggcgccatcgaaaaggtgaaagacgccacccgcaagatcgccaaagcgttcgcgatcagcggcccgttcaatgtccagttcctggtgaaggggaacgacgtgttggtaattgagtgcaatctgcgggcatcgaggtcgtttcctttcgtttcgaaaaccctgggagtggacttcatcgacgtggctaccaaggtcatgatcggagaaaacgtggatgagaaacatctcccgactctggaccatccaatcattcctgccgattacgtggcgattaaggcacccatgttctcctggccacgccttcgtgacgcagacccgatcctcagatgcgagatggcgtccacgggcgaggtggcatgcttcggagaggggatccacactgccttcttgaaagccatgctttcaaccggcttcaagataccacaaaaggggatcctgatcggaatccaacagtccttcaggccacggttcctcggagtcgctgagcaactgcacaacgaaggcttcaagctgttcgccaccgaagcgacctccgactggctcaacgctaacaatgtcccggcgactccggtggcctggccttcccaagaaggacagaatccatccctgtcgtccatcagaaagctcatcagggatggctcgattgacctggtgatcaacttgccgaacaacaacaccaagttcgtgcacgacaactatgtgattcggcggaccgctgtggactctggcatcccacttctgacgaacttccaagtgaccaaactgttcgcagaggccgtccaaaagagccgcaaagtggactcgaagtctttgtttcactaccggcagtatagcgcgggaaaggctgct

SEQ ID NO: 43524 - DNA, 4500 bp, Artificial Sequence
  derived and/or modified sequence
atgacgaggatcctcaccgcctttaaggtcgtgcggaccctcaagactggattcgggtttactaatgtgactgcccatcaaaaatggaagtttagccgcccagggatccgactgctgtccgtgaaggcccagactgcgcacatcgtgcttgaagatggtacgaagatgaagggctactcgttcgggcacccctcctcagtcgccggagaagtggtgttcaacactggactggggggctacccagaggcaatcaccgatcctgcctacaagggacagatcctgacgatggcgaacccaatcattgggaacggaggagctccggataccacggctcttgacgaactcggcctcagcaagtacctcgagtccaacgggatcaaagtctcaggacttctcgtgctggattactcaaaagactacaatcattggctggcaaccaagtcgcttggtcaatggctgcaggaagaaaaggtgcccgccatctacggagtcgacactagaatgttgaccaaaatcatcagggacaaaggcaccatgcttggaaaaatcgagttcgagggccaaccggtggatttcgtcgaccctaataagcagaatctcatcgcggaggtcagtaccaaggatgtgaaggtgtacggaaaggggaatccaactaaggttgttgccgtggactgtggtatcaaaaacaacgtcatccggcttctggttaagcgcggcgccgaagtgcaccttgtcccgtggaatcacgacttcaccaagatggagtacgacggaatcctgatcgccggaggtccgggaaatccagccctggcggaacctcttattcaaaatgtcagaaaaatccttgaatccgacaggaaagaacctcttttcggaatctccactgggaacctgatcactggcctggcggcgggagccaaaacctacaagatgagcatggccaacaggggccagaaccagcctgtcttgaacattactaacaagcaagcatttatcactgcccaaaaccacggatacgcgctggataatactcttccggccggctggaagccgctgtttgtcaacgtcaacgaccagaccaacgaaggcatcatgcacgagtcgaaaccgttctttgccgttcaattccacccggaggtgacgcccggacccatcgacacggaatacctgtttgattcatttttctctctcatcaaaaagggcaaggcgacgaccatcacttccgtgctgcctaagcctgcccttgtcgcctcgcgcgtggaagtctcaaaagtcctgattctcggctccggaggcctgtcgatcggacaagccggtgagttcgactactcagggtcccaggcggtgaaggccatgaaggaggaaaacgtaaagaccgtcctgatgaatcccaatatcgcgtccgtgcagaccaacgaggtgggcctgaagcaagccgacacggtgtactttctgccgatcaccccgcagttcgtgaccgaagtgatcaaggcagaacaaccggacggactcatcttgggaatgggaggacagaccgcactgaactgcggagtcgagcttttcaagcgaggggtgctcaaggaatacggagtgaaggtgctcggaacgagcgtggaatcgattatggcgaccgaggatagacagctcttcagcgataagttgaacgagatcaacgagaagatcgccccgtcgttcgcggtagaatcaatcgaagatgccctgaaggccgccgacaccattggttaccctgtgatgatccgctcggcctacgcgctcggcggactgggaagcggtatctgccctaaccgcgagactctgatggatctgtcaacgaaggcgttcgcgatgactaaccagatactcgtggagaaatccgtgaccggttggaaggaaatcgagtacgaggtcgtccgcgatgcagatgacaattgcgttaccgtgtgcaacatggagaacgtggacgcaatgggggtccacactggagactcggtcgtcgtggcgcccgcccagactctctcgaacgcggaattccaaatgctcaggagaaccagcatcaatgtggtgcggcacctgggaattgtgggcgaatgcaatatacagttcgccttgcacccgacttccatggaatactgcatcatcgaggtgaacgcccggctgtccaggtcgagcgctctggcttcaaaggctaccggctatccgctggcgttcattgccgccaagattgctctcggaatccctctgccggagattaagaacgtcgtgtcaggaaaaacctcggcctgcttcgagccgagcctggattacatggtgaccaaaattcctcggtgggacttggatcggttccacggaaccagcagccgcatcggcagctcgatgaagagcgtgggggaagtgatggcgatcgggcgcacttttgaagaatccttccagaaggctctcaggatgtgccatccatccatcgagggattcaccccgagactcccaatgaataaggaatggccgtcgaacctggatctgcggaaggaactgagcgaacccagctccacccgcatttacgccatcgccaaggccatcgacgataacatgtcgctggacgagatcgagaaacttacctacatcgataaatggtttctgtacaagatgcgcgacatcttgaatatggaaaagactctcaagggcttgaacagcgagtcaatgactgaagagactctcaaaagggcaaaagaaatcggattttccgataagcagatctcgaagtgcctcggactgactgaagctcaaacccgggaactgcgactgaaaaagaacatccatccatgggtcaaacagattgacacccttgcagcggagtacccgtcagtgactaactatctgtacgttacctacaacggccaggaacacgacgtgaacttcgacgaccacggaatgatggtgcttggctgcggcccgtatcacatcgggagctccgtcgaatttgactggtgcgccgtttcgagcatccgcaccctgcggcaactcggtaagaaaactgtggtggtgaactgcaacccagaaaccgtttcgaccgatttcgacgagtgcgacaagttgtacttcgaagaactgtcactcgaacggatcctggatatctaccaccaggaagcatgcggtggatgcatcatctccgtcgggggacagatcccgaacaatctggcagtgcctctgtacaagaacggagtcaagatcatgggaacctcaccgttgcaaatcgatcgggccgaggaccgctcgattttctcggctgttctggatgaacttaaggtggctcaggccccatggaaggctgtgaataccctcaatgaagcgctggaatttgccaagtccgttgactacccgtgtctgctgcgcccctcgtacgttctcagcggatccgcaatgaatgtagtgttctcggaggatgagatgaagaagtttctggaagaggccacccgagtgtcccaggagcatccagtggtgttgaccaaattcgtggaaggagcccgagaagttgagatggacgccgtcggaaaggacggaagagtgatcagccacgcgatctcggagcacgtggaagatgctggagtgcacagcggagatgccacgctgatgcttccaactcaaaccatcagccaaggagcaatcgagaaggtcaaggacgcaacccggaagatcgcgaaggcgtttgctatctcgggccctttcaatgtgcagttcctcgtcaaaggtaatgacgtgctggtcatcgagtgtaatttgcgggcttccagatcgttcccattcgtgtcgaaaacgctgggagtggactttattgacgtggcgaccaaggtgatgatcggagagaatgtggatgaaaaacatctgccgactctggaccacccgatcattcccgccgactacgtggcgattaaggcgccaatgttttcgtggccgagattgcgcgacgccgatccaatcctgagatgtgaaatggcctccactggggaagttgcatgcttcggagaaggaatccacaccgcctttctgaaagccatgttgtccactggcttcaagatcccccagaagggaatcctcatcggcatccaacagtcatttaggccccgcttcctcggcgttgcagaacagcttcacaacgaaggattcaagctgtttgctactgaggccacctctgactggcttaatgccaacaatgtgccggcaaccccggtggcgtggccatcgcaggaggggcagaacccgtccctgtcctcaatccggaagctcatccgggatggaagcatcgatctcgtcatcaatctcccgaacaacaacaccaagtttgtccatgacaactacgtgatccggcggaccgccgtcgactcgggaatcccccttctcaccaacttccaagtgaccaaacttttcgccgaagcagtgcaaaagtcacgcaaggtggactcgaagtcgctgttccactaccgccagtattccgcgggcaaggccgcc

SEQ ID NO: 43525 - DNA, 4500 bp, Artificial Sequence
  derived and/or modified sequence
atgacgagaattctgaccgcttttaaggtggtccggacccttaagacgggcttcggattcactaatgtgacagctcatcaaaagtggaagttttctcgcccaggcattcgcctgctgagtgtgaaggcacaaaccgcccacatagtcttggaagatggcaccaagatgaaaggatatagcttcggacatcccagtagcgtggcaggcgaggtggttttcaacaccggactgggcggttacccagaggccataactgatccggcttacaagggccagattctcactatggcgaaccctataattggaaatggtggcgcccccgataccactgccctggatgagctcggcctgagcaagtatctggagagcaacggcatcaaggtttccggtcttttggtactggattactcaaaggactataatcactggctcgccaccaaaagtctgggccagtggctgcaggaagagaaggtacccgccatttacggagtggatacgcgaatgctgacgaagataatccgcgataaaggcaccatgctaggaaagatagaattcgagggacagccggtcgatttcgtggaccctaataaacaaaacctgatagcggaggtttcgaccaaagacgttaaagtctatggcaaaggcaacccaacgaaggtcgtggctgtagattgcggaataaagaacaacgtcattcgcctcctcgtgaaacggggagccgaggtccacctggtgccgtggaaccatgatttcaccaagatggaatacgacggcatacttatcgccggcggccccggcaaccccgccctggccgaaccgcttatacaaaacgttcggaagatactggaatctgaccggaaggagccgctgtttggcatatccacaggcaaccttataacaggtcttgccgctggcgccaagacgtataagatgtcaatggccaatcgcggccaaaatcagccggttttgaatattactaacaagcaggcctttattactgcccaaaatcacgggtatgcactggacaacaccctgccggctggctggaagccattatttgttaacgtgaatgatcagaccaacgagggaattatgcacgagtcgaagccgtttttcgccgtgcaatttcacccggaagtcaccccgggcccgatagatacggagtacctatttgacagtttcttttctttgataaagaagggtaaggccacaaccattacctccgtcctcccaaaaccggctttggtggccagccgagtcgaggtcagcaaagtcctcatcctgggcagcggcggcctgtccataggacaggccggcgagtttgactacagcggatcccaggcggtgaaggctatgaaggaggagaatgtgaaaaccgtattgatgaatcccaatattgcgagtgtacagaccaacgaggttggcctaaaacaggcggacacggtgtacttcctgccgatcacaccgcaattcgtcaccgaggtgatcaaagccgagcagcccgacggattgatcctgggcatgggcggacagacggccctcaattgtggcgtggagctgttcaagcgtggagtgctgaaagagtacggagtcaaggtgctaggcacgagtgtggagtccattatggccactgaggacagacagctgttctcggacaagctgaatgagatcaacgagaaaatcgctccgagcttcgccgtagagtccatagaggacgccttgaaggctgccgatactattggctatccggttatgattagaagtgcatatgcccttgggggactgggcagcggaatttgcccgaaccgcgagacactcatggacctttcaacgaaggcattcgccatgacgaaccagatcttggtcgaaaagtcggtgacaggctggaaggagatagagtatgaggtggtgagggatgccgatgataactgcgtgactgtctgcaatatggaaaatgtcgatgccatgggagtccacaccggggactcagtcgtcgtggcccctgcccaaaccttgagcaacgctgagttccagatgcttaggcgtacgtccataaacgtggtgcgccatctgggcatcgtaggcgagtgtaatatacagttcgcactgcaccctaccagtatggaatactgtatcatcgaggtaaacgcacgactgtcgcgctcctcagcgctggcctcaaaggctacaggctacccgttggctttcatcgcggccaagattgccttgggcatacctctccccgaaattaagaatgtagtgagcggtaaaacgtcggcctgcttcgaacccagcttggattacatggtcacgaagatacccagatgggatctcgatcgcttccacgggacaagctcgcgaataggttcatcgatgaagagtgttggggaagtgatggcgattggccgcacctttgaggagagcttccagaaggcgctgcgtatgtgccacccgagtatcgagggcttcacaccccgcctgcccatgaataaggaatggccgtctaatttggatctgcgtaaagaactgtctgagccgtccagcacgcggatttacgctattgctaaggcaattgatgataacatgtcccttgatgaaattgagaaactgacatacatcgataagtggttcctttataagatgagagatattctgaatatggagaagacgttgaagggacttaattccgagtcaatgactgaggagacgcttaaacgcgccaaggaaattggctttagcgataaacagatcagcaagtgcctgggcctgactgaagcccagacaagagaactgaggctgaagaagaacattcatccgtgggtgaagcaaattgacacactggccgccgagtacccatccgtgacgaactacctctacgtgacgtataatggacaagaacatgatgttaacttcgatgaccatggcatgatggtgctgggttgtggcccgtaccatattggtagctcggtggaatttgattggtgtgccgtgtcgtcgatccgcacgctacgccagcttggcaaaaagacggttgttgtcaactgtaatccagagactgtatcgaccgactttgacgaatgcgacaagctgtacttcgaggaattgtcccttgagcgcatcctcgatatttaccaccaggaggcatgcggtggatgcatcatatcggttggaggtcagatccccaacaatctggcagtgccgttgtacaagaatggcgttaagataatgggaacctcgcctctgcagatcgatcgagccgaggatcgatccattttttccgccgttctggacgaattgaaagtcgcgcaggccccatggaaggcggttaatacccttaatgaggccctggagtttgcgaagtcggtcgactacccttgtctgctgcgcccctcatatgtcctgtcgggttcagctatgaacgttgtcttctccgaggacgaaatgaaaaaattcctggaggaagccacccgggtctcccaagagcacccagtcgtcctcactaagttcgtcgaaggtgctcgagaggtggagatggatgctgttggtaaggacggccgagtaatcagtcatgctatcagcgagcatgtcgaggacgccggagtccatagcggagacgccaccctgatgctgccgacacagaccatcagtcaaggagccatcgagaaggtgaaggacgccacccgtaagattgcaaaggccttcgcgatatcaggaccatttaacgtgcagttcctggtgaaaggcaatgatgtgttggtcatcgaatgtaatctacgcgccagccggagctttccgttcgtctctaaaacactgggcgtagatttcattgatgttgctacaaaggtgatgattggcgagaatgtcgatgagaagcacttgcctacgctggaccacccgataattccggccgactacgttgccattaaagccccgatgttctcttggccccgcctacgcgatgccgatccaatactgcgatgcgagatggcgagcacaggagaagtggcctgctttggcgagggcatccacacggcgttcctgaaggctatgctgtccaccggctttaagataccgcaaaagggcattctgatcggaattcaacagtccttccgccctcggttcttgggggtggcggagcagcttcacaacgagggattcaaactgttcgcaacggaggccacgtcggattggctgaatgccaataacgtcccggcaactcctgtggcttggccgtcccaagaaggtcagaacccatccttgtcgagcattcgaaaactgattagagacggatccatagatttggtgattaacctgccgaacaataacaccaaattcgtccatgataattacgtcatccgccgcacggcagtcgactccggtatcccgctgctgactaatttccaagtgactaagctcttcgctgaggctgtccaaaagtcgaggaaggtagattcgaagtcactattccactatcgacaatactccgcgggtaaggcggcc

SEQ ID NO: 43526 - DNA, 4500 bp, Artificial Sequence
  derived and/or modified sequence
atgacccgaatccttactgcattcaaagtggtgcgcactctgaaaactgggttcggcttcaccaatgtgacagcccatcagaaatggaaatttagtcgtcctggaatccgtctgctttccgtcaaagcgcagaccgcccatatcgtgcttgaggatggaacaaaaatgaagggatactcatttgggcatccctcctccgtcgcaggcgaagtggtctttaatacagggttaggcggatacccggaagctattacagatcccgcctataaagggcagatccttactatggccaacccgataattggtaatgggggtgccccagacactaccgccctggatgagcttgggcttagcaaatatctagagagtaatggaatcaaggtgtccgggttactggtgctggactactcaaaagactataaccattggctagccactaaaagcctcgggcaatggttacaggaggagaaagttcccgccatatacggagtcgatacaaggatgctgacaaagattataagggacaaaggaacaatgctggggaaaatagaattcgagggccaaccagtggatttcgtggaccccaacaaacagaacctgatcgctgaggtttccactaaagacgttaaggtctacggaaaaggcaacccaacgaaggtggtcgcggtcgattgcggcatcaaaaacaacgtaatcagactcctagtgaagcggggcgccgaggttcaccttgtaccttggaatcacgacttcacgaaaatggaatacgatggaatcttgattgcaggcgggcccggaaatcctgcgctggccgagccactcatacaaaacgtccgaaagattcttgaaagcgacaggaaggagcccttattcggaatatccacaggtaatctcatcactgggctcgccgcgggcgccaagacctacaagatgtctatggctaatcgaggccaaaaccagccagtgttgaacattacgaacaagcaggcattcattactgcacagaatcacggttacgctctcgataatactcttccggctggctggaagccactgttcgtaaacgtaaatgaccagactaatgagggcattatgcacgaatctaagccctttttcgcagtgcagttccatcccgaggtgacacccggccccatcgataccgagtatttatttgactcttttttctcactcatcaaaaaaggaaaggcaacgaccattactagcgtgttacctaagccagctctggtcgccagccgggtggaggtgagtaaggtgttgatattgggctctggcggactctctattggccaagccggtgagttcgactatagcggtagccaagctgtgaaggctatgaaagaggaaaacgttaaaaccgttctcatgaatcctaacatcgcctctgtccaaaccaacgaagtggggctcaaacaggctgataccgtttacttcctgccaattactcctcagttcgtgacagaggtcattaaggcagagcagcctgatgggctgatcctgggaatgggtggccagactgcgctgaattgcggagtggagctgttcaagagaggtgttctgaaagaatatggggttaaggtgctggggacatcagtggagtctatcatggctacagaagaccggcagctcttcagtgataagctgaacgagattaatgaaaagattgctccttctttcgccgtggaatctatcgaagatgcgctcaaagctgctgataccattggctatcccgtcatgattcgatcagcgtatgccctgggaggcctgggctccgggatctgtccaaatagagaaaccctgatggatctaagcaccaaagcttttgccatgaccaaccagatactggtggagaagtctgtgaccggttggaaggaaatagagtacgaggtcgtgcgggacgccgatgacaattgcgtgaccgtctgcaacatggaaaatgttgatgccatgggcgtccacaccggcgactcagtcgtcgtagctcctgcccagaccctcagcaacgcagaatttcaaatgctgcgaagaacaagtatcaatgtggttagacacctgggaatcgttggcgaatgcaacatccagttcgccctgcacccgacctcaatggagtactgcatcatcgaagtgaatgcccgcctgagccggtcttctgcactggctagcaaggcgacgggctaccctttagcttttatagcagcgaaaattgccttgggcatccccctacctgagatcaagaatgttgtgagcggaaaaacaagtgcgtgtttcgagccatctctagactatatggtcacaaagatccctcggtgggaccttgacagattccacggtaccagttcaaggatcggaagttcaatgaagtctgtgggcgaagtgatggctattggacggaccttcgaagagtccttccagaaggctctgcggatgtgccatccgtcaattgaagggttcacccctcgactccctatgaataaagagtggccaagcaacctggatcttaggaaggaattgagcgagccctccagcactagaatttatgcgatcgccaaggctatcgatgacaatatgtcactggacgagatcgagaagctaacctatattgacaagtggttcctatataaaatgagggacatacttaatatggagaaaacactcaaaggtctgaattctgaatccatgaccgaagagactttgaagagagcaaaggagatcggctttagcgacaagcagatcagcaaatgcctggggttgaccgaagcccaaaccagagagttacggctgaagaaaaatatccacccctgggtgaaacagatcgacacgttagcggctgaatatccaagcgtgactaactacctgtacgtgacctataacggacaggagcacgatgtcaattttgacgatcacggtatgatggtgctgggctgcggcccctaccatatcggctcatcagtggaatttgattggtgcgccgtgtcgtctatccggactctgcgccagctagggaagaagaccgtggtggtgaattgtaacccagaaaccgtttcaacagacttcgacgagtgcgataaactttacttcgaagaactgagtctcgaacggatcctagacatctatcaccaggaagcctgcggcggatgtattatctcggtgggtggtcagattccaaataatctggctgtcccactctacaagaatggggttaaaatcatggggacttcccctctccaaatcgacagggctgaagaccggtcgatattcagcgcagtattagacgagttaaaggtggctcaggccccctggaaggccgtaaataccctgaatgaagcccttgaattcgccaagtctgtggactacccctgcctgcttcgtccctcctatgtactgagtggctccgcaatgaatgtggtgtttagtgaagacgaaatgaagaagtttcttgaagaggcaacgcgtgtgagtcaggagcaccccgtagtgctcaccaagttcgtggaaggcgccagggaagtcgaaatggacgcggttggcaaagacggaagagtgatctctcacgccatttcagaacacgtagaggacgccggagtgcattccggagacgccaccctcatgcttcctacacaaacaatatctcagggtgcaatcgaaaaggtgaaggacgcaacgagaaagatagccaaggctttcgctatcagcggtccttttaacgtgcagtttctggttaaagggaatgacgtgctggtgatcgagtgtaacttgagggcttctagatcctttcctttcgtcagtaaaacacttggcgtcgacttcatcgatgtggccaccaaggtcatgatcggagaaaatgtggatgaaaagcacctgcctactctggaccatccaattatacctgccgactatgttgcgattaaagcgcccatgttttcatggcctagacttcgggatgcagacccaatattgcgctgtgaaatggcctccacgggcgaagtcgcttgtttcggcgaagggatccatacggcctttctcaaagcaatgctttcgaccggcttcaaaatccctcaaaaggggatcttgatcggtattcagcaaagctttcgtccccggttcttaggcgtggcagaacaactccacaacgaaggcttcaagttgtttgccaccgaagcgaccagcgactggttgaacgcaaacaacgtaccggccacaccagtggcgtggccctcccaggagggccagaatcccagccttagcagcattagaaagctcatccgcgacggtagcattgacctggtgataaatttgcctaacaacaacactaagtttgtgcatgataactatgtaattagaaggaccgccgtagatagtggtatacccctgctgaccaacttccaggtcactaagttgtttgcggaagcggtgcagaagtctcgcaaagtggactctaagtctctctttcactaccgccagtattcggctgggaaagccgcg

SEQ ID NO: 43527 - DNA, 4500 bp, Artificial Sequence
  derived and/or modified sequence
atgaccagaatcctgaccgcattcaaggtggtccggaccctgaaaacaggctttggcttcacaaacgtcaccgctcatcagaaatggaaatttagcagaccagggatcagactcctcagcgtgaaagcccagactgcacacattgttctagaagatgggactaaaatgaaagggtatagctttgggcatccatctagtgtggctggtgaagtcgtatttaataccggcctgggcgggtacccagaggccattacagatcccgcatacaaggggcaaattctgaccatggctaaccccatcatcggaaacggtggagctccagataccacagcattagatgagcttggactttccaagtacctagagtccaatggtataaaagtgtccggtctgcttgtgctggattattcaaaggactataaccattggctagccacgaagtctctcggacagtggttgcaggaggagaaggtgcctgccatatatggagttgatacccgcatgttaacgaagattattagggataaaggcacgatgctgggaaagattgaatttgaggggcagccggtggactttgtcgatccaaataaacagaacctcattgccgaggtgtcgactaaagatgtgaaggtgtatggaaaggggaatcctacgaaggttgtggccgtagactgcggtatcaagaataacgtgatccggttgctagtgaagagaggagccgaggtccaccttgttccgtggaaccacgactttacaaaaatggagtatgatggtattctgatcgccggagggcctggtaacccagccctcgcagagcctctgatacagaacgtgaggaagatcctcgaatctgatcgcaaggagcctttatttggtatttcaaccggcaatctgattacaggcctggcggccggggccaagacctataaaatgagtatggcaaacagagggcaaaaccagcccgtgcttaatattacgaacaagcaggctttcatcactgcacagaaccacgggtatgctctcgataataccctccccgctggttggaaacctctgttcgttaacgtgaatgatcagactaacgaggggatcatgcacgaaagtaaaccattcttcgccgtccagttccatcctgaagttacaccggggccgatagataccgaatatctgtttgatagttttttttctctgatcaaaaagggcaaggcaaccaccattaccagtgtgctaccaaagcccgccctggtggcatcccgagtggaagttagcaaagtgctgattctgggctctggggggctctccatcgggcaagctggagaattcgattattcgggctcacaggccgtgaaggccatgaaagaagaaaacgttaagacggtcctgatgaatccgaacatagcatccgtgcaaactaacgaggtgggactaaagcaggcggatacagtgtatttcctgcctataacaccacaatttgttaccgaggttattaaggccgaacaaccggatgggctgatcttaggtatgggaggccagactgctctaaactgtggagtggaactgttcaagcggggggtcctgaaggagtatggggttaaggtattaggaacatccgtggaaagcattatggcaaccgaggataggcaactgttcagtgacaaactgaacgaaattaacgaaaaaatcgcaccctcatttgctgtggagtcaatcgaagacgcactgaaagccgccgatacaatcggttatcctgtgatgattcgcagcgcctatgcgttaggcgggctgggctccggcatctgccctaacagggaaaccctgatggatctttccactaaagccttcgcaatgacgaatcagatcttggtcgaaaaaagtgtaactggctggaaggagatcgaatatgaggtggtgagggacgctgacgacaattgcgtgaccgtgtgcaatatggagaacgtggacgctatgggagtacacacaggtgattcagttgtggtggctcccgcccagaccctttcaaacgcagagttccagatgctgaggaggacgagtatcaacgtcgtacgtcacttgggcattgtgggtgaatgcaacatccagtttgcattacatcctactagtatggagtactgcattatcgaggtgaacgctcgcctgagtcgctcttcagcactggcctccaaggctacaggatacccactggcattcatcgccgcaaaaatcgctttaggaattcccctgcccgagatcaagaatgtggtctccgggaaaacatccgcttgttttgagccttctctggactacatggtaaccaagatcccacggtgggacctcgacagattccacggtactagttctagaatcggcagttctatgaagtccgtcggcgaagtcatggcgatcggcaggacatttgaggagtcgttccagaaagccctgagaatgtgtcacccctcaatagaaggcttcacgcctaggctgccgatgaataaggagtggccttcaaatcttgatctgaggaaggaattgagcgagcccagttccactagaatatacgcaattgctaaggccatcgacgacaacatgagtcttgacgagatcgaaaaactcacctatattgacaaatggtttctttataaaatgcgggatatactcaacatggagaagacacttaagggcctcaacagtgagagcatgacagaggagaccttgaagagagcaaaagagattggtttttcggacaagcagatcagcaagtgcctcgggcttacggaggcacagactcgtgagctgagactaaagaagaacattcatccgtgggtgaaacagatcgatactctggctgccgaatatccttctgtgaccaattacctgtacgtgacatacaacggacaggaacatgatgtcaacttcgatgatcacggcatgatggtgctcgggtgtggcccttaccacatagggagttccgttgaattcgactggtgtgccgtgtccagtattaggacactgcggcagttggggaaaaaaacagtagtagttaattgtaaccccgagacagtgtccacagactttgatgaatgcgacaagctatactttgaggaattatcgttagagcgcattctggatatctaccaccaagaggcctgcggcgggtgcatcattagtgtcgggggacagatcccaaacaaccttgccgtgcccctttataaaaatggcgttaaaatcatggggacaagccctctccagatcgatagggcagaggatcggtccatttttagcgcagtgctggatgagctcaaggtggcacaggctccttggaaggccgtcaacacactgaatgaagcattggaattcgcaaaatccgttgactacccatgcctcctcaggccaagctacgtacttagcgggagtgcaatgaacgtggttttctcagaggacgaaatgaagaagtttctcgaagaggccaccagggtgagtcaggaacaccctgtagtgttgaccaagttcgtcgaaggagcaagagaggtcgagatggacgccgttgggaaggacggtagagtgattagccacgcaattagtgagcacgtggaagacgccggggtccactcaggcgatgcaacacttatgctgcctacacagacaatatcacagggggctatcgagaaagtgaaggacgctacaaggaaaatagccaaagccttcgccattagcggccctttcaatgtccagtttctcgtcaagggcaatgacgtacttgtgattgagtgtaatctgagagcgtccagaagttttccctttgtctcgaagacgctgggtgtcgactttattgatgtggcaactaaagtgatgattggggagaatgtggatgagaagcatctgcccacattggatcatcccattatcccggctgactacgtggccataaaagcacctatgtttagctggccccggctcagagacgctgacccgatacttagatgtgagatggcaagtactggagaggtggcgtgttttggcgaaggaatccacacagctttcctgaaggcgatgcttagcacgggcttcaagattccacagaaggggatcctcattggtatacagcaatccttcagaccacgctttctgggcgtcgcagagcaactacacaatgaaggttttaagctttttgctaccgaagcgacctctgactggctgaacgccaataatgtgcccgctacccccgtggcgtggccttcacaggaagggcagaacccttctctatcttctattcgcaaattgattcgggacggcagcatcgacttggtgatcaatctaccaaacaataacactaagttcgtacacgacaactacgtaattcgccggactgccgtcgatagtggaatccccctgctgaccaatttccaggtgaccaagttgttcgctgaggcagtgcaaaagtcccgcaaggtcgatagcaaatcgctctttcattatcgtcagtactccgccggtaaggctgct

SEQ ID NO: 43528 - DNA, 4500 bp, Artificial Sequence
  derived and/or modified sequence
atgactcggatcctgacggcatttaaggttgtgaggacccttaagaccggtttcggatttacgaacgtcaccgcacatcaaaagtggaagttttccagacccggcattcggttgttgtcagtgaaggcccagactgctcacatcgtccttgaagatggtactaaaatgaagggctactcatttgggcatccaagctcagtggcaggtgaagttgtgtttaacaccgggcttggaggttaccccgaagcaataaccgatccagcgtacaagggacagattcttaccatggctaatcccatcattggaaacggaggggcccctgatacgaccgccctcgatgaactcggtttgagcaagtacctcgagagcaacggaatcaaggtgtcagggcttctcgttcttgactacagcaaggattacaatcattggctggcaaccaagtcacttgggcagtggctgcaggaggaaaaagtccctgcaatctatggtgttgacacgagaatgttgactaaaatcattcgcgataagggtaccatgcttggaaaaatcgaatttgaaggtcaaccagttgatttcgttgaccctaataagcaaaaccttattgccgaagtgtcaaccaaggacgtgaaggtgtacggtaaggggaaccctaccaaagtggtcgcagtagattgtgggattaagaacaacgtgattcgattgctggttaagagaggcgccgaagtccatcttgtgccttggaatcacgactttactaagatggaatacgatggaatacttatcgctggaggacctgggaaccctgcgctggctgaacccctgatacaaaacgtcaggaagattctggaatcggatagaaaggagccactctttggaattagcaccggtaacctgataaccggacttgcagccggagcaaagacctacaaaatgtcgatggccaacagaggtcagaatcagccggtccttaacattacgaacaaacaggcattcatcactgcacagaaccacggctacgcacttgataacaccctccccgctggttggaaacccctgtttgtcaacgtgaacgatcaaacgaatgaaggcattatgcatgaatcgaagccattctttgctgtgcaattccacccagaagtcaccccaggcccaatcgacaccgaatacctgtttgatagctttttctcgctcattaagaagggcaaggcaaccactattacttcggtgcttccgaagccagcactggtcgcgagccgggtggaagtgagcaaggtgctgatcctgggatctggtggccttagcataggtcaggcaggcgaattcgattactccggctcccaggccgtgaaggcaatgaaagaagaaaacgtcaagaccgtcctgatgaatcccaatatcgcatcggtgcagactaatgaagtggggcttaagcaggcggataccgtttacttccttcccattactccacaattcgttactgaagtgattaaggcggagcaaccggacggtctgattctgggaatgggtggacaaactgcccttaactgtggggtggaattgttcaagaggggagtgctgaaggaatatggcgtcaaagtcctcggtacttcagtggaatcgattatggctaccgaggaccggcagttgtttagcgataaacttaatgagatcaatgaaaagattgcaccttcgttcgctgtagaatccattgaagatgcactgaaagcagcagacacgatcggttatccagttatgattaggtccgcatatgctcttggcgggctcggctcgggaatttgccccaacagagaaactttgatggacttgagcaccaaggcattcgcgatgaccaaccagatacttgtcgaaaagtcagtgaccgggtggaaggagatcgaatacgaggtggtgcgtgacgcggacgacaactgtgttaccgtgtgcaacatggagaacgtcgatgcaatgggagtgcatactggggattccgtggtcgtggcacctgcccagactctctccaacgcggagtttcagatgcttcggaggacgtctattaacgtggtgcgccacctgggaattgtgggagagtgtaacatacaatttgcgttgcatcctactagcatggagtactgcattattgaggtgaacgcaagactgtcacgctcgtcggcgttggcctcgaaggcaacgggttacccacttgcatttatcgcagcaaagatcgcactgggaattcctctgccggagattaagaatgttgtgagcggaaaaacctcagcatgctttgaacctagccttgattacatggtgactaagattcctagatgggaccttgatagatttcatggaacctcgtcgcgtataggctcctctatgaaatccgtgggagaggtgatggcaatcggaagaacctttgaagaatcgtttcaaaaggctcttagaatgtgtcatccttcgattgaaggatttaccccaagacttcctatgaacaaggaatggcctagcaatctcgatctccgaaaagagctttccgagcctagctcaactagaatttacgcgattgccaaagcgattgatgacaatatgtccctcgacgagatcgagaagctgacttacatcgacaaatggtttctgtacaagatgcgtgatatcctgaacatggaaaagaccctcaaaggactcaactccgagtccatgactgaggaaactcttaagcgggcgaaggagatcggttttagcgataagcagatttcaaaatgtcttggactcactgaagcccaaactagggaactgcgcctgaagaagaacatccatccatgggttaagcagatagacactctcgcagccgagtacccttcggttaccaactacctgtacgtgacctacaacggtcaagagcatgatgtgaatttcgatgatcatggtatgatggtccttggttgcggaccgtaccatattggttcctccgtggaatttgattggtgtgccgtgtcgagcatcagaactctgcgtcaactggggaagaaaactgtcgtggtgaattgtaaccccgagactgtgagcactgattttgatgaatgtgacaaattgtacttcgaggaactctctttggaacgcattctcgatatctaccatcaagaagcgtgcggcggatgtataatctcagtgggaggccaaataccgaacaacttggcagtgccgctttacaaaaatggcgtgaagattatgggtacctcaccactgcagatagatcgagcagaagatcgcagcattttctccgcagtgctggacgaactgaaagtcgcccaggcgccgtggaaggcggtgaacaccctcaacgaggcgctggagtttgcaaagtccgtggattacccctgcctcctccggccctcatacgtgctttccggctccgcaatgaacgtggtgttttccgaggacgaaatgaagaagttcctggaggaagcaacccgagtctcgcaggagcaccctgtcgtgcttaccaagtttgtggaaggcgcccgcgaagtggagatggatgcggtcggcaaggacggacgcgtcatctcgcatgcaatctcggaacacgtggaagatgcaggcgtgcacagcggggacgctactctcatgctgcctacgcagacgatttcccagggtgccattgagaaagtcaaggatgctactagaaagatcgcaaaagcatttgcaatttcaggaccattcaatgtgcagttcctggtgaaagggaatgatgtgcttgtgattgagtgtaatctgagagcctcccgcagcttcccgtttgtctctaagactctcggtgtggatttcatcgacgtggctacgaaggtgatgattggtgaaaatgtagacgaaaagcatctgcccactcttgatcatcccatcataccagccgattacgtggcgatcaaggctcctatgttttcttggccacggctgagggatgcggaccccattctcagatgcgagatggcatcaacgggagaagttgcctgtttcggcgaaggaattcataccgcatttttgaaggcgatgctctcgacgggttttaagattcctcagaaaggcatcctgatcggtatccaacagtcttttcggccccgattccttggcgtagcagaacagctgcacaatgaaggattcaagttgtttgcaaccgaagcaacctcggactggctgaatgcaaacaatgtgcccgcgacccccgtggcctggccttcacaagaagggcagaatccaagcctgagctcaatccgcaagctcattagagacgggtccatcgacttggtgataaatcttcctaacaataacactaagtttgtccatgacaattacgtcatccggaggaccgcggtggattcaggtattccgctgttgaccaactttcaagtcaccaagctgtttgccgaagcagtgcaaaaatcccgaaaggtcgattcgaagtcgcttttccactaccgccaatattccgcaggcaaagcggca

SEQ ID NO: 43529 - DNA, 4500 bp, Artificial Sequence
  derived and/or modified sequence
atgaccagaatcttgacggctttcaaggtcgtgaggacccttaagactggcttcggattcaccaacgtgaccgcacatcagaagtggaaattttcgcgcccgggaatccggctgctcagtgtgaaagcacaaactgcacatatcgtgcttgaggacggaaccaagatgaaaggttattcattcggccatccctcgtcagtggctggcgaggtggtcttcaacaccggcctggggggttacccggaagccatcaccgatcccgcctacaagggtcaaatcctgactatggctaaccccatcatcgggaacggaggcgccccggacactactgccctggacgaattgggcctgtccaagtacctggaaagcaacggaattaaggtcagcggactcctggtgctggattactccaaggattacaaccactggctcgcaaccaagtcactcggccaatggcttcaagaagagaaggtgcctgccatctacggagtcgacacccgcatgctgactaaaatcatccgggataaaggcactatgctcggcaagatcgagttcgagggccaaccggtcgatttcgtggacccgaacaagcaaaatctgatcgcggaggtgagcactaaggacgtcaaagtctacgggaaaggaaatccgaccaaggtggtggcagtggattgtggtatcaagaacaatgtgatcagactgctcgtgaagcggggggcagaagtgcaccttgtgccctggaaccatgacttcaccaagatggagtatgatggtatcctgatcgccggcggacccggaaatccggcgctggcggaaccgctgattcagaatgtgcggaagattctggaaagcgaccgcaaggaacctctgttcggcatctcaaccgggaatctgatcaccggactcgcagctggtgcgaaaacctacaaaatgtcgatggccaacagaggacagaaccagcccgtgctgaacatcaccaataagcaggcgttcatcacggcgcaaaaccatggatacgcgctggataatactctgcctgccggatggaaaccgctcttcgttaatgtgaatgaccagaccaacgaaggaatcatgcacgaatcgaagccgtttttcgcagtgcagttccatcctgaggtgactccaggccctatcgataccgaataccttttcgactcgtttttctccctgatcaagaaggggaaggcgacgaccatcacctccgtgctccctaagccggcgctggttgcatctcgcgtggaggtgtccaaagtgctgatcttgggatcgggaggattgtcaattgggcaagcgggtgagttcgattacagcggctctcaggcggtcaaggcgatgaaagaggaaaacgttaagactgtgttgatgaacccgaacatcgccagcgtgcagactaacgaggtgggcctcaaacaagccgatactgtctacttcctgccaatcacgccgcagtttgtgaccgaggtgatcaaagccgaacaacctgacggactgatcctcggcatgggtggccagaccgccctcaattgtggcgtggaacttttcaagcgcggagtgctgaaggagtacggcgtgaaggtgctgggaacctccgtggagtcaattatggcgaccgaggaccggcaactgtttagcgacaagctcaacgagattaacgagaagatcgccccatcattcgccgtcgaatcaatcgaagacgccctcaaggccgctgacacgatcggctacccggtcatgatccggtccgcttacgctctgggagggctgggatcgggtatctgtccaaacagggagacgctcatggacctcagcactaaagcgttcgccatgaccaaccagatcctggtggaaaaatcggtcactggctggaaggaaatcgaatacgaagtggtgcgggacgccgatgacaactgcgttactgtgtgcaacatggaaaacgtggatgcaatgggcgtccacactggtgactccgtggtcgtcgcgccggcgcagacgttgtccaacgcggagttccagatgctgcggaggacttcaatcaatgtcgtgcgccacctcggaatcgtgggagagtgcaacatccaattcgccctgcatcctacttccatggaatactgcatcatcgaagtgaacgcacgcctctcgagaagctctgccctggcgtccaaggcaaccggatacccgctggcctttatcgcggctaagatcgctcttggcatccctctgccagagataaagaatgtggtgtccggtaaaaccagcgcgtgttttgagccgtcgctggattacatggtgaccaagattccgcgctgggatttggacaggttccacggaacctcgtcgagaatcggttcgtcgatgaaaagcgtcggagaagttatggccatcgggcggaccttcgaagaatcttttcagaaggccctcagaatgtgccatccgagtatcgagggattcacgccacgcctgcccatgaacaaggaatggccatcaaacttggatctccgcaaggaactgtccgaaccatcatcgaccagaatttatgctatcgcaaaggcgatcgacgacaacatgtccctggatgaaatcgagaagctcacctacatcgacaagtggttcctttacaaaatgcgggatatcttgaatatggaaaaaaccctgaagggactcaattcagaaagcatgacggaagagactctgaaacgcgctaaagagatcgggttttcagacaagcagatcagcaaatgcctgggactgaccgaagcgcaaacccgggagctccggcttaaaaagaatatccacccgtgggtgaaacagattgatacgctcgcggccgagtacccatcagtgactaactacctgtacgttacctataacggtcaagagcacgacgtgaatttcgacgatcacggtatgatggtgctcggatgcggcccgtaccatatcgggtcgtcggtagagttcgattggtgtgctgtgagctccatcagaactctgcgccagctgggaaagaaaacggtcgtcgtgaactgcaatccagaaaccgtgtcaactgactttgacgagtgcgataaactttacttcgaagaactcagcctggaacggatcttggacatctaccaccaagaggcttgcggcggctgtatcatctcggtgggaggtcagatcccaaacaatctggcagtgcctctctacaagaatggcgttaagattatgggcacctcccccctccagatcgaccgggccgaggatagatcaatcttctcagctgtcctcgacgaactgaaagtggcgcaggctccgtggaaggctgttaacactctgaatgaggcgctcgaattcgcgaagtcggtcgattacccgtgtctgctgcgaccgtcctatgtgctgtcgggatcagccatgaacgtggtgttttcggaggacgaaatgaagaaatttctcgaggaagcgacgcgggtgtcgcaggagcacccagtggtcctcactaagttcgtcgaaggtgcacgcgaagtggaaatggatgccgttggcaaggatggacgggttatatcgcacgccatctccgaacatgtggaagatgcaggagtgcacagtggggacgcgaccctcatgcttccgacccagaccatctcccagggagccattgagaaggtcaaggatgccaccagaaaaatcgcaaaggccttcgccatttcgggccctttcaacgtgcaattcctggtgaaaggcaacgacgtcctggttatcgagtgcaatctgcgggcttcgcgctcgtttccttttgtgagcaagacccttggcgtggactttatcgacgtggccaccaaggtgatgatcggagaaaatgtggacgagaagcatctgccaactctggaccacccaatcatcccagcggactacgtggccatcaaggcgccgatgttctcctggccacggctgcgcgacgccgaccctatcctgcgatgcgagatggcttccacgggagaagtggcctgttttggagagggtatccataccgcttttctcaaggcgatgctctccaccggattcaagattccgcagaagggaattctgattgggatccaacaatcgtttcgcccgcgcttcctgggcgtggcagagcagctgcacaatgagggatttaaacttttcgccactgaggcaacgtcagactggctgaacgcgaataacgtcccggcgaccccggtcgcatggccctcgcaggagggccagaacccgtccctgtcctccatcagaaagctgattagggatggtagcatcgatctcgtcattaacctgccgaacaacaataccaagttcgtgcacgacaattacgttatccgccgcactgccgtggattcaggaatcccactgctcactaacttccaggtgacgaagttgttcgctgaagcggtgcagaagtcccggaaggtggattcaaagtcgctttttcactacagacaatactcagcgggaaaggccgcc

SEQ ID NO: 43530 - DNA, 4500 bp, Artificial Sequence
  derived and/or modified sequence
atgactcggattctgaccgcattcaaagtggtccggactcttaagacgggctttggcttcaccaatgtcaccgcacaccaaaagtggaagttttctcgccctggtatccgactcctcagcgtgaaggcacagaccgcacatatcgtgctggaagatggaacgaagatgaaggggtactctttcggtcacccctcatcagtggcaggagaagtggtctttaacactgggcttggaggttacccagaagcaattaccgatcccgcctacaagggtcagattcttactatggcaaaccctattatcgggaacggtggagccccagatactaccgctcttgatgaactgggactttcgaagtacctggaatccaacggaattaaggtgtcgggacttcttgtgctggattactcaaaggactataaccactggcttgcaaccaagtcgctgggacaatggctgcaagaagaaaaggtgcctgcaatttacggtgtggacaccaggatgctgacgaagatcatcagagataaaggtactatgctcgggaaaattgaattcgaaggacaaccagtcgatttcgtggatccgaataaacagaacctgattgccgaagtgtccaccaaagacgtcaaagtgtacggtaagggtaacccgaccaaggtggtggctgtggattgtggaattaagaacaatgttatccgtctccttgtgaagagaggagcggaagttcacctggtcccttggaaccacgacttcaccaagatggagtacgatggtattctcattgcaggagggcctgggaaccctgctttggcagaaccactgatacaaaacgtgcggaaaattctcgagagcgatcgtaaggagccgctgtttggaatctcgactggaaatcttattactggactcgccgcaggagccaagacctacaagatgagcatggcaaatagaggtcaaaatcagccggtgctcaacattacgaacaaacaggcatttatcactgcacagaaccacggatatgcactggacaatacccttccagccggatggaaacctctgttcgtgaatgtgaacgatcagaccaatgagggtattatgcacgaatccaagcctttctttgcagtgcaattccatccggaagtgacccctggtcctattgataccgagtacctcttcgattcattcttttctctgatcaagaagggtaaggcaaccactatcactagcgtgctccccaagcccgcacttgtcgcatcaagagtggaagtgtcaaaggtgctcattcttgggtccggtggtctgtcgataggtcaggcgggggaattcgattacagcggttcgcaagcagtcaaggcgatgaaggaggaaaatgttaagaccgtgctcatgaatcctaacattgcatcggtccaaaccaacgaagtcggtcttaagcaggctgacacggtctacttcctgccaatcactccgcagttcgtgaccgaagtgataaaagccgaacagccagatggtcttattctgggaatgggaggccagaccgcactgaactgtggtgtggaactgtttaaacgcggtgtgctgaaggagtacggagtgaaggtgctcggaacctcggtggagtccataatggccactgaggataggcagctgttctcggacaagctgaacgagataaatgagaagattgcacccagctttgcggtggaatccattgaagatgcacttaaggcagcagatactattgggtacccagtgatgatcagatccgcatacgcgcttggagggctgggttcaggaatttgccccaatagggaaacgctgatggatctttccactaaggcattcgcaatgaccaaccaaatcctggtcgagaaatccgtgaccggatggaaggagattgagtacgaagtggtcagagatgccgatgataattgcgtgaccgtttgcaatatggagaatgtagatgcgatgggcgtccacaccggcgattcagtcgtcgtcgcaccggcccagacgctttccaacgcagagttccagatgcttcggcgaacctccatcaacgtcgtccgtcatctgggcattgtgggtgaatgtaacattcaattcgcacttcatcctacctccatggaatactgcattattgaagtgaatgcaaggctgtcacgatcctcggctctcgcgagcaaggctaccggctaccctcttgcatttatcgcagccaagattgccctcggtattccgttgccagagattaagaacgtcgtctctggaaagaccagcgcatgttttgaaccaagcctggactacatggtgacgaagataccacgttgggatttggacagatttcatggcacctcctcccggatcggatcctcgatgaagtctgtgggcgaagtgatggcgataggtcgtacttttgaagagtccttccaaaaggcacttcggatgtgtcatccgagcattgagggatttactccaagactcccgatgaacaaggagtggccgagcaacctggaccttagaaaggagctttcagagcctagctccaccaggatatacgcaattgccaaagccatcgatgataacatgtccttggatgaaattgagaaactgacttacatagacaagtggtttctgtacaaaatgcgcgacattcttaacatggaaaaaactctcaagggtctgaattccgaatcaatgaccgaggaaaccctcaagagagcaaaggaaatcggattttctgacaagcaaattagcaagtgcctcggacttactgaagcccaaactagggaactgcgactcaaaaagaatatccatccctgggtgaaacaaatcgataccctggcggccgaatacccaagcgtcactaattacctttacgtgacttacaatggacaagagcacgacgtgaatttcgatgaccatggaatgatggtgctgggatgtggaccataccatatagggtcaagcgttgagtttgactggtgtgcagtctccagcattcgcacgctccgacagctgggcaaaaagaccgtggtcgtgaattgtaatcccgaaaccgtgtcgacggactttgatgagtgtgacaaactctattttgaagagctgtcgctggaacggatccttgatatctaccatcaggaggcttgtggtggatgcataatctcagtgggtggacaaattccgaacaacctcgctgtccctctctataagaacggggtcaagattatgggaactagcccgctgcagatcgacagggcagaggaccggtcgatcttttcggccgtgctggatgaacttaaggtggcacaggcaccctggaaggccgtgaatactctgaatgaagcccttgagtttgcaaagtcagtggactacccctgcctcctccgcccttcctacgtgctgtcaggatcagcaatgaacgtagtgttctcagaagatgagatgaagaagtttcttgaagaagcaactagggtcagccaggaacacccagtagtactcacgaagttcgtggaaggggctcgcgaggtcgaaatggatgccgtgggtaaggatggcagagtgatttcccatgcaattagcgaacatgtggaagatgccggtgtccattccggagacgccacccttatgctccctactcagaccatttctcaaggcgcaatcgaaaaagtgaaggacgccacccgcaagatcgccaaggcctttgcaattagcggaccctttaacgtgcaatttcttgtgaaaggaaacgatgtcctcgtgatcgaatgtaacttgagagcttcccggagcttcccatttgtgtctaagactcttggtgtggacttcatcgatgtggcaacgaaagtgatgatcggagaaaatgtcgatgaaaaacatctgcctaccctggatcatccaattatccctgcggactacgtcgcgataaaggcccctatgttttcgtggcctagactgcgcgacgcagatccgatcctgaggtgtgagatggcgtcgactggcgaagtggcttgttttggagaggggatccacactgccttccttaaggctatgctgagcaccgggttcaaaatcccacaaaaaggaatcctcataggaatacagcagagctttaggcctagattcttgggggtcgcagaacaacttcataatgaagggttcaagctgtttgccaccgaggccacttcagactggctcaacgccaacaatgtccccgcgaccccagtcgcatggccaagccaagagggtcagaacccctcactgtcgtccatccgaaagttgattcgtgatggctccattgatcttgtgatcaacttgccaaataacaacaccaagttcgtgcacgataactacgtgattcggagaacggcagtggacagcggcatcccactcttgaccaactttcaagtcactaaactgtttgcggaagccgtccaaaaaagcaggaaagtggatagcaagtcgctgttccactaccgtcagtactcagcaggtaaagcggcg

SEQ ID NO: 43531 - DNA, 4500 bp, Artificial Sequence
  derived and/or modified sequence
atgacgcgcatcctgactgcttttaaggtggtgaggactttgaaaactggatttgggttcaccaatgtgaccgcacaccagaagtggaagtttagccgccctggcatcagactgctctctgtcaaggcacaaaccgcccacatcgtcctcgaagatggcaccaaaatgaaaggctacagcttcggacacccatcctccgtggctggtgaggtcgtctttaacacggggcttgggggctaccctgaggccatcactgatcccgcgtacaagggtcaaattctgactatggcaaacccgattatcggcaatggcggcgccccggacaccaccgcgcttgatgaactgggcctgtcgaaatacctggaatcaaacggtatcaaagtgtcgggtctgttggtgctcgattattcgaaggattacaaccactggctcgccaccaagtccctggggcagtggctgcaagaggagaaggtgccagctatctacggggtggacacccggatgctgactaagatcatccgcgacaaaggtaccatgctgggaaagatagaattcgagggacagccagtggacttcgtggatccaaataaacaaaacttgatcgccgaagtgagcactaaggacgtgaaggtgtacggaaaaggaaacccgactaaggtcgtggccgtcgattgcggaatcaaaaacaatgttatccgcctgctggtgaagcggggagcggaggtgcatctcgtcccttggaaccacgatttcactaagatggaatacgatggaattctcatcgcaggcggccccggaaacccggcattggccgagccactgattcaaaatgtgagaaagatcctcgagtcggaccggaaagagcccctcttcggtatctccaccgggaatctgatcaccggactggccgcgggagcgaaaacttacaaaatgagcatggccaaccggggacaaaaccaaccggtgctgaacattaccaataagcaggcatttatcactgcccagaatcacggctacgcgctggataataccctgccggccggatggaagcctctgttcgtgaacgttaatgatcagaccaatgaaggcatcatgcacgaaagcaaacctttcttcgccgtgcagttccatccagaggtcactccgggacctattgacaccgaatacctcttcgactcgttcttctcactgatcaagaaaggaaaggcgaccaccatcacctcagtgctcccgaaaccagccctggtggcgtcaagggtcgaggtgagcaaggtgctgatcctcgggtcaggcggcttgagcattggacaagcaggcgaattcgactactcggggtcccaggcggtgaaagccatgaaagaggaaaacgtcaagactgtgctgatgaacccgaacatcgcctcagtgcagactaatgaagtggggctgaagcaagcagataccgtgtactttttgccgatcaccccacagttcgtgaccgaagtgatcaaggccgaacagccggacggcctcattctgggaatgggaggacaaaccgcactgaactgcggggtcgaactcttcaagcgaggggtgctgaaagagtacggtgtgaaggtgctcggaacttcagtagagtcgattatggctacggaggaccggcaacttttctctgataaactcaacgagatcaacgagaagattgcccctagcttcgccgtcgagtcgattgaggatgccctgaaagctgccgacaccatcggatacccggtgatgatcaggtcagcctatgccctgggcggactgggaagcggaatatgtccgaatagggaaactctgatggacctgtccaccaaggctttcgcgatgactaatcaaatcctggttgagaaatcggtcactggctggaaggaaatcgaatacgaagtggtgcgcgacgccgatgataattgcgtcaccgtgtgcaacatggaaaacgtggacgcaatgggagtccataccggcgattcggtggtcgttgcgccagcacagactctctcaaacgccgagtttcaaatgctcagaagaacctccatcaacgtggtgcgtcatctgggaattgtgggagaatgtaacatccagtttgctctgcatccgacgagcatggagtattgtatcatcgaggtgaacgcgcgcctgtcccggtcctcggcgctcgcatccaaggcgacgggatacccgttggcgttcattgctgccaagatcgcgctgggcatcccccttcccgaaatcaaaaatgttgtctccggaaagacctcggcatgctttgaaccgagcctcgactacatggtcaccaaaatcccgagatgggacctggatcggtttcatggaacttcgtcgcgcataggatcaagcatgaagtccgtcggagaagtgatggcgatcggacggactttcgaggaatcattccagaaggctctgcgcatgtgccacccatccatcgagggctttaccccgcggctgcctatgaacaaggagtggccttcgaacctggacctccgtaaggagctgtccgaaccctccagcacgcggatctacgctattgctaaggccatcgacgataacatgtccttggacgaaattgagaagctgacctacatcgataagtggtttctgtacaagatgagagatatcctcaatatggaaaagactctgaagggacttaactcggaatccatgactgaagaaaccctgaagcgagccaaagaaatcggattctccgataagcagatttcaaagtgcctgggccttactgaggcgcagactcgcgaactgcggctcaaaaagaacatccatccctgggtcaagcagatcgataccttggccgccgaatacccaagcgtgacgaactacctctacgtcacttacaacggccaagagcacgacgtgaacttcgacgaccacggcatgatggtgctcgggtgcggaccgtaccatatcggtagctcggtggagtttgactggtgtgccgtctctagcatcaggacgctgcgccagctcggaaagaaaacggtggtggtgaactgtaatccggaaactgtgtcaaccgactttgacgaatgcgacaagctctacttcgaggaactctctttggagcgcattctggacatctatcatcaggaagcctgcggcggctgcatcatctccgtgggagggcagatccccaacaacctggccgtgccactctataagaatggagtcaagatcatgggaacttcgccattgcaaatcgaccgcgcagaggaccggtctatcttctcagcagtgctggacgagctgaaggtcgctcaggcaccttggaaggccgtgaacaccctgaatgaggcactggagtttgcgaagtcggtcgactacccatgccttcttcggccatcctacgtcttgtcgggcagcgcgatgaacgtggtgttcagcgaggacgaaatgaagaagttccttgaggaagcgactcgcgtctcccaggagcacccggttgtgcttactaaattcgttgagggtgcgcgcgaagttgaaatggatgctgtggggaaggacggacgggtaatctcgcacgcaatctcagaacatgtcgaagatgccggtgtccatagcggggacgcaaccctcatgctgccgacccagaccattagtcagggagccattgaaaaggtgaaggacgccactagaaagatcgctaaggccttcgctatctccggtccgttcaacgtccaattcctggtcaagggaaacgatgtgctcgtgatcgaatgcaacctccgcgcatcccgctcgtttcctttcgtgagcaagactttgggcgtggacttcatcgatgtggctaccaaagtgatgatcggagaaaatgtggatgaaaagcacctcccgactctggaccacccgatcatcccggccgattacgtggcaatcaaggctccgatgtttagctggcctcggctgcgagacgccgaccccatcctgaggtgtgagatggcttcgacgggtgaagtggcatgcttcggagaagggatccataccgccttccttaaggctatgctgtcgaccggattcaagatcccgcagaaaggaatcctgatcggtatccaacagtcattcagacctagatttctgggagtcgcggaacagctgcacaacgagggattcaaacttttcgcaaccgaagccacctccgactggctgaacgcgaacaatgtgccggccactccggtcgcctggccatcccaggagggacaaaatccatcgctctcaagcatcagaaaactgatccgcgacggttccatcgatctcgtgatcaatctccctaataacaatactaagttcgtccacgacaattacgtcatcaggcggaccgccgtggactcgggaattccactcctcactaacttccaggtgacgaagttgttcgctgaagcggtccagaaatcgcgcaaggttgactcgaagtcccttttccactacagacagtactcagcgggaaaggcggcc

SEQ ID NO: 43532 - DNA, 4500 bp, Artificial Sequence
  derived and/or modified sequence
atgactcggatcctgaccgcattcaaagtggtccggacccttaagacgggcttcggattcactaacgtgactgcccaccaaaagtggaagttctctcggcccggaatccggctgctctcagtgaaagcacaaactgcgcacatcgtgttggaggacggtaccaagatgaagggttactcgtttggacacccgtcctcagtcgctggagaggtcgtctttaacactggattgggaggataccctgaggccattacggatcctgcatataagggccagatcctgaccatggccaatcctatcatcggaaacggaggagctccagacactactgccctcgatgaactgggactgagcaaatacctggaatcaaatgggatcaaggtatccggactccttgtgctcgactactccaaggattacaatcactggctcgccaccaagagcctcgggcaatggctccaggaagagaaggtgccagccatttacggggtggatactaggatgctgaccaagattatccgcgacaagggcaccatgctgggtaaaatcgaattcgaggggcaaccagtggactttgtcgacccgaacaaacagaatctcattgccgaggtgtcaactaaggatgttaaagtttacggcaaaggtaacccaacgaaggtggtggcagtggactgcggaatcaagaataacgtcatcagactgctggtgaaacgcggcgcggaggtgcatcttgtcccctggaaccatgattttaccaagatggaatacgacggcatcctgatagctggtgggccgggcaacccggcgctcgctgaaccattgatccaaaatgtgagaaaaatcctggagagcgacaggaaggaaccgctctttggtatctccactggcaatttgattactggacttgccgccggcgccaagacctacaagatgagcatggctaaccgaggacagaaccagccagtgctgaatatcacgaacaagcaagccttcatcaccgcccagaaccacggatatgcacttgataataccctgccagccgggtggaaaccgctgtttgtgaacgtgaacgatcagaccaatgagggaatcatgcacgagtcaaagccgttcttcgcagtgcaattccacccggaggtcaccccgggacctatcgacactgaatacttgtttgattcatttttcagcctgatcaagaagggcaaggctaccaccattacctcggtgctcccgaagccggccctggttgcgagccgggtggaggtcagcaaagtgctgattcttggttcagggggcctgtccatcggccaagccggcgaattcgattactcgggctcccaagcggtgaaggctatgaaggaggaaaacgtgaaaactgtgctgatgaaccctaacatcgcctcggtccaaaccaacgaggtaggactgaaacaggcggacactgtgtacttcttgccaatcactcctcagttcgtgactgaggtcatcaaggcagagcagccagatggcctgatcctcggaatgggaggacagactgcgttgaattgcggcgtcgaactcttcaagcgcggcgtgctgaaggagtacggagtgaaagtactgggaacctcagtggaatcaattatggccactgaggacagacagctgttctcggataagctgaatgaaatcaacgaaaagatcgccccatccttcgcggtggaatcgatcgaagatgctctgaaggccgctgatactattggatacccagtcatgatccgctccgcctacgccttgggaggcctcggttcgggcatctgcccgaatagagagactttgatggacctctcgaccaaggcctttgcaatgactaaccaaatcctcgtcgagaagagcgtgaccggatggaaagagatcgagtatgaggtggtcagggacgcagatgacaactgcgtgactgtgtgcaacatggaaaacgtggacgctatgggcgtgcataccggagattccgtcgtggtcgcaccggcacaaaccctgagcaatgcagaattccaaatgctgagacgcacttccatcaatgtggtgcgccatctgggaatcgtcggagaatgcaatatccaattcgccttgcaccctacctctatggaatactgcatcatcgaggtcaatgcccgtttgtcgagaagctctgcactggcatcgaaagccaccggatacccgctcgcgttcatcgctgctaagatcgcgctgggtatccccctcccggagattaagaacgtggtgtccggcaagaccagcgcttgcttcgaaccgtcacttgactacatggtcactaagatcccaaggtgggacctcgaccggttccacggaaccagctcgcgcatcggcagcagcatgaaatcggtgggcgaagtgatggcgatcggacggacctttgaggagtccttccaaaaggccctgagaatgtgccacccgtcaatcgaaggattcaccccgagactccccatgaataaggaatggccgagcaacctggatctcagaaaggaactgtcagaaccttcctccacccgcatctacgccatcgctaaagctatcgatgataacatgtcactggacgaaatcgaaaagctgacgtacatcgacaagtggtttctctataagatgcgcgacatcctgaacatggaaaagacgctcaaaggtctgaattcggaatccatgaccgaggagactctcaagagagcaaaagaaatcggcttcagcgataaacagatcagcaagtgcctggggctgaccgaagcgcagacccgggaattgcgcctgaagaagaatattcatccttgggtgaagcagatcgacaccctggccgcggaatacccgtcggtgactaattacttgtacgtgacctataatgggcaggaacacgacgtcaacttcgacgatcacggaatgatggtcctgggctgcgggccctaccacatcggctcaagcgtggagttcgactggtgcgcggtcagcagcatccggaccctgcgccagcttgggaaaaagaccgtggtggtgaattgcaaccccgagactgtctctaccgatttcgacgagtgcgacaagctgtacttcgaggagctctcgctggagcgcatcctcgacatttatcatcaggaagcatgcggaggatgcatcatctctgtgggtggacagatcccgaacaatctggctgtcccgctgtacaagaacggggtgaaaatcatgggaacgtccccactgcaaattgacagagccgaagatcggtcgatcttctccgcggtgctggatgagctgaaggtggcacaagcgccatggaaggcagtgaacactctgaatgaagcactcgagttcgctaaatccgtggattacccgtgcctgctgcgtccaagctacgtgctctcgggatccgccatgaatgtggtgttctccgaggatgagatgaagaagttcctcgaagaagccacccgggtgtctcaggagcaccctgtcgtgctgacgaaattcgtggaaggggcgcgcgaagtggaaatggacgcggtgggcaaagacggcagagtcatttcccacgctatcagcgaacacgtggaggatgcgggagtgcatagcggagacgctacgcttatgcttccgactcagactatctcacaaggcgcgatcgagaaggtcaaggacgcaactcgcaagatcgccaaagcgtttgcaatctcaggaccgtttaacgtgcagttccttgtgaaagggaacgacgtgctcgtgatagaatgcaatctgcgcgcgtcgagatcttttcctttcgtgagcaagaccctcggagtggatttcatcgacgtggcgactaaagtgatgattggcgagaacgtggatgaaaagcatctcccaactctggaccacccgatcattcctgccgactacgtggccatcaaagcaccaatgttctcctggccgcggctgagagatgcggatccgatccttcggtgcgaaatggcgtcgactggggaagtggcctgcttcggtgaaggaatccatactgccttcttgaaagcaatgctctcaaccgggttcaaaattccgcagaaggggatcctcattggaatccagcagtccttccggccacgctttcttggagtggcagagcagctgcataacgaaggattcaaattgttcgcgaccgaggcgacttctgactggctcaatgccaacaatgtccctgcaactccggttgcttggccgtcgcaagaaggacaaaacccgagcttgtcgtcgatccgcaagctgatccgcgacggatcgattgacctggtgattaacctgccaaataacaataccaagttcgtccacgacaattatgtgatccggcggactgctgtggactcgggaatcccgctcctcactaacttccaagtcaccaaactgttcgcagaggccgtgcaaaagtcccgcaaggtggattcgaaatcgctgtttcactataggcagtacagcgcgggcaaggctgcg

SEQ ID NO: 43533 - DNA, 4500 bp, Artificial Sequence
  derived and/or modified sequence
atgaccagaatcttaacagcattcaaagtcgtcagaactctgaagactggatttggatttacaaacgtgacagcacatcaaaagtggaaattctctaggcccgggatcaggctactgagcgtcaaggctcagaccgctcacattgttctcgaagatggtacaaaaatgaaaggatactcgttcgggcacccctcatctgtcgcaggtgaggtggtgttcaacaccggactcgggggataccctgaggctataaccgatcctgcctacaagggccaaatccttactatggctaaccccatcatcggcaatggaggcgcgccagataccactgctctcgatgagttaggacttagtaagtatctcgaaagtaacggaatcaaggtgtctggcctcctggtccttgactactccaaagactacaaccactggctagcaacgaagtcgctgggtcagtggcttcaagaagagaaagtgcctgcaatctatggcgttgatacccggatgttaacgaagataatccgagacaagggtacaatgctgggtaaaattgaatttgagggccagccggtcgatttcgtggaccctaacaagcagaatctgatcgctgaggtgtctacaaaggacgtgaaagtttacggaaagggcaaccctaccaaagttgtggccgtggactgcgggatcaaaaacaacgtgatccgtctcctggtgaagcgtggcgccgaggtccacttggtgccgtggaatcacgatttcacaaaaatggagtatgacgggatccttattgctgggggccctggaaatcccgcacttgctgagccattgattcaaaacgttcggaaaatcctggagagtgataggaaagaaccattgtttggtatcagtaccggtaatctgatcacaggcctggccgccggcgccaaaacctacaagatgagtatggctaaccgagggcagaatcagcctgtgctgaacatcaccaacaaacaggcctttatcacagctcagaaccatggctacgctttggacaatacgctgcccgccggctggaagcctctctttgtgaatgtcaatgaccagaccaacgaagggatcatgcatgaatccaagccgtttttcgctgtgcaattccacccagaagtaacgccaggtcctatagataccgaatacctgtttgactcttttttctctctgataaagaaggggaaagctacaacaatcacctcagtgttgcccaagcccgctttagtagcgtccagggtcgaagtatccaaagttctcattttggggtctgggggcttgagcatcggccaggcaggcgaatttgactactctggaagccaagccgttaaagcaatgaaagaagaaaacgtaaagaccgtattaatgaatccgaacatagccagcgttcagactaacgaagttgggctcaaacaggccgatactgtgtatttcctcccaattacacctcaattcgtgacagaagtgataaaagcagaacaaccggacggactcatcctagggatgggaggtcagaccgcgcttaactgtggtgtggagctattcaaacgcggcgtgttgaaggaatatggcgtcaaagttctggggactagtgtagagtcgattatggccaccgaagatagacagctgttctccgacaaacttaatgaaattaatgaaaagatcgctccaagcttcgccgtcgagagtatcgaagatgccttaaaggccgctgacaccatcggctacccagtgatgatcagatctgcttacgccctgggtgggctgggctccggcatctgcccaaacagggaaactctgatggacctgagcactaaagccttcgctatgaccaaccaaatccttgttgaaaagagtgtcacgggttggaaggaaattgaatacgaagtggtccgggacgctgatgataactgcgtcaccgtgtgcaacatggagaacgtagacgcaatgggcgtacacactggcgactctgtagtggttgcaccggcccagacgctgtccaacgcggagttccaaatgctgcgcaggacctcaattaacgtggtcaggcacctcgggatcgtgggagagtgtaacatccaattcgctttacacccaactagcatggaatattgtatcatcgaagtgaacgctaggcttagcagaagcagcgcccttgcctctaaggccacgggatacccactcgcattcatcgctgcaaaaatagctcttggcattccacttccagagatcaagaatgtcgtgtctggaaaaacatcagcctgtttcgagccctctcttgattacatggtgacgaaaattccaagatgggacctcgacaggttccacgggaccagtagccggattggatcttctatgaagagcgtcggggaggtcatggcgatcggccgcacatttgaggagtccttccaaaaagctttacgaatgtgtcacccttcaatagagggcttcactcccaggcttccgatgaacaaagaatggccttcaaacctggatttaagaaaagagctctctgagccatcatccaccaggatttacgcaatcgcaaaagctatagatgacaacatgagcctggatgaaatcgaaaagcttacctatatcgataagtggttcctatacaagatgagggatatcctgaacatggagaaaaccctaaagggccttaactccgaaagcatgacagaggagaccctgaaaagagctaaggagataggcttctctgacaagcaaatttcaaaatgcctgggactaacagaagcgcaaactagagagttaaggctgaaaaaaaacattcacccgtgggttaaacagatagatacccttgccgccgaatacccgagtgtcactaactatttatacgtgacatacaacggacaagaacacgatgtcaacttcgacgatcacggtatgatggttttaggatgcggcccctaccacattggcagctcagtcgaattcgactggtgcgctgtatccagtattcggactctgaggcaactgggaaaaaaaacagtagtggttaactgcaatccagaaactgtctctacggattttgacgaatgcgataagctttatttcgaagagctctccctcgagaggatccttgacatctatcaccaggaggcttgtggaggctgtatcatttctgtaggaggccaaatccctaacaatttggctgtgcccttatacaaaaacggggtcaaaatcatgggcacctcccctctgcaaatcgaccgagccgaggaccggtctatattttccgccgttctggacgaattgaaggtggctcaggccccttggaaggctgtaaataccctgaacgaggctttagaatttgctaagagcgtcgattacccttgccttctcagaccaagttatgtattgtctggttcagctatgaatgtagtgttttcagaggatgaaatgaagaaattcttggaagaggcaacaagggtgagtcaggagcaccctgtggttcttactaaattcgttgagggggctcgggaagtggagatggacgccgttgggaaggatggacgcgttatctctcacgccatcagcgagcacgtcgaagacgcaggggttcacagcggtgacgccaccctcatgcttcctacccagactataagccagggagctattgaaaaagttaaggacgcaaccagaaagatagcaaaggccttcgctatctcagggccatttaacgtgcagttcctcgttaaggggaacgacgtgctggtgattgaatgcaatctgagagccagcaggtctttcccttttgtttcaaagacactcggagtggacttcatcgacgtcgccacaaaggtgatgataggcgagaacgttgatgagaaacatttgccaaccctggatcacccaatcattcctgcggactatgtagcaattaaggccccaatgttttcctggccaaggttgcgggacgccgatcctattcttaggtgcgagatggctagtacaggagaggtcgcctgctttggggagggcatacacacagccttcctgaaggccatgctctcaaccggttttaagatcccccagaagggcattttaatcggcattcagcaatccttcagaccgaggttcctgggcgtagcagagcagcttcataacgagggttttaagctgtttgcaactgaggctaccagcgattggctcaacgctaataacgtaccagctactccggtggcctggccttcccaggaaggtcagaacccgtccctcagcagcattagaaagttgatcagggacgggagcatcgatctggtgattaacctgcctaacaacaataccaaatttgtacatgataactacgtaattagacggaccgctgtggattccggtattcctttgctgactaatttccaagtcaccaagctttttgctgaagcggtgcagaagagtagaaaggttgacagcaaaagcctctttcactatcggcaatactctgcaggaaaagcagcg

SEQ ID NO: 43534 - DNA, 4500 bp, Artificial Sequence
  derived and/or modified sequence
atgacaagaatactgactgcctttaaagtcgtgagaaccctaaagactggcttcggctttaccaatgtgaccgcacatcagaagtggaaattttctaggccaggaatacgcttattaagcgtgaaagcccagaccgcccacatagttctggaggacggaactaaaatgaagggatattccttcggccacccctctagtgtggcaggggaagtggtgttcaacacagggcttggtggttatcccgaggcaatcacagacccagcctacaaaggacaaattcttaccatggccaacccgattatcggaaatggcggcgcccccgacacaaccgccttggatgaactgggcctctctaagtatctggagagcaacgggattaaagtatccggactcctggtgctagactacagtaaggattacaaccactggctggctactaagtctctgggacaatggctccaggaagagaaggtgcccgctatatatggtgtggacacacggatgttgaccaagattataagagacaagggcactatgctcggtaaaatcgagtttgagggacagccagtggactttgtggatcctaataaacaaaaccttatagctgaggtgtcaaccaaggatgtgaaggtgtatggaaaaggcaaccctaccaaggtagtggctgtggattgcggaattaagaacaacgtgatccgcctgttggtgaagagaggagcagaagtccacttggtgccatggaaccacgactttactaagatggaatatgatggcatcctaattgccggtggacccgggaatcctgcccttgctgaaccactcatccaaaacgtgaggaaaattctggagagcgataggaaggaaccgctatttggcattagtaccgggaatctgattacaggtctcgccgccggcgcgaagacctacaagatgagcatggctaaccgcggacagaatcagccagtccttaacataacaaacaagcaggctttcatcacagcccagaatcacgggtacgccctggataacactctgccagcgggctggaaacctcttttcgtgaatgtaaatgatcagaccaacgagggcatcatgcatgaatctaaaccattttttgccgtccagttccatccagaagtgactccagggcccatagatactgagtacttgtttgactccttcttcagccttatcaagaaaggcaaggctaccactatcacgtctgtgctgcccaagcccgcactggtcgcgagcagagtggaagtgtcaaaagttctgattttaggtagtggaggcttatcaatcggacaggccggcgaattcgattactcgggtagccaagccgtgaaggcaatgaaagaggagaacgtgaaaacagttctaatgaatcccaacatagcctccgtgcaaaccaacgaggtgggcttgaagcaggcagacaccgtgtattttctgccgatcacccctcagtttgtgacggaggtgattaaagccgagcagccagatggactaatccttgggatggggggccaaacagccttaaactgcggggtggagctttttaagaggggggtactcaaagaatatggcgttaaggttctaggaaccagtgtggaatctatcatggccactgaggaccgccagctgtttagtgataagctgaatgagattaatgaaaaaatcgctccatcgttcgcagttgaaagtatcgaggacgctctaaaggctgcagacacgattggttaccctgtgatgatccggagtgcatatgcactagggggcctcgggtcaggcatatgtcctaaccgagaaactttgatggacctgtccacaaaggctttcgccatgaccaaccaaatactcgtggaaaagtccgtcacaggctggaaggaaattgagtatgaggtagtgagagatgcggatgataattgcgtcacagtctgtaatatggagaacgtcgacgccatgggtgttcacactggggatagcgtggtggtagcccccgcccagaccctcagtaacgccgagttccagatgcttcgcaggacctccatcaacgtggtgaggcacctgggtatcgtcggtgagtgcaatatccagttcgctctgcatcctacttcaatggaatattgcataatcgaagtcaatgccaggctgagccggtcttccgccctagcatcaaaagctactgggtacccgctagctttcattgccgccaagattgccttagggatccccttacccgagatcaaaaatgttgtatccgggaaaaccagcgcatgttttgaaccctccctcgattatatggttactaaaatcccaagatgggatctggaccgattccacggaacaagctcaaggatcggctccagcatgaagagcgtgggtgaagttatggcgattggaaggacctttgaagagagttttcagaaagcccttcggatgtgccatccttctattgagggctttactcctcggctgccgatgaataaggagtggccctctaatttagacctcaggaaagagttgtccgaaccatccagcactcggatctacgctatcgccaaagccatagatgacaatatgagccttgatgagatcgagaagctgacttacattgacaagtggttcctgtacaagatgagagacatccttaacatggaaaagaccctgaaaggacttaattctgagtccatgaccgaggagacactaaagagggctaaggaaatagggttttctgataaacagatctctaagtgcttgggactgaccgaagcacagacccgcgagctgcgactgaagaaaaacattcatccctgggtcaagcagatcgatacccttgctgcagaatatccttccgtaactaactacctttatgtgacatataacggtcaagaacatgatgtgaactttgacgaccatggtatgatggtgttaggctgcgggccataccacatcgggtcaagtgttgagttcgactggtgcgctgtaagctcaataagaactcttagacagttggggaagaagacagtggtagtaaattgcaaccccgagacagtttcaaccgacttcgacgagtgcgacaagttgtacttcgaagagctctcactagagaggatattggatatctaccaccaagaagcctgtggcggctgtatcatatctgttggtgggcagattcccaacaacctggctgtacctctctacaagaatggcgtgaagatcatgggaactagccccctgcagatagaccgagctgaagatcggtccatcttttcagccgttctggacgagttgaaagtggcccaggctccctggaaggccgtcaacactcttaacgaagccctcgagttcgcgaagtccgtcgactatccatgcctcctgcggccttcctacgtgctgtcaggatccgccatgaatgtcgtgtttagtgaagatgagatgaagaagtttttagaagaagctacacgggtctcacaggaacacccagttgtgcttacaaaatttgtggaaggggctcgagaggtggagatggatgctgtgggtaaggacggcagggtcattagccatgcaatcagcgagcatgtagaggatgcaggcgtccactcaggcgatgcaactttaatgttaccgacccaaaccatctcccagggcgcgatcgaaaaggtgaaggacgctactcgtaagatcgctaaggctttcgctattagcgggccctttaacgtccagttcctcgtgaaaggcaacgacgtgctggtgatcgagtgcaatctgcgggccagccggtcctttccctttgtgagcaagacactgggtgtggattttatagatgtcgcaaccaaagtcatgataggagagaatgtggacgagaaacatttacccacgctcgaccatcctattattccagccgactatgtggccataaaagccccaatgttcagctggcctaggcttcgggacgccgaccctatactgaggtgtgaaatggcctcaaccggagaggtggcatgcttcggggagggcattcacacagcgttcttaaaagccatgctgtctactggtttcaagatcccacagaagggcatactgattgggattcagcagtcttttcgcccgcgctttctgggagtggcagagcagttgcacaatgaggggtttaagttatttgcaactgaggctaccagtgactggttaaacgcgaacaacgttcccgccacgcccgtggcttggccgagccaggaggggcagaacccctcactgtcaagtatcaggaagctgattcgggatgggtcaatagatctggttatcaaccttcccaataataacaccaagttcgtacacgacaattacgtgattaggcgcaccgctgtggactctggaattccgctcctcaccaattttcaggtcaccaagttgtttgccgaggccgtacagaaatccaggaaggtcgactctaagtcgctgtttcattaccgccagtactccgccgggaaggctgcc

SEQ ID NO: 43535 - DNA, 4500 bp, Artificial Sequence
  derived and/or modified sequence
atgactcgtattctgactgcattcaaggtggtgcgcaccctgaaaaccgggttcggatttacgaacgtgaccgcacaccagaagtggaagttttccagacctggtattcggctcctttccgtaaaggcacagaccgcacacattgtgctcgaggatggtactaagatgaagggctattccttcggacatccctcgtcggtggcgggcgaggtcgtctttaacactggtcttggaggataccccgaagccattaccgatccggcctacaaggggcaaatccttactatggctaatcccataatcggaaacggaggggctcccgatactaccgcactggatgaactgggcctttcgaaatacctcgagagcaacggcatcaaagtcagcggactgcttgtgcttgactactcaaaggattacaaccattggctggcaaccaagtcactgggacaatggcttcaggaggaaaaagtgccagcaatctacggagtcgacaccagaatgcttacgaagattattcgagataagggtaccatgctcggcaagattgagtttgaaggacaacccgttgattttgtggatcctaataagcagaacctgattgcagaggtgagcactaaggatgttaaggtctacggcaagggaaatcctacgaaagtggtggcagtagactgtggcattaagaataatgtcattcgcctcctggtgaaaaggggcgctgaagtccacctggtgccttggaatcatgattttaccaaaatggaatacgacgggattctcattgcaggtggtcccgggaacccagctcttgccgaaccacttattcagaacgtccgaaagatacttgaatcggacaggaaggaacccctttttggaatatcgacgggcaacttgatcactggcctcgcagcaggagccaaaacttacaaaatgtccatggccaatagaggtcagaaccaacctgtgctgaatatcaccaataagcaggctttcataactgcgcagaaccatggttacgcactggataatacccttccagcgggttggaagcctctttttgtcaacgtcaacgaccagaccaatgaaggaattatgcatgagtcgaagccattctttgcagtgcaattccatcccgaggtgacgcctgggccaattgacacggaatacttgtttgactcgttcttctccctgatcaagaagggtaaagccactactatcactagcgtcctccccaagccggcacttgtggcatcgcgcgtggaagtctcgaaggtgcttattctggggtcaggcggactgagcattggtcaagcaggagagttcgattactcaggatcacaagcagtgaaggcgatgaaggaggaaaacgtgaaaactgtgcttatgaacccaaacatcgcctcagtccaaactaatgaggtcgggttgaaacaagcggatactgtgtacttcctgcctattaccccacaattcgtgaccgaagtgattaaggcagaacaacctgatggccttatccttggaatgggagggcaaacggcattgaactgcggcgtggagctgtttaaacggggtgtgcttaaggagtacggcgtgaaggtccttgggacctccgtggaatcgatcatggcaaccgaggacagacagcttttttccgataagttgaatgagatcaacgaaaagatagccccttcgttcgcggtggaatccatcgaggacgcacttaaggcggctgataccattggatacccggtgatgatccggtccgcctatgcgcttggggggctgggatccggaatctgtccgaatagggaaaccctcatggacctctcgactaaagcatttgcaatgacgaaccagatccttgtggaaaagtccgtgactggatggaaggaaatcgaatatgaagtggtgcgagatgccgacgacaattgtgtgaccgtatgtaacatggaaaatgtcgatgcaatgggcgtccatactggagattccgtggtagtggcgccagcccagaccctgtcgaatgcagaattccaaatgctgcgaagaacctcgattaatgtggtgagacacctgggaattgtgggtgaatgcaatatccaatttgcacttcatcctacttcaatggagtactgcattattgaagtcaacgcacggttgagccggtcatctgcactggcgagcaaggccacgggataccctctcgcatttatcgcagctaaaatcgctctggggattcccctgcccgagattaagaatgtggtgtccggtaagacctcagcctgttttgaaccttcgctggattacatggttacgaagataccacgctgggatctcgatagatttcatgggacttcgagtagaattggctcttccatgaagtccgtaggagaggttatggcaatcggtagaacttttgaggaatcgttccaaaaagcgcttaggatgtgtcatccctccattgagggttttaccccaagactcccaatgaataaggaatggccatcgaatcttgacctgcgaaaggagttgagcgaacctagctcgactcggatttacgctattgcaaaagcaattgatgacaatatgtcgctggatgaaatcgaaaaacttacttacatcgataagtggtttctctacaagatgcgtgatatactcaacatggaaaagactcttaaagggctgaacagtgaatccatgaccgaagaaaccctcaaaagggccaaggagattggattttcagataagcagatttcaaagtgtcttggactgaccgaagctcagaccagggaactgcgcctgaagaagaacatccatccatgggtcaaacaaatcgacacgcttgccgctgaatacccttcggtgactaattacctttacgtgacttacaacggacaagaacatgatgtcaactttgatgatcacggtatgatggtactgggctgtggaccataccatattggttctagcgtcgaatttgattggtgcgctgtgtccagcatccgcactttgagacagctgggaaaaaagactgtcgtcgtcaactgtaaccctgaaactgtgtccaccgacttcgatgaatgcgataagctgtactttgaagaattgagcttggaacggatcctggacatttatcaccaagaagcatgtggagggtgcattatcagcgtgggaggtcaaattcccaacaatctcgcagtgccgctgtacaagaacggagttaagattatgggcaccagccctctccaaattgatcgtgcagaagatcgctcaatcttttcggccgtgctggacgagcttaaggtggcgcaggccccttggaaggctgtgaacaccctcaatgaggccctggaatttgcaaagagcgtggattacccatgtctgctgcggccaagctacgtcctttcagggtccgcgatgaatgtcgtctttagcgaagatgaaatgaagaaatttctcgaggaagccacccgcgtatctcaagagcatccagtggtcctgaccaagtttgtcgagggggcgcgtgaagtcgaaatggacgcagtgggtaaggacggacgcgtcatttcccacgctatctcagagcacgtggaggatgccggagtccattccggcgacgccactcttatgcttcctacccagaccatttcacaaggagcaatcgagaaggtgaaggatgcaactcgcaagatcgccaaggcgtttgccatatcaggcccttttaacgtgcagttcctcgtgaagggtaacgatgtcctggtgatcgaatgtaaccttagagcaagcaggtccttccctttcgtgtccaagacccttggtgtggacttcattgacgttgcaaccaaagtgatgatcggggagaacgtggatgaaaaacatctgcctacccttgaccaccccataattcccgcagactacgtggcgattaaggcccctatgttttcgtggcctaggctgcgcgatgctgatcctatactcagatgcgagatggcgtccaccggagaagttgcttgtttcggagaggggattcacactgcatttctcaaagcaatgcttagcaccggtttcaaaatacctcaaaaaggtattctgattggaatacaacaatcattccggccaagatttttgggtgttgcagaacagctgcataacgaaggattcaaactctttgcaaccgaagctactagcgactggcttaacgccaacaacgtgccagcaactcctgtggcatggccaagccaggagggtcagaatccatccctttcgtccataagaaagctcattcgggatggttcaattgacctggtcatcaacttgcctaataacaacaccaaatttgtccacgacaattatgtgatacgtcggactgcagtggattccggtatcccacttctgaccaattttcaggtgaccaaacttttcgcagaggcagtgcagaagtcgcgcaaagtggatagcaagtcgctgttccattaccgacaatactcggcaggcaaggcagcg

SEQ ID NO: 43536 - DNA, 4500 bp, Artificial Sequence
  derived and/or modified sequence
atgactagaatactgactgcattcaaagtagtgcgcacactgaagaccggctttgggttcacaaatgtcactgcccatcagaagtggaagttttctagacccggaatcaggctgctgagtgtcaaggcacaaacggcacacatagtgttggaggatggtaccaagatgaagggatactcattcggccacccatcctctgtggctggagaagttgtgttcaacactgggctgggaggctacccagaagccattaccgacccagcctataaaggtcagatcctgaccatggctaaccctatcatcgggaacggtggcgctcccgacaccacagccctggatgagctgggtttaagcaaatatctagagagcaacgggattaaagtgagtggactgctggtattggattactccaaagattataatcattggcttgcgacaaagtcacttggccaatggcttcaagaggagaaggttccagctatctacggggtagacacaaggatgctcacaaaaatcatccgggacaaaggaacgatgctgggaaagatagaattcgagggacagccagttgacttcgtcgacccaaacaagcagaacctgatcgccgaggtgagcaccaaggacgtaaaggtgtatggtaagggaaaccccacgaaagtggttgcagtggattgtgggattaaaaacaacgtcattcggctgctagttaaacgcggtgctgaggtgcacctggtgccctggaaccatgatttcaccaaaatggaatacgacggcatacttattgccggtggtcctggcaacccagccctggccgagccactgatccagaacgtgcgcaagatcctggaatccgaccggaaagaacctctcttcggaataagcaccgggaacctgataacaggcctggccgccggagctaaaacttataagatgagcatggctaatcggggccagaatcagccagtgctgaacataacaaataagcaggcttttatcacagcccaaaaccatggatacgcactggataacactctccccgctggctggaagcctctattcgtgaacgtcaacgaccagacaaatgagggcattatgcacgaatcaaaacccttttttgccgtccagttccaccccgaggtcactccaggtccgattgacacagagtatctgtttgactccttcttctctctaataaaaaagggaaaagctacaaccatcacctccgtgttgccaaaacctgccctggtggcctcccgggtcgaagtctctaaagttctgatcctaggatcaggcggcttgagcattggccaggctggcgaattcgactactccggaagccaagccgtcaaagccatgaaagaagagaacgtaaagacagtcctaatgaaccccaatatcgcttccgtgcagacaaacgaggtgggcttgaaacaggcggatacagtgtattttttgccaattaccccgcagtttgtgacagaggtcattaaggccgagcagcctgatggattgatattaggcatgggaggccagaccgccctgaactgtggggtggagctgtttaagcgaggagtactgaaggaatacggagtgaaagtcttgggaaccagcgtggaaagtataatggccactgaggaccggcagctgttctccgacaaactgaatgagattaatgagaagatagcaccatctttcgcggtcgagtcaatcgaggatgctctcaaggccgccgacactataggctaccccgtgatgattcgtagtgcctatgcgcttggtggcctgggatccgggatatgccccaaccgcgaaaccctgatggacttatccaccaaagctttcgcaatgacaaaccagattctggtggagaagtcagtgaccgggtggaaagagatagaatatgaagtggtgcgagatgcagacgataattgcgtaacagtgtgcaacatggaaaacgtggacgctatgggggtgcacacgggcgactcagtggtagtggctccggctcagactctatcaaatgcggagttccagatgctgcgccgcacttccattaacgtggttagacacctgggaattgtgggtgagtgcaatattcagttcgccctccatcctacatcaatggagtactgcatcatcgaggtcaatgcaaggctttctaggagctcggctcttgcctccaaggcgaccggttacccattagccttcatcgccgccaagatagcactggggattcctctgccagaaattaagaatgtcgtgtccggaaagaccagcgcatgttttgagccctcgctcgactacatggtgacgaagatacctaggtgggatttagacaggtttcacggtacaagctcccgaatcggctcttcaatgaaaagcgttggcgaggtaatggcgatcggccgcacctttgaagagtcctttcagaaggcgctgcgaatgtgccacccctctatcgaaggcttcaccccccggcttccgatgaacaaggagtggccttctaacctggatctccgaaaggaactgtccgagccttccagtaccagaatatatgccatcgcgaaagctatcgatgataacatgtccctggatgaaatagaaaaactgacttacatcgacaagtggttcctgtataagatgcgggatattctcaatatggaaaagactctcaagggtttgaatagcgagtcaatgaccgaggagacccttaagagggccaaggaaataggttttagcgacaagcagatttcaaaatgccttggactcactgaagcacagacacgggagctgagacttaagaagaacattcatccatgggtcaaacagatagataccctcgccgctgagtacccgtccgtgaccaattatttgtatgtcacctataatggacaggagcatgacgtcaattttgatgaccacggaatgatggtgctgggttgcgggccgtaccatattggctcttctgtggaatttgattggtgcgcagtatcatccatacgtaccttacggcagttgggtaagaagacagtggtggtgaattgtaatcctgagacagtgtccaccgatttcgacgagtgtgacaagctctattttgaggagttatccctggagcgaatcctagacatctaccaccaggaggcatgcggaggctgtattatttccgtgggcggccagattccaaacaatcttgcagttcccctctataaaaacggagtcaaaatcatggggacatccccattacagattgatcgcgcggaagaccgctctatcttttccgcagtgttggatgagctgaaggtggcccaagccccttggaaggccgtcaacactttgaatgaggccttagaattcgcgaagtccgtggattacccctgcctactgcgcccctcctacgtattatccggttccgctatgaacgtggtgtttagtgaggatgagatgaagaaattcttagaggaggccactcgggtttcacaggagcaccccgtcgtgttaactaagtttgtggagggagcacgcgaagtagaaatggacgccgtaggcaaggacgggagagtcatctcacacgccatatctgaacacgtggaggacgccggcgtgcactctggtgatgcaacactgatgctgccaacgcagaccatcagtcagggcgcgatagagaaggttaaggatgctacaagaaaaattgcaaaggcgtttgcgatttcaggtcctttcaatgtccagttcctggtcaagggcaacgatgtccttgtgatcgaatgtaatctgagagcatcgcgctcattccctttcgtgagcaaaacgttgggggtcgacttcatcgatgtggcaacgaaagtcatgattggggaaaatgtcgatgagaaacatttaccgacccttgatcacccgattatccctgcggactatgtcgctatcaaagctcctatgttcagctggccacggctccgcgacgcagatccaatcctccgatgcgaaatggcatccaccggggaagtcgcatgcttcggagaagggattcacactgcttttctgaaagctatgctgagtaccgggttcaaaatcccgcagaagggcattctcatcggaatacaacagtcttttcggccccgcttcctaggagtcgctgagcaactgcacaatgaaggcttcaagttattcgccactgaggccacttcagactggctcaacgctaataatgttcccgccactcctgtggcttggccgtcccaggagggccagaaccccagcctttcttcaatccgaaaactcatccgtgatggatccattgatcttgtgatcaacctcccaaataacaatacaaagtttgtgcacgacaactatgtaattcgccggaccgcagtcgattccggcataccattactgactaatttccaggtgacaaaactctttgcagaggcagttcaaaagagcagaaaggtggatagcaagtcattattccactatagacagtattccgctgggaaagccgcc

SEQ ID NO: 43537 - DNA, 4500 bp, Artificial Sequence
  derived and/or modified sequence
atgactcgcattttgactgccttcaaggtagtacgtactctgaagacaggtttcggttttactaatgtcactgctcatcaaaagtggaaattctctaggccaggtatccgtttgctctctgtgaaggcccagaccgcacacattgttcttgaggacggcactaagatgaaaggttacagctttggacacccctcctcagtggccggagaagtggtatttaacactggcctcggtggataccctgaggcaattactgaccctgcctacaaaggtcagatcctgaccatggctaacccaattattggaaacggaggcgcacctgacactactgctctggatgaattgggtttgtcaaagtatcttgagtctaacggcataaaggtttctggtcttcttgtactggactactcaaaggattacaaccactggttggctactaagagcctgggccagtggctgcaagaggagaaagtccccgccatctatggcgtggacacccgtatgctgaccaagatcatccgcgataagggaactatgctgggcaagattgagtttgagggacaaccagtggacttcgtcgaccccaataagcaaaaccttatcgccgaagtgtccactaaagacgtaaaggtttacggcaagggcaacccaaccaaagtggtcgccgtagactgcggcatcaagaacaacgtcattagattgctcgtgaagcgtggcgccgaagtgcaccttgtgccatggaatcatgactttaccaagatggagtatgacggaattctgattgccggaggccctggcaacccagcactggctgaacccctgatacagaacgtgcgtaagatccttgagtcagataggaaggagcctctcttcggtattagtaccggcaacctcattaccggactcgctgccggagctaaaacttacaaaatgtctatggccaaccgcggtcaaaaccagcccgtgcttaatatcactaacaagcaagctttcataacagctcaaaaccacggttacgccctcgacaatactctgccagccggttggaaaccactgttcgtcaatgtgaacgatcagaccaacgagggaatcatgcacgaatcaaagcctttcttcgctgtccagttccaccctgaggtgacacccggtcctatcgacactgagtacctcttcgactcctttttctccctcataaaaaagggtaaggctacaacaatcacaagcgtgctccccaaacccgctcttgtggcttccagggtcgaggtcagcaaggtgttgattctcggatccggtggactctcaattggacaggcaggagagttcgattactccggctcacaggctgtaaaggccatgaaggaggagaatgtcaagactgtgctgatgaacccaaatattgcatctgtgcaaacaaatgaagtcggcctcaagcaggctgataccgtgtatttcctcccaatcacacctcagtttgtcacagaggtgatcaaagctgagcagccagatggtctgattctgggtatgggcggacaaaccgctctgaactgcggagtggaactctttaaaaggggcgtgctgaaggagtacggcgtgaaggtcctgggcacatctgtggaatctattatggcaaccgaggaccgtcagttgttctcagacaaactcaacgaaatcaatgaaaaaatcgccccttccttcgcagtcgagtccattgaagacgcacttaaggccgcagacaccattggctatcccgttatgatccgttctgcctatgccctgggaggactgggtagcggcatttgtccaaacagggaaacattgatggacctgtctaccaaagcttttgccatgacaaaccagatcctcgtggaaaagtctgtcactggttggaaggagattgaatatgaggtggtacgcgatgctgacgacaattgcgtcactgtctgcaacatggagaatgttgacgctatgggcgttcacactggtgatagtgtagtggtggctccagcccagaccttgtccaatgctgaattccagatgcttagacgcacctcaatcaacgtggtacgtcacctcggtatcgttggtgaatgcaatattcagtttgctttgcatcctacttctatggagtactgtatcattgaggtgaacgctcgtctgtctaggtcaagtgccctcgctagcaaggctaccggttaccccctcgcttttattgctgccaagatcgctctgggaatccccttgcccgagataaagaacgtggtctccggcaagacctctgcctgtttcgagccttctctggactacatggtgacaaagattccccgctgggatctggatagattccacggaactagctcacgcattggatctagtatgaagagtgttggcgaagtcatggccatcggtcgcactttcgaggagagcttccagaaggctctgcgcatgtgtcacccatccatcgaaggattcactccacgcctgccaatgaacaaagagtggccctccaacttggacctcaggaaagagctgagtgaaccctcctccacccgcatttacgctatcgctaaggccatcgatgacaacatgtccctggacgaaatcgaaaagctgacctacattgataaatggtttctttacaagatgcgtgacatactgaatatggagaagaccttgaagggtttgaatagcgaatccatgaccgaagaaaccctgaaacgcgcaaaggaaatcggcttctccgacaagcaaattagtaagtgtttgggtctgacagaggcccaaactcgtgaacttcgtctgaaaaagaatattcacccctgggtcaagcaaattgacaccttggccgctgagtatcctagcgtcaccaactacctgtacgtgacttacaacggacaggagcatgatgtgaatttcgatgaccacggtatgatggttctgggttgtggtccctatcacatcggttctagcgtggagttcgactggtgcgctgtatcaagcatcagaaccctgagacaactgggcaagaagacagttgttgtgaattgcaatccagaaactgtgtctactgactttgatgaatgcgacaagctttattttgaagagctttccctggagaggatcctcgacatctaccaccaggaggcctgtggaggatgcatcattagtgtaggcggccagatacccaataatcttgctgtccctctttacaagaacggtgtgaaaatcatgggtacttcaccactccagatagacagggccgaggaccgttccatcttctccgcagtgctcgacgagctgaaggtcgcccaagccccatggaaagcagtgaacaccctcaacgaggctttggagttcgcaaaatccgtggattacccctgtctgctccgccccagctatgttcttagcggttcagctatgaacgtcgtattctccgaggatgaaatgaaaaagttcctggaggaggctaccagagtgagtcaggaacatcccgtggtgcttacaaagttcgtcgaaggagctagggaggttgagatggacgctgttggcaaggacggaagagtcatctctcatgctatatccgagcatgtggaagacgctggtgtccactcaggtgatgctaccctgatgctccctacacaaactatttctcaaggtgctatcgaaaaagtcaaggatgctacacgcaaaatcgcaaaggcttttgcaatctccggtcctttcaatgttcagtttcttgtcaaaggaaatgacgtgctcgttatcgagtgcaacctgcgcgccagtaggtctttcccctttgtgagcaaaaccctgggtgtagatttcattgacgttgcaaccaaagtgatgatcggcgaaaacgtcgacgaaaagcaccttccaacactggatcatccaatcattcctgctgattacgtcgctatcaaggcccctatgttctcctggcctagattgagggacgctgaccctattttgcgttgtgagatggcctccactggagaagtggcctgcttcggcgagggtatccacacagccttcttgaaagcaatgttgtccacaggatttaagatcccccaaaagggtattctgattggaatccaacaatccttccgtcccaggttcctgggcgtcgcagagcaacttcacaatgagggcttcaagttgttcgcaactgaagcaacctctgattggctgaacgccaacaacgtcccagctactccagttgcatggccctcccaagagggacagaacccttctttgtcatctatcagaaagctgatacgtgacggtagcatcgacctggttattaacctgccaaataataataccaaattcgtgcacgataactacgtgattaggaggacagcagtagactctggcattccactgctgactaactttcaggttaccaaactcttcgcagaagccgttcagaaaagccgcaaggtggattctaagagtctgttccactataggcagtactccgccggaaaagcagca

SEQ ID NO: 43538 - DNA, 4500 bp, Artificial Sequence
  derived and/or modified sequence
atgacccgcattcttactgccttcaaggtcgtacgtaccctgaagactggatttggttttaccaacgtcaccgcccaccagaagtggaagttctcccgccccggcattagacttctcagcgtcaaagcccagaccgcccacatcgtcctggaggacggcactaagatgaagggttattccttcggtcatccatcaagcgtcgccggcgaggtggtcttcaacacaggactcggcggctaccccgaggccattaccgaccctgcttataagggacagatacttactatggccaatccaatcattggtaatggtggtgccccggatacaactgccctggacgagctcggtctgtctaagtacctggagtcaaatggaattaaggtgtccggtttgctagtgctggattacagtaaggattacaaccattggctggcgaccaaatctctcggccaatggctgcaagaggagaaggtcccggctatctacggtgtcgacacgcgaatgctgaccaagatcattcgcgataagggtaccatgctcggcaagatcgagtttgagggccaacccgtcgatttcgtcgaccctaacaaacagaaccttatagccgaggtgtctaccaaagacgtcaaggtctacggtaagggcaaccctaccaaggtggtcgcagttgactgcgggatcaagaataatgtgattcgcctactggtgaaacggggagctgaggtgcacctggtcccttggaaccacgacttcactaagatggagtacgacggaattcttattgcaggcggacccggtaaccctgccttggcggaacccctcatccagaacgtgagaaagattctagagtctgatcgcaaggagcccctgtttggcattagcacgggtaacctcattacgggtctcgccgccggcgccaagacgtacaaaatgtcgatggcaaaccgtggtcagaaccagccagtcctcaatataacgaacaagcaggcgttcatcactgcccagaatcacggctacgcactggacaacaccctgcctgcaggctggaaacctctgttcgtcaacgtgaacgatcaaaccaacgaaggcattatgcacgaatctaaaccgttcttcgcggtccagttccacccggaggtcacgccgggtcccatcgatacggagtatttgtttgattcgttcttttcccttattaagaaaggcaaggctactacgatcacgtcggtcctaccaaagccggcccttgttgcttctcgcgttgaggtgagcaaggtcctgattctcggctccggcggtctgagtattggtcaggcgggagaattcgactacagtggtagccaggccgtcaaagctatgaaggaggagaacgtcaagaccgtcctgatgaacccgaacatcgcctccgtccagacgaatgaggttggattaaagcaggccgacactgtctattttctacccattactcctcagtttgtcaccgaggtgattaaggctgagcagcctgatggactgattcttggcatgggcggtcagacggcattgaactgcggggtggaattgttcaaacggggtgtgctgaaggagtatggcgttaaagttttgggcacaagcgtggagtccataatggccacagaggacagacaactcttctctgataagctgaatgagataaacgaaaagattgctccttctttcgctgtggagtccattgaggacgccctgaaggctgccgacacgattggttaccctgtcatgatccgttcagcctacgcgttgggtggtttgggatccggtatatgtccaaaccgtgaaacgttgatggatttgtcgacaaaggccttcgcaatgaccaatcagatcctagtcgagaagagtgttaccggttggaaggagatagagtacgaggtcgtgcgcgacgctgacgataactgtgtcaccgtctgcaacatggaaaatgttgacgccatgggcgtgcacactggtgattctgtggtcgtggcgcccgctcagaccctaagcaacgcagagtttcagatgctccgccgcacatctatcaacgtagtccgccacctcggaatcgtgggtgagtgcaacattcagttcgctctccacccgactagcatggagtactgcatcattgaggtcaatgcccgtttatcccgttcttctgctttggcgtccaaggctacgggctatccgcttgctttcattgcggcgaagatcgccctcggcatccctctgcccgagattaagaatgtcgtttcgggtaagaccagtgcttgtttcgagccctctttggattacatggtgaccaagatcccccgctgggatttggaccggttccatggcacctcaagcagaatcggatcgtccatgaagagcgtcggcgaagtcatggcaattggtaggacctttgaagaaagtttccaaaaggcacttcgcatgtgccacccgagcattgagggttttactcctcgtttaccgatgaataaggagtggccgagcaacctggatcttcgtaaggagctgtccgagccctcctcaactcgaatctatgctattgcgaaggccatcgacgacaatatgtcgcttgacgagatcgaaaagctcacatacatcgacaagtggttcctctacaaaatgcgcgatattttgaatatggagaagacccttaaggggctcaacagcgagagcatgaccgaggagacactcaagcgtgctaaggagatcggtttctccgacaaacagatctctaagtgccttggtctcaccgaggcgcagactcgtgagcttcgcctgaagaagaacatccacccctgggtcaagcagatcgacaccctggccgcagaatatccctctgttactaactacctgtacgtgacatacaacggtcaagagcacgacgtgaacttcgatgaccacggtatgatggtgctgggttgcggaccgtatcatatcggaagttcggtcgaattcgattggtgtgcggtgagctctatcagaacccttcgccagctcggcaagaagaccgtcgtcgtcaactgcaaccccgaaaccgtgtcgaccgacttcgatgagtgcgataagctttatttcgaggaactctcgctcgaacgaatcctcgacatttaccaccaggaggcctgtggcggctgcatcatttctgttggaggacagatccctaacaatctggccgtgccactctataagaacggcgtgaaaatcatgggcacctctcctcttcaaatcgatcgtgcagaggaccgatcaatctttagcgccgtcctcgatgagctaaaagttgcacaagccccctggaaggcggttaacactctgaatgaggctctggaattcgccaaatccgtggattatccctgcctcctgcgtcctagttacgtcttgtcgggttcggcgatgaacgttgtcttcagcgaagacgagatgaagaagttcctggaggaggctactcgtgtctctcaagagcatcccgtcgtcctgaccaaattcgtggagggcgcccgcgaggtggagatggatgccgtaggtaaggacggacgcgttatttcgcacgctatttccgagcatgttgaggacgccggcgtccactctggtgatgccaccctgatgctccccacccagacaatttcgcagggagctatcgagaaagttaaggacgctacccgcaagattgcgaaggcgttcgccatctccggacccttcaacgtacagttcctcgttaaggggaacgacgtactggtcatcgagtgtaacctgagagcctccaggtcattccctttcgtcagcaagaccctgggggtcgactttattgatgtggccactaaggtcatgattggggaaaacgtcgatgagaagcacctcccgacccttgaccaccccatcattcccgcggattacgtcgccatcaaggcacctatgttctcgtggccccgcctgcgtgacgcggatccgatcctccgctgcgagatggcctcgaccggcgaggtagcgtgtttcggtgaaggtatccacaccgctttccttaaggcaatgctgagcactggcttcaaaatcccgcagaagggcatcctcattggcatccagcagagcttcaggccccgcttcttgggtgtggctgaacagttgcataacgagggtttcaagctctttgctactgaggccacgagtgactggctcaatgctaacaacgtgccggccacccccgtcgcctggcccagtcaggaaggccaaaatccttccctctcatcaatcaggaaacttatccgcgatggttcgattgatctcgtgatcaacctgcccaacaataacaccaaatttgtgcacgacaactatgtcatccgtcgcacggccgtcgactccggcatccccttgttgaccaacttccaagtcacaaagctgttcgccgaagctgtccagaaatcacgtaaggtggatagcaagagcttgttccactatcgccagtattccgccggcaaggcagca

SEQ ID NO: 43539 - DNA, 4500 bp, Artificial Sequence
  derived and/or modified sequence
atgacacgcatcctgaccgcttttaaagtggtcaggacactgaaaacaggattcggctttacaaatgttacagcccaccagaagtggaaattttcgcgtcctgggataaggctgctgtcggtgaaggctcaaacagcccacattgtattggaggacgggaccaaaatgaagggatactcattcggacacccttcatccgtagctggcgaggttgtctttaacacgggcctgggggggtatcctgaagcgatcactgatcccgcatataagggacagatactgaccatggcgaacccgataatagggaatggaggcgcaccagacaccactgcccttgatgagctagggttgagtaagtacctggaatccaacggcattaaagtctcaggcctcctcgtcctcgattacagcaaggactataatcactggctcgccacaaagagtctcggacagtggctacaggaggaaaaggttccagccatttatggtgtcgacacccgcatgctgaccaagattattagagataaggggacaatgttagggaaaatcgaattcgaggggcagccagttgactttgtcgaccccaataagcagaatttaattgctgaggttagtacaaaagatgtaaaggtttacggaaagggaaatcctactaaagtcgttgccgtcgattgcggtatcaagaacaatgtcatccgtcttctcgtgaagagaggagctgaggttcacttggtgccttggaaccatgattttacaaaaatggagtacgacggcatcctcatcgcgggcgggcccggaaatccagccttggccgagcctctaatccagaacgtgagaaaaatcctggagtccgatcggaaagagcccttgttcgggatcagcaccgggaacctcatcactggattggccgccggtgccaagacctacaagatgtccatggccaatcggggccagaatcagccagtacttaatatcaccaacaaacaggcttttataaccgcacagaaccatggctacgcactggataacacgctgcctgccgggtggaaaccgctgttcgtgaacgttaatgatcagaccaacgagggcatcatgcatgagagcaaacccttctttgccgtgcagttccaccctgaggtaacaccagggcccatagacacagaatatctcttcgacagtttcttttctttgattaaaaagggcaaggctaccacgatcacaagcgtgctcccgaagcccgcactcgtggcgtcccgcgtagaggtgtctaaggtgctgattttgggctcgggaggcttgagcatcggccaagccggcgagtttgattacagcggttctcaagccgttaaggctatgaaagaggagaacgtcaagactgtgctgatgaatcctaacattgcaagcgtgcagaccaacgaagtgggactgaagcaggccgacacggtgtactttcttccaattaccccgcagtttgtgactgaagtgattaaggctgagcagcccgacggcctgatcctcggcatgggtgggcaaactgcactaaattgtggggtcgagctcttcaagcggggggtgttgaaggaatacggagtgaaagtgctgggaacatccgttgagagtattatggccaccgaggatagacagctcttttcagacaaactgaatgagatcaacgaaaaaatcgctccatcttttgccgtggaaagtattgaggatgccctaaaggctgccgatacaataggttaccctgtaatgattaggagcgcatatgccctgggcgggctgggatcaggcatttgcccaaatcgcgaaactctgatggacctgtccacaaaggcattcgcaatgacgaatcaaatcctggttgagaaatcagttaccggttggaaggaaattgagtatgaagtagtccgggatgccgacgacaattgtgtaacggtgtgcaatatggagaatgttgatgctatgggcgtgcacactggggatagcgttgtagttgctcctgcccaaacgctttccaacgctgagtttcagatgctcaggcgcacaagcataaacgtggtgaggcaccttggcatcgtgggggaatgcaacatccagttcgccctgcaccctacatccatggaatactgcattatcgaagtgaacgctagactgtcgcgaagcagtgccttagcgtcgaaagccaccggctaccctctggcgtttatagctgccaaaatcgctctgggcatcccacttcctgaaattaagaatgtcgtgagcggcaaaacatcagcatgttttgagccatccctggattacatggtgaccaagattccgagatgggatctggaccgctttcacgggacttcctctaggatcggctcttctatgaaatccgtgggcgaggtcatggctatcgggcggacatttgaggagtccttccagaaggcacttaggatgtgccacccctccatcgagggcttcaccccacgtctacctatgaataaagagtggccatccaatttggacctccggaaagagctgagcgaaccctcctccacccggatttacgcgattgccaaggccatcgacgataacatgagcttagacgaaatcgagaagctgacatacatcgataaatggtttctctacaagatgagggatattctaaatatggaaaaaaccctgaagggcttgaattctgagtcaatgaccgaggagacgctcaaacgtgcaaaggagataggtttctcggacaagcagatcagtaagtgcttgggtttgacggaggctcagactagagaactgaggcttaaaaaaaatatacatccctgggtgaaacagatcgatactttagctgctgagtatcctagcgttactaattacttgtacgtgacctataacgggcaggaacacgacgtcaattttgacgaccatggcatgatggtgctgggctgcggcccctatcatatcggtagttctgtagagttcgattggtgtgcagtgtcgtccattaggacactgcgccaactcgggaagaaaacggtcgtcgtgaattgtaaccctgagacagtttcaactgactttgacgaatgcgacaaactctatttcgaggagctcagccttgagcgcatcctggacatataccaccaggaagcctgtggcggatgtattatctctgtcggaggacagattcctaacaacttggccgtgccgttgtacaagaatggagtgaagatcatgggaacgagcccactccagatcgatcgagccgaggacaggtccatcttctcagccgtgctggacgagctgaaagttgcacaggccccatggaaggccgtcaacaccctcaatgaagctcttgaattcgcgaagtcagttgactacccctgcctactgcggccaagttacgttctgagcggcagtgccatgaatgttgtctttagtgaggatgagatgaagaaattcctggaggaggctacacgagtgtcgcaggagcaccccgtggtactgaccaagtttgtcgagggggcgcgagaggtggagatggatgcagtcggcaaagacgggcgcgttatcagccatgccatcagcgaacacgttgaagacgccggcgttcattcaggggacgctaccctcatgcttcccactcagacaattagtcagggcgccattgagaaggttaaggatgcaacccgtaaaatagcaaaggcattcgcaatctccggtccttttaatgtgcagtttctggtcaaggggaacgatgtgctggtaatcgagtgcaacctgcgggcctcgaggtcttttccatttgtttcgaaaactctaggggtggactttatcgacgtggcaacgaaagtgatgataggtgagaatgtagatgaaaaacatcttccaactcttgatcatccgataatcccagctgactacgtagcaatcaaagcccctatgttcagttggcccagactaagagatgccgaccctattctgaggtgcgaaatggcttcaaccggcgaggtggcatgcttcggggagggcattcatactgcctttctgaaggcaatgctctccaccggttttaagattccccagaaaggcattctgatagggattcagcagagtttccggccgcgctttctgggggtggctgaacagctgcataatgaagggtttaagctcttcgctactgaggcaacctccgactggctgaacgccaataatgtgcccgcaacgccggtcgcttggccttctcaggaagggcagaacccctccttgagcagcatacgaaaactaatccgcgatggttccatcgacctggtgattaacctccccaacaataacacaaagttcgtgcatgataattacgtaatccgaaggaccgccgtggactccgggattccactcctgaccaattttcaggtgacaaaactcttcgctgaggccgtgcagaaatcccgcaaggttgactctaagtctttatttcattaccgacagtattctgccgggaaggccgcc

SEQ ID NO: 43540 - DNA, 4500 bp, Artificial Sequence
  derived and/or modified sequence
atgactcggattctcaccgctttcaaggtggtgagaaccctcaaaacagggtttggattcaccaacgtaacagcccaccagaagtggaagttttctcgccccggcatccggttattgtctgtgaaggctcagactgcccacatagtgctggaagacggtaccaaaatgaagggctactcgtttgggcatcccagttccgtagccggggaggtcgtattcaatactggtctaggaggctaccccgaggctattaccgacccagcatataagggccaaatcctgactatggctaacccaataatcgggaacggcggtgctcctgatacgactgcactggacgaattgggcctttctaaataccttgagtctaacggcatcaaagtttccggcctattagtactcgactactctaaagactataaccactggctggccacaaaaagtttgggtcagtggctgcaggaggagaaagtgcctgccatatacggggtggatactagaatgctgaccaagatcatccgggataaggggaccatgctcggtaaaatcgaattcgaggggcagcctgtggattttgtggatccaaacaaacagaatctgatcgccgaggtgtcgaccaaggatgttaaggtatatggtaaagggaacccgaccaaggtggtggccgtggactgcggtatcaagaacaacgtcatcaggttattggtaaagcggggggccgaagttcatttagtgccatggaaccatgattttactaaaatggagtatgacggaatcttaatcgcaggcggccccggtaatccggcgctggccgaacctctcattcaaaacgtgcgaaaaatattagagagcgatagaaaggaacccctgttcggcatctccactggcaacttgatcaccggactggccgccggtgccaagacatataaaatgtcaatggcaaaccggggacagaatcagccggtactgaatattactaataagcaagcctttattaccgcacagaatcatgggtacgccctagacaacaccctgcctgccggctggaagccattattcgtaaatgtcaacgaccagactaacgaggggatcatgcacgagtccaaacctttctttgctgtacaattccatcccgaggtcaccccgggccccatagacacggagtacttgtttgacagtttcttcagcctgatcaaaaaggggaaggccacaacaatcacaagcgtcctaccaaaaccggccctggtggcgtcacgggtggaggtaagcaaggtgctgattctggggagtggaggactttctatcggtcaggccggagagtttgactatagcggaagccaggcagtcaaggccatgaaagaggagaacgtcaaaacagtgctcatgaaccccaacatcgctagtgtgcagaccaacgaagtggggctaaagcaggctgatacagtgtacttcttacctatcactcctcagtttgttaccgaggtgattaaagcggagcagcctgatggattaatcttaggcatggggggacagacggccctgaattgcggagtggaactgttcaaacggggcgtcctcaaggagtatggagtgaaggtgctggggacatctgtggagtctatcatggctaccgaggatagacagctattctctgataaactcaacgaaatcaatgagaagatcgctcccagcttcgccgtggagtcaattgaggatgccctgaaggctgcagatacaattggatatcccgtcatgatccggagcgcctacgccctcggtggcctgggtagcgggatctgccccaacagggagacacttatggatttaagtactaaggctttcgccatgacgaaccagatcctggttgaaaagtcagtgaccggttggaaagagattgagtacgaagttgttcgggatgccgatgataattgcgttacagtctgcaatatggagaacgttgacgctatgggggtacataccggtgatagcgtcgtcgtcgcccctgctcagaccctcagtaacgccgagttccaaatgctgcgaaggacaagtattaacgttgtgcgccatctggggatcgttggggaatgtaacatccagtttgcgcttcaccctacctcgatggagtattgtatcattgaggtgaatgcacgtctgtctcggtcttccgcattagcttctaaggccaccgggtacccgctggctttcatcgctgcaaagattgctctgggaattcccctaccggagataaagaatgtggtctcagggaagacctctgcatgctttgagccttccctcgattacatggtgacaaagatccccagatgggatctagaccgcttccatggaacttccagtagaattggttcatccatgaaatccgtgggcgaggtgatggctattggtaggaccttcgaggaaagctttcagaaggcactgaggatgtgtcatccgtccatcgaaggatttacaccaaggctgcccatgaataaagagtggccctcaaatctcgacctgagaaaggaactaagtgagccctcgtctacccggatatatgctattgccaaggctatcgacgataacatgtcactggatgaaatcgagaagcttacatatattgataaatggttcctttacaagatgagagacatcctgaacatggagaaaactttgaaagggttaaactccgagagcatgacagaggagaccctgaaacgcgctaaggagatcgggttttccgacaaacagatatccaaatgccttggactgaccgaggcccaaacccgagagctgaggctaaaaaagaacattcacccctgggtgaaacagattgacactctggccgcggagtacccctcggtcactaattatctctacgtaacctacaatgggcaggaacatgatgtgaatttcgacgatcacgggatgatggtccttgggtgtggcccataccacattggctcttctgtcgagtttgactggtgcgctgtgtcaagcataagaacgttgcggcaactgggaaagaaaaccgtagtagtgaattgtaatcccgagaccgtctcaactgatttcgatgagtgcgacaagctttacttcgaagaactctctctggagaggatactggacatctaccatcaggaagcctgcggcggttgtattattagtgtaggtggtcagatacccaataatctcgcggtgccactgtacaagaatggcgtgaaaattatggggacctcaccactccagatcgaccgcgcagaggatcggagcatcttctctgccgtgttagacgaattaaaggtagctcaagctccttggaaagccgttaacaccttgaatgaggcactcgagtttgcaaagagtgtcgactatccttgtctgttacgcccttcatacgtcctgagcgggagcgctatgaacgtggtgtttagtgaggacgagatgaagaaattcttggaggaagccactagagtctcacaggaacaccctgtggtcttaacgaagttcgtggaaggcgctcgggaagtggagatggacgcggtcggaaaagatggtagagtcattagtcacgctatctctgaacacgtagaggatgctggagtgcattccggcgatgctacactgatgctgccaacccagaccatctcccagggggccattgagaaagttaaagatgcgacgcgcaaaattgcaaaagcctttgctatcagcggacccttcaacgtgcagttcctcgtgaaaggcaatgacgtcctcgtaatagagtgcaacctgcgcgcctccagaagctttcccttcgtgtctaagactttgggcgtggacttcatagatgtggcaaccaaggtgatgatcggagaaaatgtggatgagaaacatttacctacactggaccatcccatcattccagcagactacgttgccattaaggcaccgatgttctcttggcccaggctcagagatgcagacccaatcctcaggtgcgagatggctagcaccggcgaggtggcctgtttcggagaagggatccatacagcttttctgaaggcgatgctatccactggtttcaagattccgcagaaaggcatccttattggcatacagcagtccttcagacctaggtttctgggcgtagctgagcagttacacaacgaggggttcaaattatttgctactgaagcaactagtgattggctgaatgctaacaatgtccccgcaacaccggttgcctggccgagccaggaggggcaaaatccttctctgagttcaatacgcaagctgattagagacggatccatagacctcgtcatcaacctgcccaacaataacaccaagttcgtgcatgataattacgtgattcgacgcacagcggtggattcagggatcccactcctaactaatttccaggtaaccaagctgttcgcagaggccgtgcagaagtcacgtaaggttgatagtaaatccctgttccactaccgccagtattcggccggaaaggcagct

SEQ ID NO: 43541 - DNA, 4500 bp, Artificial Sequence
  derived and/or modified sequence
atgactaggattctcacagcctttaaagttgtgcgaacattgaaaaccgggttcggatttaccaacgtcaccgcccaccagaagtggaagtttagtcgcccggggattagactgttgtctgttaaggcccaaaccgcccatatcgtgttagaggacgggactaagatgaaggggtatagctttggccatccttccagcgtagctggagaggtagtatttaacacagggctagggggataccctgaagcaatcaccgacccagcatacaaaggccagattctgacaatggccaacccaataatcggtaacggtggcgcaccagacactaccgccctcgacgaactgggcctctccaagtacttggaatctaacgggataaaggtttccggtctcttggtgctggactactcaaaggattataaccactggctggccacaaagtccctcggtcaatggctgcaggaggaaaaagtgcccgcaatttacggcgtggacacgcgaatgttaacaaagatcatccgggacaagggaactatgcttggtaaaattgagttcgaagggcagcccgtggatttcgtggatcccaacaagcaaaacctcatcgcggaagtaagcacgaaggatgtcaaggtgtatggcaagggcaatcccacaaaggtggtggccgtcgactgcggtattaaaaacaacgtgatacggcttctcgtgaagagaggagccgaagtacacctcgttccctggaatcatgattttacgaagatggagtatgacggcatccttattgccgggggccccggcaacccagccctagcagaaccgctgattcagaacgtaagaaaaatcctcgagagtgacagaaaggagcctctgttcgggatatctacaggcaatcttataacaggcctggccgctggcgctaaaacctataagatgtcaatggccaatagaggacagaatcaaccagtgctgaatatcacaaataaacaggcttttatcaccgcccagaatcacggatatgcacttgataatacacttcccgctggatggaaaccactatttgtgaacgtgaacgaccagaccaatgagggcataatgcatgaatccaaacctttctttgccgtacagtttcaccctgaagtcacaccagggcccatagacaccgaatacctgttcgatagcttcttctccttgattaagaagggtaaagcaactacaatcactagcgtccttcccaaaccggccctcgtggcctctcgggtggaggtctccaaggtgctcatcctcgggtccggcggactttccatcgggcaggctggggaattcgattactcgggttctcaggcagtcaaggccatgaaggaggaaaatgtcaagacggtcctgatgaatcctaacatcgcaagcgtgcaaactaatgaagtcggcctgaagcaggctgacactgtctacttcttgcccatcacacctcagtttgtcaccgaggtgatcaaggcggaacaacccgatgggttgattcttggtatgggaggacagaccgctcttaattgcggggttgaactttttaaacgtggtgtcttgaaagagtatggcgtgaaggttttgggaacatctgttgaatccatcatggcgacagaagatagacagttgttcagtgataaactcaacgagattaatgagaaaatcgcaccctccttcgcagtggaatcaattgaggacgccctgaaggccgcagacaccatcggttacccagtaatgatcagatccgcttacgctctgggcgggttgggctcaggtatatgccctaatcgggagactctcatggacttgtctactaaggcattcgcgatgaccaatcaaatactcgtagaaaagtctgtcacaggctggaaggagatagagtatgaggttgttcgcgatgcagatgataattgtgtgacagtgtgcaatatggagaatgtggatgcaatgggagttcacactggggatagtgtggtcgttgctcctgctcagaccctgagtaacgctgagttccagatgcttagacgaactagcattaatgtagtgaggcacctaggtatagttggtgagtgcaacatccagtttgcccttcatcctacttcgatggagtattgcatcatcgaggtgaacgcccgacttagcaggtcttctgctttggcatccaaagccacaggatacccacttgcctttattgcggcaaagattgcactagggatcccacttcctgagatcaaaaatgtggtcagcgggaagacttctgcttgctttgaacccagcctggactacatggtcaccaaaattccaaggtgggatttagataggttccatgggacctctagtaggatcggtagtagcatgaaatccgtgggtgaagtcatggcaatcgggcgtaccttcgaggagagcttccagaaggccttacgtatgtgtcacccgtccattgaaggcttcactcctcgactgccgatgaataaggaatggccgtccaacctcgacctgcgtaaggagttgagcgaaccctcctccacgcgaatctacgccatagctaaagccatcgacgataacatgtcccttgacgagatcgaaaagctgacttatatcgacaagtggtttctttataagatgagggacatcttgaatatggaaaagactctgaagggtctgaatagtgagtccatgaccgaggagactctaaagagagccaaggagatcggtttttctgacaaacagatcagcaagtgtctcggactgactgaagcccagactcgagaactgagattgaagaagaacatccacccgtgggttaagcagatcgatacactagccgccgagtacccctccgtgacaaactacctctacgtgacatacaacggacaggaacacgacgtgaacttcgatgaccacggcatgatggttttgggttgtggcccttaccatattggcagtagcgtggagtttgactggtgtgcggtgagctctattagaaccctgcgacagctgggaaaaaagacggtcgtagtgaattgcaatcccgagactgtgtccactgatttcgacgaatgtgataagctgtacttcgaggaactttccctcgaacgaattctggacatctatcaccaggaagcatgcggagggtgcatcatcagtgtaggtggtcaaatccccaacaatctcgcagttccattatataaaaatggcgtcaagatcatgggaactagccctctccagatcgatcgagcggaagaccgatcaatcttttccgccgtcttggatgaactgaaggtggcacaggccccgtggaaagcagttaatacactcaatgaggcattggagttcgctaagagtgtggattatccctgtctgctccgccccagttacgtgctgtcaggatctgctatgaatgtggtcttctccgaggatgaaatgaagaagtttcttgaagaagcgacccgagtgagtcaagaacacccagttgtgctcaccaaattcgtcgagggagctagggaagtggagatggacgctgttggaaaggatggcagggtgatcagccacgcaatatccgagcacgtggaagacgcaggtgtgcattcaggggatgccacactcatgttaccgacccagacaatttcacagggggccatcgaaaaagtgaaggacgcgactaggaaaatcgccaaggcctttgcgatctccggccctttcaatgtgcagttcttagtgaaaggtaacgacgtcctggtcattgagtgcaatcttcgcgccagtcgatcattcccctttgtatctaagaccctcggtgtcgacttcattgacgttgcaaccaaggtaatgattggggagaacgtcgacgaaaaacatctgccaactctggaccatcccatcattccagctgattatgtggctatcaaggctcccatgtttagttggccccggctccgcgatgctgacccgatattaaggtgcgagatggcctccacaggcgaggtagcctgctttggcgaaggaatacatacagcgttcctgaaagctatgctcagcactggattcaagataccccaaaagggtatactcatcgggatacagcagagcttccgtccgcgatttctcggggtcgccgagcagcttcataacgagggcttcaagctattcgccactgaagccaccagtgattggctgaacgcaaacaatgtcccagctactcccgttgcatggccgtcccaggagggccagaacccctccctgagctctataaggaagctgatccgagatgggagcatcgatctggtgataaacctgcccaacaataataccaagtttgttcacgataattacgtaatcaggaggaccgcggtcgactccggcatcccattgttaactaatttccaggtgacaaaactgttcgcggaggccgtgcaaaagtcacgcaaggtggactccaaaagtcttttccactacaggcagtattccgcaggaaaagcggcg

SEQ ID NO: 43542 - DNA, 4500 bp, Artificial Sequence
  derived and/or modified sequence
atgactagaatactcacggccttcaaggtggtgcgaactctgaagacaggattcggatttaccaatgtgacggcacaccaaaagtggaaattttccaggcccggcatcaggctactgtctgtaaaagcacagacagctcatatcgttcttgaagacgggactaaaatgaaaggttattcctttggccatccctcttctgtggccggagaagtggtattcaatactggccttggcgggtatccagaggctatcacggatccggcctacaaagggcaaattttgacaatggccaatccaataatcggcaatggtggtgccccggacacaaccgcattagacgagctgggcctgagtaagtacctagaatcaaacgggataaaggtttcgggacttctggtcttagactattccaaggattataaccactggctagcaactaaatctttaggccagtggctgcaggaagagaaagtccccgccatttacggggtggatactcggatgttgaccaaaataatcagagataagggcaccatgctggggaaaattgaattcgaaggacaacccgtcgacttcgtcgatccgaacaaacagaacctgatcgcagaggtgagcacaaaagacgtgaaggtatacggtaagggaaatcccacaaaagtcgtggcggtggattgcgggatcaagaacaacgtgatcaggcttctagtgaaacgcggggcagaggtacacttagtaccttggaaccatgacttcacaaagatggaatacgatgggatccttattgcaggaggtccaggcaatcctgccttggcggaaccattaatccagaatgttcgcaagatcctcgagagtgaccgcaaggagcccctttttggtatcagcacaggaaaccttataaccgggctggcagcgggagccaagacttacaagatgtccatggcaaatcgcggacaaaaccagcccgttctgaatatcactaacaaacaggcctttattacggcgcagaatcacggctacgctctagacaatactctcccagcagggtggaagccattgtttgtgaacgtcaatgaccagacaaacgagggcattatgcacgaatcaaagccctttttcgccgtacagttccatcccgaggtgacccccggacccattgacaccgagtatctattcgacagctttttctccctcataaagaaaggcaaggctaccacgattacaagcgttctgccgaagcccgcactcgttgctagccgagtagaagtgtcaaaggtgctcattctcgggtcaggcggacttagcatcggtcaggcaggagagttcgattatagtgggtcccaagccgtgaaagcaatgaaggaggagaacgtgaaaaccgtgttaatgaatcccaacatagcaagcgttcaaacaaacgaagttgggctgaaacaggcagacactgtttattttttgcctataacgccgcagttcgtcacggaagtgattaaggccgaacagcctgacggactgatcctagggatgggcggccaaacagcactaaactgtggagtggaacttttcaagcggggtgttttgaaggagtatggggttaaggtcttgggcacctcagttgagtcaatcatggccacagaggaccgtcaactgttttccgacaaactgaacgagattaatgaaaagatagctccaagtttcgcagtggaatcaattgaggatgccctgaaggccgctgataccattggctaccccgtaatgataaggagcgcatacgcactagggggactcggatcaggtatatgtccaaaccgcgagactcttatggacctttccaccaaagcttttgccatgaccaatcagattctggtggagaagagtgtcacaggatggaaagagatagagtacgaagtggttcgcgatgcagacgataattgtgtgaccgtatgtaacatggagaacgtggatgctatgggggtccacactggggactccgtggtggtagccccggcacaaacactttccaacgccgaattccagatgctgcggcggactagcatcaatgttgtcagacatctgggtattgttggtgaatgtaatatccagttcgcactgcatcctacaagcatggagtactgtatcattgaagttaacgcccgactctcccgcagctccgcacttgcgagcaaagcaactgggtacccacttgcgtttattgcggccaaaattgctttagggatacccttgccagagataaaaaacgtggtatctggcaagaccagtgcttgttttgaaccaagtctcgactatatggttacaaaaatacccagatgggatctcgacagatttcacggaacctcgtcccgcattggctcatccatgaaatccgtaggcgaggtgatggcaataggtaggacattcgaagagtccttccagaaagccctgcggatgtgtcatccctctattgaagggttcaccccccggctgccaatgaacaaggaatggccctctaatctcgatctgcgcaaggaactctcggagcctagtagcacgcggatctatgctatcgctaaggccatagatgacaacatgtccttggatgaaatcgagaagctgacttacattgacaagtggtttctgtacaaaatgagggatattttgaacatggaaaaaacactaaagggactgaatagcgaatccatgactgaagagacactgaagcgcgcaaaggaaattggattttctgacaagcagatctctaagtgtctcggactcacggaagctcagacccgagagcttcggctgaagaagaatattcacccctgggtcaaacagatcgacacacttgcggcagaatacccttctgtgactaattatctctatgtgacctacaatgggcaggaacacgacgtaaactttgacgaccatgggatgatggtactaggatgcgggccttatcacatagggagcagcgtagagtttgattggtgcgccgtatcatcgatcagaacactgcggcagctgggcaagaaaacagtcgtggtgaactgtaaccctgaaacagtgagcactgacttcgacgaatgcgataaactctatttcgaggaactgagcctcgagcgtatcctcgacatctaccaccaggaggcctgtggcggttgcattattagtgttggcggtcagattcccaacaacctggcagtcccactctacaaaaacggcgtaaaaatcatgggcacttcaccactccaaatcgaccgggctgaggataggtctatttttagtgcggtcctggatgaactgaaggtggcacaggcgccttggaaggctgtgaataccctcaacgaggcattggagtttgcaaagtccgtcgactacccctgtctactgagaccgtcatatgtccttagtggatccgcaatgaacgtcgtttttagcgaggacgagatgaagaagtttcttgaggaagccacaagggtctcccaggagcatccagtggttctaactaagttcgtggagggcgctcgcgaggtcgagatggatgctgtgggaaaggatggtagagtgatctcccacgcgatctccgagcatgttgaagacgcaggcgtgcattctggggacgccacactcatgcttccgactcagacaatttcacaaggcgcaattgagaaggtcaaagacgctacgaggaagattgcgaaagcctttgcgattagtggccctttcaacgtgcagtttctcgtcaagggcaatgatgtcttagtcatagaatgcaatctgagggctagcagaagtttcccattcgtgtctaagacactgggcgtcgactttatcgacgtagccaccaaagtgatgattggagaaaacgttgacgagaaacaccttccgacactggatcatcctataatcccagccgattacgtggccattaaagccccaatgtttagttggccgagactaagagacgctgatccgatactgcgctgcgagatggctagcacgggagaggtagcttgctttggagaaggcatccatacagctttcttgaaggcgatgctgtccacaggttttaagatccctcagaaggggatcctaataggcatccagcagagttttagacctagatttctcggcgtcgccgagcagctgcacaacgagggcttcaagctcttcgctacggaggccacaagcgactggttaaacgcgaacaatgtgccagccacaccagttgcctggcctagccaggagggacagaaccccagtttgtcctcaattcgcaagcttattcgcgacgggtcaattgatttagtgataaacctgcctaacaataatacgaaatttgtgcatgacaattacgtcattcgccgcaccgccgtcgactctgggatccccctactcacaaattttcaagtcactaaactttttgcagaggccgtgcagaagagcaggaaggttgatagtaagtcgctgtttcactacaggcaatactccgccggcaaggcagcc

SEQ ID NO: 43543 - DNA, 4500 bp, Artificial Sequence
  derived and/or modified sequence
atgacgcgcatcctaacagccttcaaagtcgtgcggactctgaagactggctttggtttcactaatgtcacagcacatcaaaaatggaagttctcccgccctggcattagactgctgtctgtgaaggctcaaactgcacacattgttctggaagacggcactaaaatgaaaggctacagtttcggtcacccttcgtcagtggcaggcgaggtcgtgttcaacaccggactgggcggatatccggaagcaatcacagatccagcatacaagggccagattctgacaatggccaaccctataattggcaatggcggggccccagacactactgccttggacgagcttgggctctccaaatatctggaaagcaacggcatcaaagttagcggactgctagtgctggattactccaaggattataatcactggctcgcgacgaagtctctcgggcagtggctgcaggaggagaaggtgcccgctatctatggggtggacactagaatgctaacaaagatcatccgggacaaaggtacaatgctcggcaaaattgagttcgaggggcagcccgtggactttgtggaccctaacaaacagaatctgatcgccgaggtcagcacaaaggatgtgaaggtgtacgggaaagggaaccccacaaaagttgtggccgtggattgcggtattaagaataatgtgatccgattgcttgtgaagcggggtgctgaagtgcaccttgttccgtggaatcacgattttacaaaaatggagtatgatggaatacttatagcggggggccctggcaaccccgcattagccgagcctctgatccaaaatgttcgcaaaatcctagagagcgataggaaggaacctctattcggcatttctaccgggaacctgatcacaggactcgctgcaggggctaaaacctataagatgagcatggccaacagaggacagaaccagcccgtcctgaacattaccaataagcaggcgtttataactgctcagaatcacggctacgcacttgataacaccctcccggcaggatggaagcctcttttcgtgaatgttaatgaccaaaccaacgaagggatcatgcacgagtctaagccctttttcgccgttcaattccatccggaggtgacgcctggaccgatcgatacagagtacctgttcgattctttcttctccctgatcaagaagggcaaggccaccacaatcacgtcagtgctgcctaagcctgctctggttgcttctcgggtggaagtcagtaaggtgttaatcctggggtctggcggactgagcatcggccaagccggggagttcgactactccgggagccaggccgttaaagccatgaaggaggaaaatgtgaagaccgtactaatgaaccccaatatagccagtgtgcagaccaatgaggtaggcttaaagcaggcagataccgtgtatttcctccctatcacaccccaattcgtcaccgaggtgattaaagcagagcagcccgatggcctgattttgggtatgggggggcagaccgctctgaattgtggcgttgagctctttaaaagaggtgtgttaaaagagtacggcgtgaaggtgctcggcacctcagtggagtccataatggcaactgaggatcggcagctcttctctgacaagctcaacgaaattaacgagaaaattgcaccttctttcgcagttgagtcgatcgaggacgccctcaaagccgcagatacaataggatacccagtgatgatccgatctgcctacgccttgggggggttgggatcaggaatatgtccaaatcgggagaccctgatggacctttccacaaaggcatttgccatgactaatcagattttagtggagaagtcagtaacaggatggaaagaaatcgagtacgaagtcgtgcgggatgcggacgacaactgcgtcacggtgtgtaacatggagaatgttgatgcgatgggtgtacacacaggtgactctgttgtggttgcacccgcccagactctgtctaacgcagaatttcagatgcttcgccggactagtataaatgttgtgcgccatctaggaattgttggtgaatgtaatatccagtttgccctccaccccacttctatggagtactgtattatagaagttaatgccaggctgagtcggtcaagcgcccttgcctccaaggccacaggttatccgctggccttcatcgctgcaaaaatcgcgctgggaatccctttgcctgaaatcaagaacgtggtgtccgggaaaacaagtgcctgctttgaaccatcgctggactacatggtcaccaaaatcccacggtgggatctcgatcgttttcatggtactagtagcaggatagggtcctccatgaagtcggtaggcgaagttatggccatcggaagaaccttcgaagaaagctttcaaaaggctctgcggatgtgccacccctctattgagggctttaccccgcggctgcccatgaacaaagagtggccctccaatctagatttgcgaaaggagctgagcgagcccagctcaacacgaatttacgcgattgcaaaggctatcgacgataacatgagcctagacgaaatcgagaaactcacatatatcgataaatggtttctgtacaaaatgagagacattctcaacatggagaaaactttaaaaggcctgaactctgagagcatgaccgaggagacgctgaaaagagctaaggagattggcttttccgataaacagatttccaaatgtctaggtttaacagaggcccaaacacgggaactcagactgaagaagaacattcacccctgggttaaacaaattgacacacttgcagcggaatatccttcggtcaccaattacctgtacgtgacttacaacggtcaagagcatgacgtgaacttcgatgaccacgggatgatggtactggggtgtggaccataccacatcggttcctccgttgaatttgactggtgtgctgtatcaagcatcaggaccttgagacaactgggcaagaaaactgtggtcgtgaactgcaatcctgaaactgtgtctaccgacttcgacgagtgtgataaactatacttcgaggaactcagcctcgagcgtatcctagacatctaccatcaagaagcgtgcggggggtgcatcatatctgtcgggggacagatcccaaacaacctggccgttccactctacaagaacggggtgaagatcatggggacctctccactgcaaatcgaccgggccgaggataggagtatttttagcgccgtattggacgagctcaaagtggcccaggctccgtggaaagctgttaatacccttaacgaggccttggaatttgctaagagtgtcgactacccctgcttacttagaccctcttatgtgcttagcggcagtgccatgaacgtggtcttttcagaggatgagatgaagaaatttttagaagaagcaaccagggtctcccaggagcaccccgtggttcttaccaaatttgttgagggagcaagggaagtggaaatggacgccgtggggaaagacgggcgagtcatctcccatgcaatttctgaacacgtggaagatgccggagttcactctggggatgctaccctgatgttgccaacccaaactatatctcaaggtgcgattgagaaagtcaaggatgccactcgaaagatcgctaaggccttcgccataagtggtccgtttaacgttcagtttcttgtcaagggaaatgacgtcctggtaattgaatgtaatctgcgtgcgtcccgcagctttcccttcgtgagcaagactttgggcgtcgatttcatagatgtggccactaaggtaatgattggagagaatgttgacgaaaaacatctgccaacgttggatcatcctatcattcccgcggactacgtggcaatcaaagcccccatgtttagttggccccgacttagggacgccgaccctatcttacggtgcgaaatggcctccacaggggaggtggcttgctttggagagggaatacatacagcttttctgaaggccatgctaagtaccggctttaagatcccacaaaagggcatccttatcggcatccagcagtcctttcgcccccgcttcctgggggtggcagaacagctgcacaatgaggggttcaagctattcgccaccgaagcaacatcggattggctgaatgcaaacaatgtcccagctacccccgtcgcctggccctcacaggaggggcagaaccccagtctgtcgtccataagaaaactgattcgagacgggagcatcgatttggtcatcaatctccctaacaataacaccaaatttgtgcatgacaactatgtaattaggcgaacagccgtagactctggcattccactgctcacaaatttccaggtgacgaaactctttgccgaggccgtgcaaaaatccagaaaggtggacagcaaaagcttgtttcactataggcagtacagtgccgggaaggccgcc

SEQ ID NO: 43544 - DNA, 4500 bp, Artificial Sequence
  derived and/or modified sequence
atgaccagaattctgacggcttttaaagtggtgcggaccctgaagacgggatttggttttacaaacgtcaccgcgcaccagaagtggaagttctccagaccggggattaggctccttagtgtaaaagcccaaaccgcccatatagtgctggaagatggaactaagatgaagggatactctttcggccacccaagctccgtcgcgggcgaggtagtgttcaacaccggcctgggtggctatcctgaagccataacagatccagcatacaaagggcagattctcactatggccaatccgatcataggcaacggaggtgcacctgacacaacagccctggatgaacttgggttgtctaaatatctggaatcaaatgggataaaagtctctggccttcttgtgctggattacagtaaggactacaatcactggttggccacaaaatccctgggccaatggctccaggaggaaaaagtgcccgccatctatggcgtggatacaaggatgctcactaagattattagggataagggcacaatgctgggaaagatcgagttcgaaggtcagcccgtcgattttgtggaccccaacaaacagaatctgattgctgaagtgtccacgaaagacgtgaaagtgtacggtaaaggaaaccccactaaagtggtcgccgtcgactgcggcattaagaacaatgtaattagacttctggttaagcgaggggccgaagtgcatttggttccctggaatcatgactttacaaagatggagtacgatggcattctcatagcaggtggaccaggtaacccagcgctcgcagagcccctgattcagaatgtgaggaagattctcgaatctgatcgcaaggagccactgttcggcataagcaccggcaaccttatcaccgggctcgccgctggcgcgaagacatataagatgagtatggcgaaccgagggcaaaaccagccggttttgaacatcacaaacaaacaggcttttatcacagcacagaatcacggttatgctctcgataacacgctgcccgccggttggaagcctctcttcgtaaatgttaacgatcagaccaatgagggaatcatgcacgagagtaaacccttcttcgccgtgcagtttcaccccgaggttacacccgggccgatcgacaccgagtacctgttcgacagcttcttttctcttatcaaaaaggggaaagcaacaactattacaagcgtgctgccgaaaccagccttggtggcatctcgcgtggaagtaagcaaagtgctgattctgggaagcggggggcttagcattggtcaggcaggggagtttgactatagcggatctcaggccgtgaaggctatgaaggaagagaatgtaaaaaccgtgctcatgaatcccaatatagcatctgttcagactaacgaggtcggcctgaaacaggccgacaccgtgtactttctgcccattactccacaattcgtaaccgaggtgatcaaggcagaacagcccgatggcctcatactgggcatgggggggcaaactgctctgaattgcggcgtcgagctgttcaaaaggggcgtgctgaaagagtacggggtgaaggtgctgggtacgagcgtcgagagcattatggctaccgaggacagacagcttttcagcgataaacttaatgagatcaacgaaaagatcgctccctctttcgccgtggaatcaatcgaggacgcactgaaggcagccgacacgattggttaccccgtgatgatcaggtcagcttacgcactgggaggactgggctccggaatttgtccaaatcgagaaacccttatggatcttagcaccaaagcttttgccatgacaaaccagattcttgtggaaaaatccgtgaccgggtggaaggaaatcgaatatgaggtcgttagggacgccgacgacaactgcgtgaccgtctgcaacatggaaaacgtcgacgccatgggcgttcacaccggggattctgttgtcgtagcgcccgcccagacattgagcaacgcagaatttcagatgctgaggcgaacaagtattaatgtcgtccgacatctgggcatcgtgggcgagtgtaatatccagttcgctctgcacccaacatcaatggagtactgcatcatcgaagtaaatgccaggctctcacggtcctcagctctggcttccaaagcgacaggctaccctcttgcatttattgccgcgaaaatcgcactgggcatccccctccccgaaattaagaatgtggtctctggcaaaacctccgcttgtttcgagccgtccctggattacatggtgacaaagatcccaagatgggatctggaccggtttcacggcacatcatcccgcatcgggagcagcatgaagagcgtcggcgaagtgatggctattggccgcacatttgaagagtcttttcagaaggcattgagaatgtgccatccctctatcgaaggtttcacacctcgccttcctatgaacaaggagtggcctagtaacctcgatctgcgcaaggagctctctgagccatcttctacacggatctacgccatcgctaaagccattgacgacaatatgtcattggacgagatcgaaaagctgacctatatagataagtggtttctttataagatgcgagatattctcaacatggagaagacactgaaaggactcaactccgaaagtatgacagaggaaaccttgaagcgagccaaggagatcggcttctcagacaagcagatttccaagtgcctcggcctgaccgaagcccagacacgagagctgcgcctgaagaagaacatacacccctgggtgaagcagattgacacgctcgctgctgaatatccctctgtcaccaattacctctacgtgacgtacaatggccaggaacatgacgtgaacttcgatgatcatggtatgatggtcttgggatgtggcccttaccatattgggtcctccgttgagttcgactggtgtgctgtcagcagcatcagaactctgcgccaactgggcaagaagacagtagttgtgaattgcaatcctgaaacagtgagtaccgacttcgatgagtgcgacaagctttacttcgaggagttgagtctcgaaaggatactggatatctaccatcaagaggcctgcgggggttgcatcatcagtgttggcgggcagataccgaataacttggctgtgccactctacaagaacggggttaaaatcatgggaacaagcccccttcagatcgaccgggcagaggatcggagcatcttttcagcagtgttggatgaactgaaggtggcccaggccccttggaaagccgtgaatacactcaatgaggcattggaattcgcaaagtcagtagactatccctgtctccttaggcccagctacgtcctgtccggaagcgccatgaatgttgtgttcagcgaggatgagatgaagaagttccttgaagaagccacacgagtgagccaggagcacccggtcgtcctcactaagtttgtagagggcgcaagggaggtagagatggatgcagtgggtaaggatggccgcgtgatttcacatgccatcagcgagcacgttgaagacgctggtgtgcatagcggagatgcgactcttatgctgccaacccagaccatctctcagggcgctattgagaaggtgaaggacgccaccagaaagatcgccaaggccttcgccatctcaggcccattcaacgtgcaattcctggtaaagggaaacgacgtgctcgtcatcgagtgcaacctgcgcgcgagccgctcttttccctttgtttcaaagacccttggggtcgactttatcgatgtagcaactaaagtgatgattggagagaatgtggacgagaagcatctccctacactggaccatcctattattcctgcagactatgtcgcaatcaaggctcctatgtttagctggcctcgcttgcgggatgcagaccccattttgcgctgcgaaatggcttctaccggggaagtggcttgcttcggggagggcatacacactgcctttcttaaagcgatgttgagcaccgggtttaaaataccccagaaaggtatcctgatcggcatccagcagagctttcgccccaggtttttgggagtagcggagcagctgcacaacgaagggtttaaactgttcgcgacggaagcgacgtctgactggctgaatgccaataatgtgccagcgacgccagtggcatggccttctcaggaaggtcagaacccctctctcagtagtatccggaaactcatccgggatggatccatagatttggtgatcaacttgccgaacaacaatactaaattcgtgcacgataattatgtgattcgaagaacagccgtggactctgggatccccctgcttaccaacttccaggtgacaaagctgtttgctgaagccgtccagaaaagtaggaaagtggatagcaaaagcctgttccactaccgccagtatagcgcaggaaaggcggct

SEQ ID NO: 43545 - DNA, 4500 bp, Artificial Sequence
  derived and/or modified sequence
atgaccaggatcttaactgcgttcaaggtggtgcggaccctgaagaccggtttcggatttactaacgtgaccgcccatcagaagtggaagttttcgagacctggtatccggctgctttcggtgaaagcccaaaccgctcacatcgtgctcgaagacgggactaaaatgaagggatactccttcggtcatcccagctccgttgcgggggaagttgtatttaatactggactcggtggctacccggaggctattactgatcccgcctataaaggccagattttgaccatggccaaccccatcatcggcaacggtggggcacctgacaccactgctctagacgagctggggctcagcaaatatttggagtccaatggtatcaaagtgtcaggactcctcgtgctcgattactccaaggactataaccattggttagcgaccaaatccttgggccaatggttgcaggaggagaaagttccagcaatatatggggtcgacacaaggatgctcacaaaaatcatcagggacaagggaaccatgctgggcaaaatagagtttgaaggtcaacccgtggacttcgtagatcccaacaaacagaacctgattgcagaagtgtcaaccaaggacgtgaaagtgtacggaaaaggaaatcccaccaaggttgtggccgtggactgtggcattaagaataatgtcatccggctgttggtgaaaaggggggccgaggttcatctggtgccctggaaccacgactttacaaagatggaatatgatggtatcctcatcgccgggggacccggtaaccctgctctcgccgagcctctgatccagaatgtgcggaagatcctggagtcagataggaaggagcctctcttcggaatatccactggcaatctcattaccggcctggctgctggagccaagacctacaaaatgtccatggcaaatcgcggtcagaatcaacccgtgctgaacatcacaaacaagcaggccttcatcacagcccagaaccacggctacgccctggataacacgttgcccgcggggtggaagcccttgtttgtgaatgtgaacgatcaaacaaacgaaggaattatgcacgaatccaagcctttctttgctgtccagtttcaccctgaggtcacaccaggaccaattgacaccgagtacctcttcgactcattcttcagcttgatcaagaaggggaaagcaaccactatcaccagcgtgctgccgaaaccggccctggtggcctccagggtggaggtgtcaaaagtgctaattctcggctctggaggattatcgatcgggcaggccggggaattcgactattctggctcccaggccgtaaaagcaatgaaagaagagaacgttaagaccgtgttgatgaatcccaacatcgcgagcgtgcagaccaatgaagttggtctcaaacaggcggacaccgtgtatttccttcctattacacctcaattcgttacagaagtcattaaagctgaacaacctgatgggctgattctcggcatgggaggacagacagctctgaactgcggggtggagctgtttaagcgaggcgtcttgaaagagtacggagttaaagtattgggaacctccgtggaatccattatggcaaccgaggaccggcagctgttcagcgacaagcttaacgagatcaacgaaaagatcgccccatccttcgctgtagagtccatcgaagacgccctgaaagcggcggacaccataggctaccctgtcatgatccgaagtgcctatgctctgggggggctcgggtcaggaatatgtcccaatcgcgaaactctgatggatctcagtacaaaggcattcgccatgactaatcagatcttggttgagaaaagcgttactggatggaaggagattgagtacgaggttgtgagagacgctgatgacaactgtgtaaccgtttgcaacatggagaacgtggatgccatgggcgtccatactggcgattctgtggtggtggcgcccgcccagaccctgtctaatgctgagttccaaatgctgcggcgaacctctatcaacgtcgtgaggcatttgggcatagtgggtgagtgcaacatccagttcgccttacatcctacatcaatggaatattgtattattgaggtgaacgcccgcctgtcaagatcctctgctctagccagcaaagccacgggttacccactcgcctttattgcagctaagatcgcactgggcatcccccttccagaaatcaaaaatgtggtgagcggcaagacatccgcttgttttgaaccctctctggactacatggtgaccaaaataccacgctgggacctagacagatttcatggcacaagtagtaggatcggatcatccatgaagtccgtgggtgaggttatggcaatcggcagaaccttcgaagaatcgtttcaaaaggctctgagaatgtgccaccccagtattgagggcttcactcccagactgcctatgaacaaggagtggccgtctaatctggacttaagaaaggagctctcagagcccagcagcacaagaatatacgcaatagccaaggcaattgatgacaacatgagcctagatgaaatcgaaaaactcacttacatcgacaaatggtttctgtacaagatgagagatattctgaatatggagaagacgctgaagggactcaacagcgagagtatgactgaggagactctaaaaagggcgaaggaaatcggcttttcagataaacaaatctccaaatgccttggtctgaccgaggctcagactagggagctcaggctcaagaaaaatatacacccctgggtaaagcagattgacacactggccgcggagtatcctagtgtgaccaattatctgtacgtgacctacaatggccaggagcacgatgtaaacttcgatgaccacggaatgatggtgttgggctgcgggccctaccacattggttcatcggtcgaatttgattggtgcgctgtgtcttctattcggaccctgcgtcagctggggaaaaagactgttgtagtaaactgtaacccggagaccgtgagcaccgatttcgatgagtgcgacaagctgtacttcgaggagctgtccttagagagaatactggacatataccaccaagaggcatgtggtggctgtatcatctctgtcggagggcaaatcccaaacaatctggcagtccctctgtataagaacggggttaagatcatgggtacgagcccacttcagatcgaccgagcagaggacaggagcatcttcagtgccgtgctggacgagttaaaggtggctcaagccccctggaaggccgtgaatacgctgaatgaggccctcgagttcgccaaatccgtagattatccatgcctgctccgcccatcttatgtgctgtctggttcggctatgaacgtggtgttcagcgaagacgaaatgaagaagtttttggaggaagctacgcgcgtgtcgcaggagcaccctgtcgtcctgactaagttcgtcgagggagcccgcgaagtggagatggacgccgtcggcaaagatggtagagtcatctcacacgccatttccgagcacgtggaggacgcgggagtgcactcaggggacgcaacactgatgttgcccacccagactatatctcagggggccattgagaaagtgaaagatgccacaagaaagatcgcgaaagccttcgctatctcaggtcctttcaacgtgcagttcctggtcaagggtaacgacgtcttggtgatagagtgcaacctgcgtgccagccgatctttcccattcgttagcaaaaccctcggggtggacttcatcgacgtagcaactaaggttatgatcggcgagaacgttgacgagaagcatctgcctaccctggaccatccaatcatccccgctgactatgtcgctattaaagcccccatgttcagttggccacggcttcgggacgcggacccaattcttagatgcgaaatggcatctaccggcgaggtggcatgctttggcgagggtatccacaccgcttttctcaaggccatgctttctaccggctttaagatccctcaaaagggtatcctcattggcatccagcagtcctttagaccaagattccttggagtggctgagcaactccacaatgaaggttttaagctctttgccacggaggccaccagcgattggctgaacgctaacaacgttccggctacaccagtggcttggccaagccaagaaggccagaatccctctttgagtagtatccggaagttgatccgggacggctccattgacttagtcatcaatcttccgaataacaatacgaagttcgttcacgataactacgtcattaggcggactgcggtggacagcggcatacccctgctgactaatttccaggtcaccaagctatttgcagaggctgtgcaaaaatcccgaaaagtcgacagtaagtccttattccattatcgtcaatacagtgctggcaaggcagcc

SEQ ID NO: 43546 - DNA, 4500 bp, Artificial Sequence
  derived and/or modified sequence
atgacgcggatcttaaccgcctttaaggtggtgcggactttgaaaaccggctttggctttacaaacgtgaccgctcaccagaagtggaagttttctcgacctggcatccgtctgctatctgtcaaggcgcaaaccgcgcacattgtcctggaggacgggacgaaaatgaaaggctatagcttcgggcatccatcctcagtagccggcgaagtcgtattcaacactgggctcggcggttacccagaggccatcacggaccctgcatacaagggccagatcttgaccatggcgaatcccatcattggcaatggtggggcgcctgacactacagcccttgatgagctgggactctccaagtacctggagtcaaacggaattaaggtctcggggcttctggtactggactattctaaggattacaatcactggctggcaactaaaagcctgggtcagtggctgcaggaagagaaggttcctgccatctacggagttgacaccaggatgctgactaaaattatacgagacaagggaacaatgctgggcaagattgaattcgaaggccaaccagtggacttcgtcgaccctaacaagcagaacttgatcgccgaagtgtctactaaggacgtcaaggtttatgggaaaggcaatcctaccaaagtggtcgcggtcgattgtggtatcaagaataacgtcattaggctgctcgtgaagcgtggagccgaggtacatctggtaccctggaatcacgatttcactaaaatggaatacgacggcatcctgatcgcgggggggcccggcaatcccgctttggcggaacctcttatacagaacgtgagaaagatccttgaatcagatagaaaggaacctcttttcggcatctcaacaggaaacttaatcactggcctagcagccggagcaaaaacgtacaagatgagcatggccaaccgggggcagaatcagccagtgctaaatataaccaataaacaagcttttataaccgcacagaatcatggctacgcgctagataacacattacccgccggctggaagcccctgtttgtgaacgtaaatgaccagactaacgaggggatcatgcatgaaagtaaacctttcttcgcagtgcagttccaccctgaagttacgcctggtccaatagataccgagtatctgtttgattctttcttcagcctaataaaaaagggcaaggccaccacaattacctcagtgctgccgaagccagccctggtggcctcacgcgtcgaagttagcaaggtgctgattctcggttcggggggactaagcattggacaggccggagaattcgattatagtggttcgcaggccgtgaaggccatgaaagaggagaatgttaagacagtgctcatgaaccctaacatcgcttcggtccaaaccaacgaagtgggcctgaaacaggccgacacagtttattttctgcccatcactcctcagttcgtgactgaggtgatcaaagccgaacagcccgatggcctgatcctgggcatgggaggacaaactgcattgaactgtggagtcgagctgtttaaacgcggggtgctcaaggagtatggagtgaaggtgctgggcacaagtgtggaatctatcatggcgacagaggacaggcagctcttttcggataagctaaacgaaattaatgagaaaatagctccaagttttgcagtagagtccatcgaagatgcattaaaggcagccgacaccatcggttatccagtgatgatacgctctgcctacgctttgggcgggcttgggtccggaatctgtccaaatcgggagacactcatggacctgagcactaaggcgtttgcaatgacgaatcagattcttgtcgagaaaagcgtgacagggtggaaagagattgagtacgaggtagtgagggacgcggatgacaactgtgtgacagtgtgcaacatggagaacgtggatgcaatgggggttcatacaggtgactcggtcgtggtggcccccgcgcagacattgagtaacgccgaatttcaaatgctgcgccgaacctccatcaacgttgtacggcatttaggaattgttggcgaatgcaatatccagttcgcccttcacccgacttctatggaatattgcattatcgaggtaaacgcacggttaagccggtcgagcgccttggcatcaaaggctactggatatcccttagccttcatcgcagccaaaatcgctctcggaatcccactccccgagattaagaacgtggtctccggtaagacttccgcttgttttgagccctccttggattacatggtcacaaaaattccaaggtgggacctggaccgctttcacgggacatcctctcggattggctccagtatgaaaagcgtaggtgaagtgatggctatcgggaggacatttgaggaatccttccagaaagccctgcggatgtgtcacccctccattgaggggtttaccccgaggctgccaatgaataaggaatggccttccaatctcgatctgcgcaaagaactgtcagaaccatcaagtacccgtatatacgctatcgcaaaggccattgatgataacatgtcacttgatgagatcgagaaactgacttacatcgataagtggttcctgtacaagatgcgagacatcctcaacatggagaagactcttaagggcctaaacagcgagagcatgactgaagaaaccctgaagagagcaaaggagatagggttctcagacaagcagatttccaaatgtctgggcctgacagaagcccagactcgggagctgcgcctcaaaaagaacatccacccctgggtaaaacaaatcgacacactggcagcagagtatccgtcagtaacgaattacctctatgttacctacaatgggcaggagcacgacgttaactttgatgaccatgggatgatggtgttaggatgtggaccgtatcacataggatcttcggtggagtttgactggtgtgctgtgagttccattagaacccttaggcagcttggtaagaagaccgtggtggtcaactgtaatccagaaacggtgagtaccgattttgatgagtgcgacaagctctatttcgaggagctcagtctggaacggattctggacatctatcaccaagaggcgtgcggtggatgtatcattagcgttggcggccagatacctaacaatttagcagtgcccctttacaagaacggagtcaaaatcatgggaacatcacccctccagatcgatagggcggaagaccgttctattttcagcgccgtgttggatgaacttaaagtagcccaggcaccttggaaagcggttaataccctcaacgaggcccttgagtttgcgaaaagcgtggattacccctgtctgcttcggcctagttatgtgctgtccgggtcggccatgaatgttgtgttctccgaggacgagatgaagaaatttctagaggaggccacccgggtaagccaggaacatccagtggtactgaccaagtttgttgagggggctagagaagtagagatggatgccgttggcaaggatgggcgagtgataagccacgccataagcgagcacgtggaagacgctggcgtgcatagcggggatgcgacgctgatgttacccacccagacgatttctcagggtgcaattgaaaaggtgaaagatgctactagaaaaatcgcgaaagcatttgccattagcgggcccttcaacgtgcagtttctcgtgaagggcaatgatgtcctggtgattgaatgcaatctgcgtgcaagtagaagttttccatttgtgtcaaagacactgggcgtggatttcattgacgttgccacaaaggtaatgatcggcgaaaatgtggatgaaaagcatttgcccactctggatcatcccataatccccgcagactacgtggcgataaaagcgccaatgttcagctggcctcgcctccgagacgctgatcccattctgcgctgtgagatggcctcaacgggggaggtcgcttgcttcggggagggaattcacaccgctttcctaaaggccatgcttagcactggtttcaaaatcccccagaaggggattcttattggtatacagcagtccttccgtccccgctttcttggtgtggcagagcagctgcacaacgagggatttaagctatttgccacagaggcaaccagcgattggctgaacgctaacaatgtgcctgcaactcctgtagcatggccctcacaggaaggtcagaatccttctctgtcctcgatacggaagctaattagggacggttccattgatttggtgatcaacttgccaaacaataacactaagtttgtgcatgacaactacgtcattcgtcggacagccgtagattctggaattccgctgctgactaattttcaagtgactaagttgtttgcagaggctgtgcagaagtctagaaaggtagattccaaatctctgttccactaccggcagtactcagcaggtaaggccgca

SEQ ID NO: 43547 - DNA, 4500 bp, Artificial Sequence
  derived and/or modified sequence
atgaccagaattctcactgcattcaaggtagtgcgcacactcaaaactggatttgggtttacaaatgtgacagcacaccagaagtggaagttttcgcgcccgggcatccgtttactgtctgttaaagcacagactgcccacatagttctagaagacggcacaaaaatgaagggatattctttcggtcacccttctagtgtcgcaggagaggttgtcttcaatacaggattgggtgggtaccctgaggccattacagatcctgcctacaagggccaaatactgacaatggcaaacccgattattggcaacgggggtgcaccagataccaccgccctggacgagctcgggctgagcaagtatctggagtccaatggtattaaggtatcagggctccttgtactcgactacagcaaagattacaaccactggctggccacaaaatctctcgggcagtggctccaggaagagaaagtgcctgctatatacggagtggacactaggatgctgactaagattatcagggacaaagggactatgctgggcaagatcgagtttgagggtcagcccgttgattttgtggacccaaataagcagaacctgattgccgaagttagcacaaaggatgtgaaggtgtacgggaaaggcaatcccaccaaggtggtggcagtagactgcgggatcaaaaacaacgtgatacgccttctggtcaagaggggtgccgaggtacatctggtgccttggaaccacgatttcacaaagatggaatatgatggtattttgatcgccgggggaccaggtaaccctgccctggccgagccactgattcagaacgtgcgcaagatattggagagcgaccgcaaagaacccctctttgggatcagcacaggaaaccttatcactggcctggccgctggcgcaaaaacttacaagatgagcatggcgaacaggggccagaatcaaccggttttgaatataactaacaagcaggcgtttatcacagcccagaatcacggctacgccctggataatacactgcccgccggctggaagcccctgttcgtgaatgtgaacgatcaaacaaacgaggggattatgcacgaaagtaagccgttcttcgcagtgcagtttcatccagaagtgacccctgggcctatagatactgagtacctatttgattcatttttctctttgataaagaaaggcaaggcaaccacgatcactagcgtgcttcccaagccggccttggtggcgagccgagtcgaggtctcaaaggtacttattctgggaagtggaggtctgtctattgggcaggctggcgaattcgattactccgggagtcaggcagtgaaagccatgaaggaggaaaatgtgaagacagtgctcatgaatccaaacattgcctcggtgcagacaaatgaggtaggcctgaagcaggccgacacagtgtattttctccccattaccccccagttcgtcaccgaggtgattaaggcagaacagccggatggattaatcctgggaatgggcgggcagactgccctcaactgtggagtcgagctttttaagcggggagtattgaaagaatacggcgttaaagtgctggggacatcggttgaaagcataatggctactgaggaccgacagctgttctcggataagttaaacgaaattaatgagaagatcgctccttctttcgctgttgagagcatcgaggacgctctcaaggccgccgatactattggctatccggtaatgattcggagtgcgtacgcactcggcggattgggatccgggatatgtcctaatcgagaaaccttgatggatctaagcacgaaggcgttcgcaatgaccaatcagattcttgtcgagaaatctgtgacggggtggaaggagattgagtatgaggttgttcgcgacgccgacgataactgcgtgaccgtttgcaacatggaaaacgtcgacgctatgggggtgcataccggagatagtgtcgtggtcgcccccgcacaaacactgagtaacgcagagtttcagatgctgagacgtacaagcataaatgtggtgcgacatctgggcatagtaggggaatgcaatattcagttcgctctccatcctacctctatggaatactgcattatagaagtgaatgcccggctctctcggtcttctgccctcgcatctaaagccaccggctacccgctcgcatttatcgctgccaaaatcgcgctcggcatcccactgccagagattaagaatgtggtatccggtaaaacgagcgcctgctttgagcctagtctggattacatggtgaccaagatcccgagatgggacctggacagattccacgggacgagctctaggataggtagctctatgaagtccgttggagaagtaatggcgattgggcgaacgtttgaagaatccttccagaaggctctgcgcatgtgtcacccctctatcgagggatttactccgaggctgcctatgaacaaggaatggccaagtaatctcgacttaaggaaggagctgagtgaaccgtcctcgacaaggatttatgctatcgccaaggccatcgacgacaatatgtccttggacgaaattgaaaagctgacctacattgataagtggttcctttacaagatgagagacattctcaacatggaaaaaaccctcaaagggctcaacagtgagtcgatgacagaggagactttgaagcgcgctaaagaaataggcttctctgataagcagatttctaaatgcctcgggctcactgaggctcagacccgggagctgcgcctcaagaagaacattcacccctgggttaagcagatcgataccctggccgcggagtacccgtccgttactaattatctgtacgtgacgtataacggccaagaacacgacgtgaacttcgatgatcacggtatgatggtcctcggatgtggaccctatcatatcggttcaagtgttgaattcgactggtgtgctgtttcctccataaggactctgaggcaactggggaaaaaaacagtggttgtcaattgcaatcccgagacagtgtctaccgattttgacgagtgtgacaaactttactttgaggagctcagcttagagcgaatcttagacatctatcaccaggaggcctgtggcgggtgtatcataagcgtcggcggacagatccccaacaatctggcagtcccactgtacaagaatggcgtcaaaattatgggaactagtcctctgcagatcgatcgagccgaagaccggtctatatttagtgctgtgttggacgagctgaaggtggctcaggcgccttggaaggctgtgaacacactgaatgaagctctcgagtttgccaaaagtgtggattacccttgcttgctgcgtccatcctacgttctaagcggttccgctatgaacgtcgtgttcagcgaggatgaaatgaagaaatttctagaagaagcaactcgcgtatcccaagaacatcccgtggtgctgaccaagtttgtcgagggagcccgggaggtagagatggacgccgtgggcaaggacggtcgcgtgatctctcacgctattagtgagcacgtggaggatgcaggagttcattctggagacgctacgcttatgctgcctacgcagacaatatcccagggtgccatagagaaggtaaaggatgccactcgcaagatcgccaaagcattcgcaatctctggtccctttaatgtgcagtttcttgtgaagggcaatgacgtactggttattgagtgtaaccttagagcctcgagatcattcccctttgtgagcaagactctgggagtagactttattgatgttgccactaaggtcatgattggcgagaatgtggacgagaaacatcttcctacattagaccatccaattattcctgccgactatgtggcaataaaagctccaatgttctcatggccccgtctgagggatgcggaccccatcctgaggtgcgaaatggcctcaactggtgaagtcgcttgtttcggagaggggatccataccgcttttttaaaggccatgctgagtacagggttcaaaatcccccagaaaggcatcctcattggaatccagcagtctttccgaccaagattcctcggagtggctgagcagttgcataacgagggcttcaaattatttgccactgaggcgactagtgattggctgaacgcaaataacgttcctgccacccctgttgcgtggccatctcaggaggggcagaacccctcactgtcttcgatacggaaactgattagggacgggtctatcgacctggtgatcaatctgccgaataacaataccaagttcgtgcacgacaattatgtgattcggaggaccgctgtggacagcggaattcccctcctcaccaactttcaggtgactaagctattcgctgaggccgttcagaaatctcgtaaagttgatagcaagagcttgtttcactatcggcagtattcagcaggcaaggccgcc

SEQ ID NO: 43548 - DNA, 4500 bp, Artificial Sequence
  derived and/or modified sequence
atgaccagaatcctgacagcattcaaggtggtacgcaccctcaagacggggtttggctttactaatgttacggcccatcagaagtggaaattttcaaggcctggtattcgcctactcagcgtcaaagctcagaccgcacatatcgtcttggaagatggaaccaaaatgaaaggctactcctttggacatccgtcctccgtcgccggagaggtcgtcttcaacaccgggctaggcggttacccagaggcaattacagacccagcatataagggtcagatcctgaccatggccaaccccattattggaaacggaggggcccccgacactacagctttggatgaactcggactttcaaaatatctggagagcaatggaatcaaagtaagcggcctgcttgtgctggactactctaaggactacaatcactggcttgccaccaaaagcttggggcagtggctgcaggaagagaaggtcccagccatttatggggtagacacccggatgctcaccaagatcattcgggacaaggggaccatgttgggcaagattgagtttgagggtcagcccgttgatttcgtcgatccgaataaacagaatttaatagctgaagtgtctaccaaagatgtcaaagtctacggcaaagggaatccgaccaaggtagtggccgtggactgtggcattaaaaataatgtgattcggttgttggtgaaacggggcgccgaggtccacctagtcccctggaaccacgatttcaccaagatggagtatgatggcatcctcatagcgggaggtcccggtaatcccgcgcttgcagagcccctgatccagaacgtccgtaaaatcttagaatccgataggaaagagccactgtttggcataagtactgggaatctgattaccggcctggcagcgggcgctaaaacttataaaatgtctatggcaaatcgaggacaaaaccagcccgtcttgaacataacaaataagcaggcgtttatcactgctcagaatcatggatatgcactcgataatacgcttccggcgggctggaagccccttttcgttaacgtgaatgaccagaccaacgaaggaatcatgcacgagagtaagcccttcttcgctgtccaatttcaccctgaggtcacccccggtccaattgataccgagtacctttttgattcctttttcagcctgatcaagaagggaaaagctaccactattaccagcgtactgccaaagcccgcattagtggcctctcgggttgaagtatcaaaagtcctgattctgggaagtggcggtctctcgattggccaggctggggagtttgattactcggggagccaggctgtaaaagcgatgaaggaggaaaacgtgaagacagtacttatgaaccctaatattgcctctgtccagactaatgaggttggactgaagcaggccgacaccgtgtactttctgccaatcaccccacaatttgtcaccgaagtgatcaaagcagagcagccagatggactgatcctgggaatgggcggccagaccgctctgaactgtggagtagaattattcaaacgaggagtgcttaaagagtatggcgtcaaggtgttggggacctccgtggaaagtatcatggccacggaggatcgacaactgtttagcgataagctaaacgagatcaacgaaaagatagccccaagcttcgctgttgaatcaatagaagacgcactgaaggcggcagatacaatcggttaccccgtaatgattcgaagtgcctatgctctgggcgggctgggtagtggaatttgcccgaatagagagaccctcatggacctgagcacgaaagcatttgcaatgaccaatcagattctggtcgagaaaagcgtcacgggttggaaggaaattgagtatgaagtggtaagagatgccgatgacaactgcgttactgtctgtaacatggaaaatgttgacgctatgggggtgcacaccggggatagcgtggtggtcgctcccgcacagaccctatccaacgctgagttccaaatgctgcgacgaacctctatcaatgtggttaggcacctgggaattgtgggggaatgcaatattcagttcgccctacatccaaccagtatggaatactgcatcatcgaggtgaacgcccggttgagtcggagtagtgctttggcgagtaaagccactggctaccctctcgcttttatcgcggcgaaaattgcattaggcataccattgcccgaaataaagaacgtagtgtccggcaaaacgagtgcatgtttcgagccatctctcgactacatggttactaaaatccccaggtgggaccttgatcggttccacggtacatcctctaggattgggtccagcatgaagagcgtcggtgaagtgatggcgattggaagaacctttgaggagagctttcagaaagcactgaggatgtgtcaccccagcattgaaggcttcacccctaggcttccgatgaacaaagagtggccctccaacctcgatctccgcaaggagctatcagaaccctcttcgacgcgcatctatgccattgcgaaagcaatcgatgacaacatgagcttagacgaaattgagaaattaacatacatcgataagtggttcctctataagatgcgggacatcctaaacatggagaaaaccctcaaggggctgaacagcgaaagcatgaccgaagagacattaaagagagcaaaagaaatcggcttttccgataagcaaatcagcaagtgtctgggactcacagaggcacaaactcgcgaactgcggctcaaaaagaacatacacccctgggtaaagcagatagacactctcgcagccgaatacccgtccgtcacaaactacctctatgtcacatacaatggtcaagaacacgatgttaactttgacgaccacggcatgatggtgctaggctgcggaccctatcatattgggagcagcgtcgagttcgactggtgtgcagtctcttccatcaggacacttagacagttagggaaaaaaacagtggtagtgaactgcaatccagaaaccgtttccactgatttcgatgagtgcgataagctctactttgaggagcttagccttgagagaatactggatatataccatcaggaggcttgcggcgggtgtattatatctgtgggaggacagattcctaacaatctcgcagtgccactgtataagaatggagtcaaaatcatgggaacctccccactgcagattgaccgggctgaggacagatccatctttagtgccgtgctggatgaactgaaggttgcccaggccccctggaaggcagtcaatacactgaacgaggccctggaatttgctaaaagtgtggactacccttgcctgctaaggcccagttacgtcctgagtgggtccgcaatgaacgtcgtgttcagtgaagacgaaatgaagaagtttctggaggaggccacaagagtgagtcaggaacaccccgtcgtcctgaccaaatttgtggagggagctcgggaggttgagatggacgccgtgggcaaggacggaagagtgatctcccacgcaatttccgaacacgtagaagacgcaggcgtccacagtggcgatgcaactcttatgctgcccacccagaccattagtcagggcgctatcgagaaggttaaggatgccacgcggaagattgccaaggcttttgctatctctggacctttcaatgtccagttcctcgtgaagggaaatgacgtactcgtgatcgaatgtaatttaagggcctccaggtctttcccctttgtgtctaagaccctgggggtcgattttatagacgtcgccactaaagtgatgatcggagagaacgtcgacgagaaacacttacctaccctggatcaccccatcataccagcagactatgtcgccataaaggctcctatgttcagctggcctcgcttgagagacgctgatccaatcctccgttgtgaaatggcatccaccggtgaggtggcgtgcttcggcgaggggattcacacagcgttcctaaaggccatgctcagcacaggattcaagatccctcagaaagggattttgattggcattcagcagagcttccggcctcggttcctcggcgttgctgagcaactccacaacgaggggttcaaactcttcgcgactgaggccacatccgactggctgaatgctaacaatgtgccagctactcccgtcgcctggccgagccaggagggacagaaccccagcctgagtagtattcgcaaactcatccgtgacggttctattgacctggtgataaatctgccgaacaataatacaaagttcgtccatgataactacgtgattaggaggacagcagtggattccggtattcctttgctgactaactttcaggttactaagcttttcgctgaagccgtgcaaaaaagtcggaaagttgacagtaagtccctatttcactaccggcagtactccgccgggaaagccgcc

SEQ ID NO: 43549 - DNA, 4500 bp, Artificial Sequence
  derived and/or modified sequence
atgacgcgcatccttacagcctttaaagtggttcggactcttaaaaccggattcgggttcactaacgtgactgcccaccagaagtggaagttctcgagaccgggtattcggctgcttagcgtgaaggcgcagactgcacacatcgttctggaggacgggacaaagatgaaaggctactcctttgggcacccatctagtgtagccggcgaagtggtctttaatacagggctgggaggatatcctgaggcgatcacagatcccgcttacaaaggacagatcttaaccatggctaacccaataatcgggaacgggggtgctcctgacaccaccgcactagatgagttagggctgtctaagtaccttgaatccaatgggatcaaagtgagtggcctcttggtgctggactactctaaggattataaccactggctggctacgaaatctctgggacagtggttacaggaagagaaagtgcccgcgatctacggagttgacacccggatgttaaccaagatcatccgcgacaagggaactatgctgggcaagatcgagttcgaaggccagcccgtggattttgtggacccgaacaaacagaatttgatcgccgaagtcagcaccaaggatgtgaaagtttatggaaaaggaaatccaacaaaagtggtggcagttgattgcggcattaaaaacaatgttatccggctcttagtaaaacgtggggctgaggtgcatctggtgccatggaatcacgatttcacaaaaatggaatatgatggtattttgattgcaggtggccctggtaatcccgctctggcagagccactgatccagaacgtgaggaagattctcgaaagtgatcggaaggagccactcttcggcatatccaccgggaatctgatcacaggactcgccgcaggcgctaaaacgtacaagatgtccatggccaatcggggacaaaaccagccggtcttaaatatcactaataaacaagctttcatcaccgctcagaaccatgggtacgccttggacaacactctgcccgccgggtggaagccgctgttcgtgaacgtgaatgatcagacaaatgaagggatcatgcatgagagtaagcctttcttcgcagttcaatttcatccggaagttacccctggccccatcgacacagagtatctgtttgattcatttttctccctgattaagaagggaaaagccacaactataacttcggtactgcctaagccagccttggtggcttcccgggtagaagtctctaaggtattgatactcggatccggtggcctgtcaattgggcaggccggcgagttcgactactccggaagccaagcagttaaggcgatgaaggaagaaaatgtgaagaccgttctgatgaaccctaacatcgcgagcgtccagaccaatgaggtgggactgaagcaggccgacacggtgtacttcctgccaattactccccagtttgttaccgaagtaataaaagccgagcaacccgatgggctgatcctggggatgggcggccagacagcactgaactgtggtgttgaactttttaaacggggcgtgcttaaagaatatggggtgaaggttttggggactagcgtggaatcaattatggcaactgaggacagacagcttttctcggataagctgaatgagatcaatgagaagatagccccttcttttgccgtcgaaagcattgaggatgcactgaaggctgccgatacaatcggttaccccgtcatgatcagatccgcatatgcccttggagggctgggatctggtatttgccctaaccgcgagactctaatggacctgagtacgaaggctttcgccatgaccaatcaaatattggttgagaaatcagtgaccggatggaaagagattgagtatgaagttgtgagagatgccgacgataactgcgtaaccgtctgcaatatggagaacgtggacgctatgggggtccacacaggcgactctgtggtggtggcccccgctcaaactctcagcaacgccgaattccagatgctcaggaggacctccattaacgtcgtgaggcacctcggcattgtcggcgagtgcaatatccaatttgcactgcacccaacgtccatggaatattgcataatcgaagttaacgcccgcctctccaggtcatcggccctggcgtccaaagcaacaggttaccccctcgccttcatagctgccaaaattgccttgggtatcccattgccagaaatcaagaatgtcgtgagcggaaaaacatccgcctgttttgagcctagcctagattacatggtcactaaaatacctcgttgggatctggacagattccatgggacgtctagccgtatcggaagttccatgaaatccgttggggaggttatggcgatcgggcgaacattcgaggaaagttttcagaaggccctgaggatgtgccacccaagtatagaggggttcacaccaagactcccaatgaacaaagagtggcctagcaacttggacttgcgcaaggagctctcggaacctagctctactcgaatctacgctatcgccaaggccatcgatgacaacatgagcctagacgaaatcgagaagttaacctatattgacaagtggtttttgtacaaaatgcgtgacatcctgaacatggaaaagacgcttaaaggccttaactctgagtccatgactgaggagaccctgaaacgagctaaggagatcgggttttcagataagcagatcagcaagtgcttagggcttacagaggcccaaacacgggagttgcgtctcaaaaagaacatccacccatgggtcaagcagatcgacaccttggcagccgaatacccttctgtgacaaattatctgtatgtgacttataacggtcaagaacacgatgtgaactttgatgaccacggcatgatggtgctgggttgtggaccatatcatattggatcttctgtggaattcgactggtgcgcagtctcgtcgatccggacacttcggcagcttggaaagaagaccgtggtggtcaactgcaatcccgaaactgtctccacagacttcgacgagtgcgataaactgtattttgaggagctgtctttggagagaatcctggacatctaccaccaagaagcatgcggcggatgtatcatatcagtaggaggacagattccaaacaacctggccgtgcctctctataaaaacggcgtgaagatcatggggacgtctcccttacagattgacagagctgaggaccggtctatatttagtgctgtgctggacgagttgaaagttgcgcaggcaccctggaaggctgttaacaccttgaacgaagctcttgaatttgctaagtccgtagactatccctgccttctccggcccagttatgtgttgagcgggtccgccatgaatgtcgtgttcagtgaggacgagatgaagaagttcctggaagaagccacccgcgtcagccaagaacacccagtcgttctcacaaaatttgtcgagggggcccgcgaggttgagatggatgccgtaggaaaagatggtagagtgatttcgcacgcgattagcgagcacgtggaagacgcaggtgttcactccggcgatgccacactcatgctgcccacacagacgatatctcagggagccattgaaaaggtaaaggatgctacacgtaaaatcgctaaggcatttgccatttctggtccttttaatgtgcaattcctggtcaagggcaatgacgtgttggtaattgagtgtaatctgcgggcttcccggtcgttcccctttgtctcgaagacgctgggcgtggactttatcgatgtggccaccaaggtgatgattggggagaatgtcgatgagaaacatttgccaacgctggaccaccctatcataccagccgactatgtggctatcaaggccccgatgttcagttggcctagattacgcgatgctgatcctatcctgagatgcgagatggccagtactggcgaggtggcctgttttggggaggggatccacacggcttttctgaaggccatgctctctactggctttaagatcccccagaagggaatcctgattgggatccaacagtctttccggccacgctttttgggcgtggcggagcagttgcataatgaaggctttaagttgtttgctactgaggccacatccgactggctgaacgctaacaacgtgccagcgaccccagtagcttggccgtctcaggaaggacagaacccaagcctctctagtattcgcaaactgatacgggacggctccatagatctcgtgattaatttgccaaataataatactaaattcgtccacgataattatgtcattcgtaggacagctgtcgactctgggatcccgttgctcactaactttcaagtgacaaagttgttcgccgaagccgttcagaaatcacgcaaggtggactccaaaagcctgtttcattacaggcagtatagtgccgggaaggcagct

SEQ ID NO: 43550 - DNA, 4500 bp, Artificial Sequence
  derived and/or modified sequence
atgacgcgaatactaacggcgtttaaagtagtacgaacgttaaaaacgggttttggttttacgaatgtaacggcgcatcaaaaatggaaattttcgcgaccgggtatacgtctactatcggtaaaagcgcaaacggcgcatatagtattagaagatggtacgaaaatgaaaggttattcgtttggtcatccgtcgtcggtagcgggtgaagtagtatttaatacgggtctaggtggttatccggaagcgataacggatccggcgtataaaggtcaaatactaacgatggcgaatccgataataggtaatggtggtgcgccggatacgacggcgctagatgaactaggtttatcgaaatatctagaatcgaatggtataaaagtttcgggtctactagtactagattattcgaaagattataatcattggttagcgacgaaatcgttaggtcaatggttacaagaagaaaaagtaccggcgatatatggtgtagatacgcgaatgttaacgaaaataatacgtgataaaggtacgatgttaggtaaaatagaatttgaaggtcaaccggtagattttgtagatccgaataaacaaaatctaatagcggaagtatcgacgaaagatgttaaagtatatggtaaaggtaatccgacgaaagttgtagcggttgattgtggtataaaaaataatgttatacgtttactagtaaaacgaggtgcggaagtacatttagttccgtggaatcatgattttacgaaaatggaatatgatggtatactaatagcgggtggtccgggtaatccggcgctagcggaaccgctaatacaaaatgttcgaaaaatattagaatcggatcgaaaagaaccgctatttggtatatcgacgggtaatttaataacgggtttagcggcgggtgcgaaaacgtataaaatgtcgatggcgaatcgtggtcaaaatcaaccggtactaaatataacgaataaacaagcgtttataacggcgcaaaatcatggttatgcgttagataatacgttaccggcgggttggaaaccgttatttgttaatgtaaatgatcaaacgaatgaaggtataatgcatgaatcgaaaccgttttttgcggtacaatttcatccggaagtaacgccgggtccgatagatacggaatatctatttgattcgtttttttcgttaataaaaaaaggtaaagcgacgacgataacgtcggtattaccgaaaccggcgttagtagcgtcgcgagttgaagtatcgaaagttttaatattaggttcgggtggtttatcgataggtcaagcgggtgaatttgattattcgggttcgcaagcggtaaaagcgatgaaagaagaaaatgtaaaaacggtattaatgaatccgaatatagcgtcggttcaaacgaatgaagttggtctaaaacaagcggatacggtatattttctaccgataacgccgcaatttgttacggaagtaataaaagcggaacaaccggatggtctaatactaggtatgggtggtcaaacggcgttaaattgtggtgtagaattatttaaacgtggtgtattaaaagaatatggtgtaaaagttttaggtacgtcggtagaatcgataatggcgacggaagatcgacaattattttcggataaattaaatgaaataaatgaaaaaatagcgccgtcgtttgcggttgaatcgatagaagatgcgctaaaagcggcggatacgataggttatccggttatgatacgatcggcgtatgcgttaggtggtctaggttcgggtatatgtccgaatcgtgaaacgctaatggatttatcgacgaaagcgtttgcgatgacgaatcaaatactagttgaaaaatcggtaacgggttggaaagaaatagaatatgaagttgttcgtgatgcggatgataattgtgtaacggtatgtaatatggaaaatgtagatgcgatgggtgttcatacgggtgattcggtagtagtagcgccggcgcaaacgctatcgaatgcggaatttcaaatgttacgacgaacgtcgataaatgtagttcgacatttaggtatagtaggtgaatgtaatatacaatttgcgctacatccgacgtcgatggaatattgtataatagaagttaatgcgcgtctatcgcgatcgtcggcgttagcgtcgaaagcgacgggttatccgctagcgtttatagcggcgaaaatagcgctaggtataccgttaccggaaataaaaaatgtagtatcgggtaaaacgtcggcgtgttttgaaccgtcgctagattatatggtaacgaaaataccgcgttgggatttagatcgttttcatggtacgtcgtcgcgtataggttcgtcgatgaaatcggttggtgaagtaatggcgataggtcgaacgtttgaagaatcgtttcaaaaagcgctacgaatgtgtcatccgtcgatagaaggttttacgccgcgtttaccgatgaataaagaatggccgtcgaatttagatctacgtaaagaattatcggaaccgtcgtcgacgcgaatatatgcgatagcgaaagcgatagatgataatatgtcgttagatgaaatagaaaaattaacgtatatagataaatggtttttatataaaatgcgtgatatactaaatatggaaaaaacgctaaaaggtttaaattcggaatcgatgacggaagaaacgctaaaacgtgcgaaagaaataggtttttcggataaacaaatatcgaaatgtctaggtttaacggaagcgcaaacgcgagaactacgtttaaaaaaaaatatacatccgtgggtaaaacaaatagatacgttagcggcggaatatccgtcggttacgaattatttatatgtaacgtataatggtcaagaacatgatgtaaattttgatgatcatggtatgatggttttaggttgtggtccgtatcatataggttcgtcggttgaatttgattggtgtgcggtatcgtcgatacgtacgttacgtcaattaggtaaaaaaacggttgtagtaaattgtaatccggaaacggtatcgacggattttgatgaatgtgataaactatattttgaagaactatcgctagaacgaatactagatatatatcatcaagaagcgtgtggtggttgtataatatcggtaggtggtcaaataccgaataatttagcggtaccgttatataaaaatggtgtaaaaataatgggtacgtcgccgttacaaatagatcgagcggaagatcgttcgatattttcggcggtactagatgaactaaaagtagcgcaagcgccgtggaaagcggtaaatacgctaaatgaagcgttagaatttgcgaaatcggttgattatccgtgtttactacgtccgtcgtatgttttatcgggttcggcgatgaatgtagtattttcggaagatgaaatgaaaaaatttttagaagaagcgacgcgagtatcgcaagaacatccggtagttttaacgaaatttgttgaaggtgcgcgagaagtagaaatggatgcggttggtaaagatggtcgtgtaatatcgcatgcgatatcggaacatgttgaagatgcgggtgtacattcgggtgatgcgacgctaatgctaccgacgcaaacgatatcgcaaggtgcgatagaaaaagtaaaagatgcgacgcgaaaaatagcgaaagcgtttgcgatatcgggtccgtttaatgtacaatttctagtaaaaggtaatgatgttctagtaatagaatgtaatctacgtgcgtcgcgttcgtttccgtttgtatcgaaaacgttaggtgttgattttatagatgtagcgacgaaagttatgataggtgaaaatgtagatgaaaaacatttaccgacgttagatcatccgataataccggcggattatgtagcgataaaagcgccgatgttttcgtggccgcgattacgtgatgcggatccgatattacgatgtgaaatggcgtcgacgggtgaagtagcgtgttttggtgaaggtatacatacggcgtttctaaaagcgatgttatcgacgggttttaaaataccgcaaaaaggtatattaataggtatacaacaatcgtttcgtccgcgttttttaggtgtagcggaacaattacataatgaaggttttaaattatttgcgacggaagcgacgtcggattggttaaatgcgaataatgtaccggcgacgccggttgcgtggccgtcgcaagaaggtcaaaatccgtcgctatcgtcgatacgtaaactaatacgagatggttcgatagatttagtaataaatttaccgaataataatacgaaatttgtacatgataattatgtaatacgtcgaacggcggttgattcgggtataccgttactaacgaattttcaagtaacgaaactatttgcggaagcggttcaaaaatcgcgtaaagtagattcgaaatcgctatttcattatcgtcaatattcggcgggtaaagcggcg

SEQ ID NO: 43551 - DNA, 4500 bp, Artificial Sequence
  derived and/or modified sequence
atgacccgaatcctgacagctttcaaagtcgttcgaacattaaagaccggattcggtttcactaacgtaacagcgcatcagaagtggaaattctctcgacctggaattcggttgctctctgttaaagcccagaccgcccatattgtgctggaagatggcaccaaaatgaagggatattccttcggccacccttcctctgtggcaggcgaggtggtctttaacaccggattgggagggtatcccgaggctatcactgaccctgcttacaaggggcagatcctgaccatggctaaccccatcataggcaatggcggcgctcccgatacaaccgcgttagacgagcttggtctcagtaaatatctagaatctaatgggattaaggtgtccgggcttttggtcctggactactcgaaagattacaatcattggcttgcaaccaagtccctggggcaatggctacaagaagagaaggttcccgctatctacggagttgatacaagaatgctcaccaagattatccgagacaagggtaccatgcttgggaagatcgagttcgagggccagccggtcgactttgtggatccgaataagcagaacctcatcgccgaggtgtcgaccaaggatgttaaagtgtacggtaaaggcaacccaactaaagtcgtagccgtggattgtgggatcaaaaacaacgtcattaggcttctcgtcaagaggggggccgaggtgcatctcgtgccttggaaccacgattttacaaagatggagtatgacggtatccttatcgcgggcggccccggcaaccccgcgcttgccgagcccctcatccagaatgtgcggaaaatccttgagtctgatagaaaggagccactgttcggcatctccactgggaatttgataaccggcctagctgccggcgctaagacctataagatgagcatggccaacagagggcagaatcagcccgtgctgaacattaccaataaacaggcgttcattacagcccaaaaccacggatacgccctcgataatacgctgccagcaggatggaagccacttttcgtgaacgtgaatgatcagaccaatgagggaataatgcatgaatctaagcctttcttcgccgtacagttccaccctgaggtgacgcctgggcccatcgacaccgaatatctgtttgactcctttttcagcctgataaaaaagggtaaggcgacaacgataacctctgttctgcctaagcccgcactcgttgcgagccgcgtggaggttagcaaagtgctgatcctggggtccggggggctgtcaattggacaagcaggagagtttgattacagcggctcacaagctgtcaaggcaatgaaggaggaaaacgtgaaaaccgtgctgatgaaccctaacatcgctagcgtgcagaccaatgaggtcggtcttaagcaggccgatactgtgtacttccttcccataacccctcagtttgtaacagaggtgattaaggctgaacagcctgatggcctgattttagggatgggtggacagaccgccctgaactgtggagtggagctgttcaagcgaggggtcttaaaagagtatggcgtcaaggtgctggggacctccgtggagagcattatggcaacggaggacaggcagcttttttccgataagctcaacgaaataaatgagaaaatcgccccaagcttcgctgtagagtccattgaggacgctttaaaagcagccgacaccattgggtatccagtcatgattcgatcagcgtacgctctcggcggacttggctcaggaatatgccccaacagggagacgctgatggacctcagcacgaaggcctttgcgatgaccaatcagatcctcgtcgagaagtccgtaaccggctggaaggagatagaatacgaggtggtgcgcgacgccgatgataattgtgttaccgtgtgtaatatggagaatgtagatgccatgggagtgcacacaggggactctgtggtcgtcgctccggctcagacactgagcaacgccgaattccagatgctgcgtagaactagcatcaatgtcgtacgccatctcgggatagtcggggagtgcaatatccagtttgccctgcaccctacatccatggaatactgtatcatcgaggttaacgcaagactgtcccgcagttcagcactggcgtccaaggccaccggctaccctttggctttcatcgccgccaagatcgccctcgggatcccgttacctgagattaaaaatgttgtgtcaggtaaaactagtgcctgcttcgagcccagcctggattatatggtgacaaagatccctaggtgggatcttgatcggttccatggcaccagttccaggatcggtagctccatgaagtcggtaggcgaggtgatggcaatcgggagaacttttgaagagagcttccaaaaggccctgcggatgtgccacccatctatagagggcttcaccccgagactgccgatgaacaaagaatggccatctaacctggatcttcgaaaggaattgtccgaaccttctagcacacgaatctacgccatagcaaaagccattgatgacaatatgagcctggacgaaatagagaagttgacctatatcgataagtggttcctgtacaagatgcgagatatactcaacatggaaaagacacttaaaggtctgaatagtgagagcatgaccgaagaaacgcttaaacgcgccaaagagatcggatttagcgataagcagattagtaaatgtctgggactgacagaagcacagacaagggagctcaggctgaagaaaaatatccacccctgggttaagcagatcgatactctggcggcagagtacccttcagtaaccaactacctgtacgtcacttacaacggacaggagcacgacgtgaattttgacgatcacggtatgatggtgctcgggtgtgggccctaccacattggcagctctgttgagttcgattggtgtgccgtgtcttcaatacgcacactgagacagctgggcaagaagacagtggttgtaaattgcaatcccgagaccgtgtctactgactttgatgaatgcgataagttatacttcgaagagttatcccttgagagaatcctcgatatttaccatcaggaggcttgcggcggttgcatcatctcagtgggcggccagattccaaacaacctggccgtacccctgtataaaaatggcgtaaagattatgggcacttcccctttgcagattgaccgcgctgaggacagatcgattttctctgccgtgctggatgagctcaaagtggcacaagcaccctggaaagcggtcaacaccttgaatgaggccctggagttcgcgaagtctgttgactatccttgcctcctccgcccttcttacgtgctgagcggctctgcgatgaacgtggtgttcagtgaggacgagatgaagaagttcctcgaagaagcaacccgggtgagtcaggaacacccggtggtgttaaccaagtttgtggaaggggcacgggaggtggaaatggacgctgtgggaaaagatggaagggtgatctctcatgctattagtgaacatgtggaagatgcaggggtccattccggggacgctactctaatgctgcctacacagaccatctcgcagggcgccatcgagaaggtgaaagacgcgacccgcaaaatcgcaaaggctttcgcaatcagcggccctttcaatgtacagttcctggtcaaaggcaatgatgttctggtgatcgagtgtaaccttcgggcaagcaggtcttttcccttcgtaagtaagacgttgggggtagatttcatcgatgtggcaacgaaggtcatgatcggcgagaacgtggatgaaaagcacctgcctacgcttgaccatcctattattccggcagactacgtcgccattaaagcccctatgttcagctggccgcggttaagagacgctgatcctatcctgcgatgtgagatggcttcgaccggagaggtagcatgtttcggagagggtatacacaccgcatttctgaaggcaatgctttccaccgggtttaagatacctcaaaaaggcatactcatcgggatccagcagagttttcggccgaggttcctcggtgtagctgagcagctgcataatgaaggatttaagctgttcgcaactgaagcaaccagcgattggttgaatgctaacaatgtgccggcaacccctgtcgcatggccctcccaggaggggcagaaccccagtctatccagtatcagaaaactcattagggacggaagtatcgatcttgtgatcaatctgcctaataataacacaaagtttgtccacgacaactatgtgattcgaaggaccgcagtggactctggcatcccactgctgactaattttcaggtgactaagttattcgccgaggccgtgcagaagagccggaaggtggacagcaaaagcctctttcattatagacagtattccgccggaaaagcagct

SEQ ID NO: 43552 - DNA, 4500 bp, Artificial Sequence
  derived and/or modified sequence
atgacgagaatactgacagcatttaaagtagtacgcacattgaaaacgggtttcgggtttacaaacgtaacggcacatcaaaaatggaaattttctcgaccggggattcgtcttttatccgttaaagcccagacagctcatattgtactggaggatgggacgaaaatgaagggatactcttttggccatccatcttctgtcgctggtgaagtagtgtttaatacgggcctgggcgggtacccggaagcaattacggacccggcatacaaaggacaaatactgacaatggccaacccaattatcggaaatgggggggccccggacacaactgccctcgacgagctgggcctgtcaaaatacttagaatctaacggcatcaaggtttctggtttattagtcttagattattctaaggattataaccactggcttgcaaccaaaagcctgggacagtggttgcaagaagaaaaggtccctgcaatttacggggttgacaccaggatgctgaccaaaataattcgggacaaagggacaatgctgggtaaaatcgaatttgaaggccaaccagtcgatttcgtcgacccgaataagcaaaatttaattgctgaagtatcaaccaaggacgtcaaagtctacggaaaaggcaatcccacaaaagtcgttgccgtggattgtggaataaagaacaatgttattcgccttctggtcaagagaggcgctgaagtgcacctggtgccgtggaatcatgattttactaagatggagtatgatgggattcttatcgcagggggacctggaaatccggcattagcggagcctttgatacagaatgtacgcaagatcttggaatcagatcgcaaggagccacttttcggcatatctacggggaatctcattacaggtcttgccgcgggcgcaaaaacctataaaatgtcaatggcaaatagaggccagaatcaacctgttttgaatataacgaacaagcaagcctttattacagcgcagaatcatggatatgccttggacaatacgctgcccgcgggctggaagccccttttcgtgaacgtcaacgatcagacgaatgaaggcatcatgcatgagtctaaaccgttttttgcagttcaatttcatccagaggtcacgccgggcccgatcgataccgaatacctgtttgactcctttttcagcttgatcaaaaaaggcaaagctacgaccatcacgtcagtcttgcctaaaccagccctggtggcctctcgcgtcgaagtatccaaagttctcatcttaggttccggcggactttccattggccaagctggtgaatttgattattctggctcacaagcagtaaaggctatgaaggaggagaatgttaaaacagtgctcatgaacccgaacattgcaagtgttcagacaaatgaggttggattaaaacaggccgacacggtctattttttgccgattacccctcagtttgttacggaagtcattaaagcagaacagccggacggccttattttaggcatgggtggacagactgctttaaactgtggagtcgagctttttaaacggggcgtattaaaagaatatggcgtgaaagtattaggaacgagcgtggaaagcatcatggctacagaagaccgtcagctgttttcagataaactaaacgaaattaatgaaaaaattgcgccatcatttgctgtggaaagcatagaagatgcgttgaaagctgccgatacaattggctatccggtgatgatccgtagcgcttacgcccttggagggctgggtagcggcatttgtcctaaccgcgagacgctgatggacctttcaactaaggcatttgcaatgactaaccaaatcttagtagaaaaaagcgtgacaggttggaaagaaatcgaatacgaagtggtaagagatgccgatgataattgcgtaacagtttgtaacatggaaaatgtggatgcaatgggagtccacactggagattctgtggtcgttgctcctgcgcagaccctgagcaatgctgaatttcaaatgctgcgtagaacatcgatcaacgtcgtgcggcatctgggcattgttggcgagtgtaatatccaattcgccttacatccgacgtctatggaatactgcattattgaagttaacgcgcggttatccagatcttctgcacttgcgtctaaagctacaggttatccgctggcgtttattgcagcaaaaattgcgctgggtattccgctgccggaaattaagaatgtcgttagcgggaagacatctgcttgctttgaaccaagccttgattatatggttacaaaaataccccgttgggaccttgatcgcttccacggaacgtcaagcagaataggttcgagcatgaaatcagttggcgaagtgatggcgattggccgtacatttgaagaatcatttcagaaagcgttgcgaatgtgtcatccgagcattgagggatttacaccgcgattgccgatgaataaagagtggccttcaaatttagatcttagaaaggaactgtcagaaccaagtagcacacgaatttatgcgattgctaaggctattgatgataacatgtcattggatgaaatcgagaagttgacgtacattgataaatggtttctgtacaaaatgagagacattctcaatatggaaaaaacattgaaaggactgaattctgaatctatgacagaagagaccttgaaacgtgcaaaagaaattggcttttcagataagcaaatttccaagtgtcttggtttgactgaagcccaaacgcgcgagctacgcttgaaaaagaacatccatccttgggtgaagcagattgatacattggctgctgaatatccttccgtaacaaactatctttatgttacatataacggacaggagcatgatgttaactttgatgaccatggcatgatggttcttggatgtggcccttaccatattggatctagtgttgaattcgattggtgcgctgtatcctcaatccgtacattacgccaactgggtaaaaaaaccgttgtagttaactgcaatccggaaacggtatcgactgattttgacgagtgtgacaaactttattttgaagaattaagtctagaacgtattttagatatttaccatcaggaagcgtgtggaggctgtataatttcggttggcggtcaaattccaaacaatctggcagtcccgctttataagaatggagtgaaaataatgggaacttcaccgcttcagatcgatagagcagaggacagatcaattttttcagctgtcctggacgaacttaaggtagcgcaagcaccatggaaagcagttaatactttgaatgaagcacttgaatttgcaaaatctgttgattatccgtgcttactccgtccgtcatatgtactttcaggttctgctatgaatgtcgtgttctcagaagatgagatgaagaagtttttggaagaagcgacgcgcgtgtcccaggaacatcctgtcgtgttaaccaagttcgtcgagggtgcgcgtgaggtcgaaatggatgctgttggaaaagatggccgcgttatttctcacgctatcagtgagcacgttgaagatgctggcgtgcattcgggcgatgccacactgatgctgcctactcaaactatctctcagggggccattgagaaagttaaggatgctactcgcaaaatcgccaaagcttttgctatctcaggtccattcaacgtgcaatttctggtaaaaggtaatgatgtcctggttatcgaatgtaatctaagagcaagtaggtcatttccatttgtttcaaagacattgggtgttgatttcattgatgttgcgacaaaagtgatgattggcgagaacgttgacgaaaaacatcttccaactttggatcacccgataataccagcggattatgttgccattaaagcaccgatgttttcatggccacggctgagagacgctgatccaatcttaagatgtgaaatggcgtcaacgggcgaagttgcgtgttttggcgagggcatccacacagcgttccttaaagcgatgttgtcaaccgggtttaagattccgcaaaaaggtattctgattgggattcaacaatcctttcggccgcggtttctgggagtcgccgaacaacttcataatgaaggcttcaagctttttgctacggaagctacgagtgattggctgaacgcaaataatgtcccggcgacacctgtagcatggccttcacaggaaggacagaatccgtctctttcaagtatcagaaaactcatccgagacggttctatagatttagtgattaatctgccgaacaacaatacaaaatttgtgcatgataactatgttattcggcgaacagcggtcgactcaggtattccgctactcacaaattttcaggtgacaaaattgtttgcagaggcggtccaaaaatcacgtaaggtggatagcaaatcattgtttcattacagacagtatagtgctggcaaggcagcg

SEQ ID NO: 43553 - DNA, 4500 bp, Artificial Sequence
  derived and/or modified sequence
atgacgaggatactaactgcattcaaagtagtgagaaccctcaagacaggctttggctttactaacgtgaccgctcaccagaagtggaagttcagccgacctggcatcaggctcttgagtgtcaaagctcagaccgcgcacatagtgctggaggatgggacgaaaatgaagggctatagtttcggccacccgagctccgtggctggcgaagtggtgttcaacaccgggctcggtggatatcccgaagcaatcacagatcccgcttacaaagggcagatcctaactatggcgaatcccattatcggcaacggcggcgcccctgataccactgctcttgatgagctgggcctttccaagtacctggagagcaatgggatcaaagtctccggtctattggtgctggactattccaaggattataaccactggttggccacgaaaagcttgggccagtggctccaggaggaaaaggtaccggcaatctacggagtggatacaaggatgcttaccaaaatcatccgcgataagggcaccatgctaggtaagattgagttcgaagggcagcccgtggatttcgtggatccgaacaaacagaacctaattgcagaagtaagtaccaaagatgtgaaggtctatggtaaaggcaatcctacaaaggtcgttgcagtggactgtggcataaagaacaacgtgattcggctgttggtcaagagaggagcagaagttcacctagtaccctggaatcatgattttaccaaaatggaatacgacggcatcctaatcgcaggcggacccgggaatcctgctttggcagagccgctcatccagaacgtcaggaagattctggagtctgatcgaaaggaacccttgttcgggatatccacagggaaccttatcactggactagccgccggagccaagacgtataaaatgagtatggctaataggggacagaatcagccagtcctgaatatcacaaacaaacaggcctttatcactgcacagaaccatggatatgcgcttgataacactttgccagccggctggaaaccactgttcgttaatgtcaatgatcagactaatgaaggtattatgcacgagtctaagcctttcttcgccgtgcagtttcatcccgaggtcacccctggccctatcgatacggaatacctgttcgatagctttttctccctcattaagaaaggcaaagctaccaccattacctctgtgctacctaagccggccctagtcgcatccagggttgaggtgagtaaggtgttaatcttgggctccggggggctgagcattggacaggccggtgaatttgattattctggttcccaggcagtgaaggctatgaaagaagagaacgtgaagaccgtcctaatgaatcctaacatcgctagcgtccagaccaatgaagtcggtctgaagcaggctgatacagtctacttcctgcctattacacctcaatttgtgacggaggtaataaaagccgaacaaccggacggtctgatcctgggaatgggcggacagactgccctgaactgcggggtggagctgttcaagagaggagtgctgaaggaatacggagtcaaagtgctggggaccagtgtggaaagtatcatggcgaccgaggacaggcagctctttagtgacaaattgaacgagataaacgagaaaattgccccttccttcgcagtggagtcaattgaagacgccttgaaggctgctgacaccatcggctatcctgtgatgataagatcggcctatgctctagggggcctcggaagtgggatttgtcctaacagggaaacactaatggacctgtctacgaaggctttcgcaatgactaaccagatactggtggaaaagagcgtgacagggtggaaggagattgaatacgaggtggttagagacgccgacgataactgcgtcactgtctgcaacatggagaatgtggacgcgatgggcgtgcatactggagactcagtggtggtggctcccgcccagacactgtccaacgccgagtttcaaatgttgagaagaacatcaatcaatgtggtcagacacttagggatagtgggcgagtgtaacatccagttcgcactccaccccacatccatggagtactgtatcatcgaggttaatgctagactatcgcggtcaagcgcccttgcctcaaaagccacaggctacccactggccttcatagcagctaagatcgcccttggaatacccctgccagaaatcaaaaacgttgtctccgggaagacatcagcgtgtttcgagccatctctggactatatggtgaccaagatcccccggtgggatttggaccggttccacggcacaagttctcggattggctcctcaatgaagagtgtgggagaggttatggcaattgggcgcacattcgaggagagctttcaaaaagccctgagaatgtgccatcccagtatcgagggattcaccccgcgacttccaatgaacaaggaatggccatccaatctcgatctgcgcaaggaactctccgaacctagctctactaggatttatgcgatcgctaaagccattgatgataacatgtctctggacgaaatcgaaaagctcacctacatcgacaagtggttcttatataagatgcgcgacatcctgaacatggaaaaaacgttgaagggccttaattccgaatcaatgacggaggaaactctgaagagggctaaggagataggcttctccgacaagcaaatctcaaaatgtcttggcttaaccgaggcacagacaagggagttgcgacttaagaaaaatattcacccatgggtgaagcagattgataccctggccgcagagtaccccagtgttacgaactacctctatgtcacctacaatggtcaagaacacgatgtcaatttcgacgatcatggaatgatggtgctcggatgtgggccatatcacattggtagcagcgtcgaatttgactggtgcgctgttagttccattaggacactgcgacagctcgggaagaaaaccgtcgtggttaactgtaaccccgagacggtatccaccgattttgatgaatgcgacaagctgtatttcgaggagctgagtctggagcggatcttagacatctatcatcaggaagcctgtggcgggtgcatcatctcagtgggagggcagattccgaacaacttggccgtgccactttacaagaacggcgtgaaaatcatggggacatcaccgcttcagatcgacagggcagaggatcgctcaatcttctccgcagtccttgacgaactcaaggtggcccaggccccctggaaagccgttaatactctgaatgaggcactcgagtttgccaagtccgtcgattacccatgtttactgcgcccatcttatgtgctttctggcagcgctatgaacgtggtcttttctgaggatgagatgaagaaattcctggaggaggcgaccagagtgtcgcaagagcatccagttgtgctgacaaaatttgtggaaggggcacgggaggtggagatggatgcagtggggaaggatggcagagttatcagtcatgcaatctccgagcacgtagaggacgccggtgtgcactccggcgatgctacactgatgctgccgacacagacaatttctcagggggcaatcgagaaagtgaaggacgcaacccggaaaattgctaaggcctttgctatcagtggcccgtttaatgtgcagttcctggtcaaagggaacgacgtgctggtcatcgagtgtaatctgcgtgctagccgctcctttccttttgtctccaagaccctgggggtcgattttattgatgtagctactaaggtaatgataggcgaaaatgtcgacgagaagcatctccccaccttagaccacccgattatcccagccgactatgtggccatcaaggccccaatgtttagctggcccagactgagagatgccgacccgattctacgctgcgagatggcgtccaccggggaggtggcatgcttcggcgagggcattcacactgcgttcctaaaagccatgttaagcacagggtttaagatccctcagaagggcattctgatcggaatccaacagtccttcagaccccggttcctcggggtcgcggaacagttgcacaatgaagggtttaagcttttcgcaacggaagccacgtccgactggctaaatgccaacaatgtacctgccacccccgtggcttggccttcgcaagagggacagaaccccagccttagcagcatccggaaactaattagggacgggagcattgatcttgtgatcaacctccccaacaacaacacgaagttcgtgcacgacaactacgtgatccggcgtacagccgttgactctggcattcccctcctgacaaatttccaggtcaccaagttgttcgccgaggctgtgcagaagagtagaaaagtggacagtaagtccctttttcattaccgccagtactccgccgggaaggccgct

SEQ ID NO: 43554 - DNA, 4500 bp, Artificial Sequence
  derived and/or modified sequence
atgactaggatcctcacagctttcaaggtcgtgcggacgctgaaaactgggttcgggttcacaaatgtgacagcccatcagaagtggaagtttagcaggcctggcatacggttgctctctgtaaaggcccagactgcacatattgtcttagaggacggtacaaaaatgaaaggatattccttcggtcaccctagtagcgtagctggcgaggttgtgttcaacactggactgggcggttatcctgaggctatcactgatccagcatacaagggccagatcttaacaatggcaaatcctattattggcaacgggggcgcccccgatactaccgccctggacgagctgggtctgtctaagtatttggagtcaaatggaatcaaagtgagcggcctcctcgtattagactacagcaaagattataatcattggctggccactaagagtcttgggcagtggctgcaggaggaaaaggttcctgcaatctacggtgtggatacacggatgctgacaaaaatcattagggataaaggcactatgctagggaaaatagagtttgagggccagccagtagattttgtggatcccaataaacaaaatcttatagccgaagtttctacaaaggacgtgaaagtttatggtaagggtaacccaactaaagtcgtagccgttgactgtggaattaagaacaacgtgatcagacttctggtgaaacgtggggccgaggtgcacctcgttccctggaaccatgattttacaaagatggagtatgacgggatcctgatcgccggcggaccaggcaatcccgctctcgctgagcctctgatacagaatgtacggaagatattggagtccgatagaaaggagccactgttcggtattagtaccggaaatctgatcacagggcttgcggctggtgcaaaaacatataagatgtctatggccaatagagggcagaaccagccagtgctgaatatcacaaataagcaggctttcattactgcccagaaccacgggtacgctctcgacaacaccctgccagcgggatggaagcccttgttcgtaaatgtgaacgatcaaaccaacgagggtatcatgcacgaaagtaaacctttcttcgcagtacagtttcatccagaagttacacccggtccgattgacacggagtacttgttcgacagttttttttctctaatcaaaaagggaaaagccaccacaataacctctgtgttgcccaagcctgccctagtcgcaagtagggtagaagtgtcaaaggttttgattctcggcagcggaggcttatccatcggccaggctggggagttcgactactcaggatctcaggccgtcaaggcgatgaaagaagaaaacgtcaagactgtgctgatgaaccccaatatagctagcgtgcagaccaacgaagtcggcctgaaacaggccgacaccgtgtatttcctgcctattactcctcagttcgtaacagaagtgataaaagccgagcagcccgacggcctgatactgggcatgggcggacaaactgcccttaactgcggggtggagcttttcaaaagaggagtgctcaaggagtatggagtcaaagtcctaggtacctcagtcgaatctataatggccaccgaagatcgacagctcttctcagataaactcaatgagatcaatgagaaaatcgccccaagcttcgccgtggaatccatagaggatgcactgaaggcggcggacaccattgggtacccggtaatgatcagatccgcttatgctctgggcggacttgggtcaggtatttgtccgaatcgagagactctgatggacctttcaacaaaggccttcgccatgacaaaccaaattctcgttgaaaagtctgtgactgggtggaaagagatcgagtacgaagtggtgagagatgccgacgataactgtgtgaccgtttgcaacatggagaacgtggacgcgatgggcgtccataccggtgatagcgtagtggtcgctcccgcgcaaactctgtcaaatgccgagtttcagatgctccgacgcactagtataaacgtcgtaagacacctcgggatcgttggggaatgcaatatccagtttgcccttcacccaacctcgatggagtattgtatcattgaggtcaacgctagactgtctcgctcgtcagccttagctagcaaggcaacaggttatccccttgcatttatcgcagctaaaatcgcgctcggtatccctctgccggagataaagaatgtggtttcaggcaaaacgtccgcctgctttgagccgagcctggactacatggtcacgaagataccaagatgggatctggatcgcttccatggaaccagttcccgcatcggtagcagcatgaagtcggtgggcgaggtgatggcaatcgggcggacgtttgaggagtcatttcagaaagcattgagaatgtgccacccaagcatcgagggattcactccccgcctgcccatgaataaggaatggcccagcaatctggatcttagaaaagaactaagcgagccctccagcacccgtatctacgcaatcgctaaggccatcgatgataacatgtcgttagacgaaattgagaaactgacttatattgataagtggtttctgtacaaaatgcgggatatcctcaatatggagaaaactcttaagggcttgaatagtgaatcaatgacagaggagactttgaagcgagccaaagagataggattttcggataaacagataagcaagtgcttgggactgaccgaggcacagacaagggaactgcgacttaaaaagaacattcacccatgggtgaaacagatcgataccctggctgctgaatacccaagcgtgacaaattacctatacgtcacatacaatggccaggagcacgacgttaacttcgatgaccacggaatgatggtgttgggctgtggtccctatcacatcggctcctccgtggagttcgactggtgcgccgtcagctccatcagaacactgcgacagctagggaagaagacagtggtggtaaactgcaaccctgagacagttagtacagatttcgacgagtgcgacaaattgtactttgaagagctgagtcttgagcgaatcctggatatctaccatcaagaggcgtgcggagggtgcatcatctcagtcggcgggcagattcctaacaacctggctgtccccctatacaagaatggtgtgaagattatgggaacctcaccgttacagattgatcgagctgaagatcgaagcatcttcagtgctgttctggacgaactgaaggttgctcaagctccttggaaggcggtaaatactctgaacgaggctctagagttcgccaagtctgtggactacccatgcctgctgcgccctagctatgtactatccggttctgccatgaatgtcgtgttctccgaggacgagatgaaaaagttcctggaggaggcaacccgggtatcccaggaacacccagtggtcctgaccaaattcgtggagggcgcgagagaagtggaaatggacgccgtgggtaaagatggtcgtgtgatttcccacgcaatttccgagcatgtcgaagacgccggcgtacactctggggatgcaacattgatgctgccaactcagaccattagtcagggcgcaattgagaaagtgaaggatgccaccagaaagatagcaaaagcctttgccatctcagggccattcaacgtgcagtttttggtcaaaggcaatgatgttctggttatcgagtgtaatctcagggcctccaggagcttcccattcgtgtctaagacactcggtgtggatttcatagatgtggcaaccaaggtgatgatcggtgaaaatgtggatgagaagcatctccctaccttagatcaccctatcatacctgctgattacgtggcaattaaagcacccatgtttagctggcctaggctccgggatgcagatccaattttaaggtgcgaaatggcctctacaggcgaggtggcctgcttcggagagggaatacacaccgccttcctgaaagcgatgctcagtacaggcttcaaaataccccagaaaggaattctgattgggatccaacagtctttcaggcctcggttcctaggggttgcggaacagctgcataacgagggattcaagctgttcgcgactgaagccaccagcgattggctgaacgccaataacgtgcctgctactcctgttgcttggccttcgcaggaggggcagaatcctagcctcagcagtatccgcaagctgatccgggacggctccatagacttagtgatcaacttgccaaacaataacaccaagttcgtgcacgataattacgtgatccggcggaccgccgttgactctggcattcctttgctgactaattttcaggtaacaaaactgttcgcagaggccgtgcagaagagtaggaaagtcgattcaaagtccctgtttcattatcggcagtactccgccggaaaggccgct

SEQ ID NO: 43555 - DNA, 4500 bp, Artificial Sequence
  derived and/or modified sequence
atgacacggatcctcaccgctttcaaggtggtccgcacactgaaaacaggctttggcttcaccaacgtgaccgcacaccagaagtggaagttctccagacccgggatcagactcctcagcgtgaaggctcagacagcccacatcgtcctcgaagatgggacaaaaatgaaaggctattccttcggacacccatctagcgtggctggcgaagttgtgtttaacacaggactggggggctatcctgaagcaatcaccgacccggcgtataagggtcagatacttacgatggccaatcctatcataggtaatgggggtgcccctgacactacagccctggacgagctaggcctgagcaaatacctggagtcaaacggtatcaaggtgagcggacttcttgtgctggactattcaaaagattataaccattggctggcaacaaagagtctggggcaatggctgcaggaggaaaaagtgccagctatctacggcgtcgatacccggatgctaactaaaattatacgggataagggcacaatgctcggaaaaattgagtttgagggtcagccggtagattttgtggaccccaataagcagaacctgattgccgaagtttcaacaaaggatgtcaaagtttatggaaagggtaaccccactaaggtcgttgccgttgattgcggcattaagaataacgtcatccggctgctggtgaaaaggggggccgaggtgcacctggtgccatggaatcatgatttcactaagatggaatatgatggcattcttattgcgggcggccccggtaaccccgcactggcggagcccctgatccagaatgtgcgaaaaatcctggaaagcgacagaaaagaaccactctttggaatatctactggcaatctgattaccggtctggccgccggtgcaaaaacgtataaaatgtccatggcaaaccgcggacaaaatcagcccgttctgaacataactaacaagcaggcgtttattacggcacagaaccatggctacgcgcttgacaacacgttgcctgccgggtggaaacccctgttcgttaacgtgaacgatcagactaacgagggaatcatgcacgaaagcaaaccttttttcgccgtccaattccatccagaagtgacacccgggcctatcgatacagagtatctgttcgattctttcttttccctgatcaaaaaaggcaaggctactacaatcaccagcgtcttgcccaagccagcactggtcgcatcacgcgttgaggtttctaaagtgctgatcctgggaagtgggggcttatcaattgggcaggctggggaatttgactattcaggttcccaggctgtcaaggccatgaaggaagagaacgtgaagacggtgttgatgaatccgaacatcgcgtcagtccagaccaacgaggtcggtctaaagcaggccgatactgtatactttctacccattaccccccaattcgtcaccgaggtcatcaaagccgagcaacccgacggactcatactggggatgggaggccagactgccttgaactgtggcgtggagctattcaaacgaggggtgctgaaagagtacggtgttaaggttctcggtacaagcgtggagtctattatggcaaccgaggacaggcagctgttcagtgataaattgaatgaaatcaatgagaagatcgccccctccttcgccgtggaaagtattgaggacgcccttaaagctgctgataccattggatacccggtgatgatacgaagtgcctacgccctgggggggctgggtagcggcatctgtcctaacagagagactttgatggacttgtccaccaaagcttttgcgatgacaaatcaaatccttgtcgagaaaagcgtcaccggatggaaggagattgagtatgaggtggttagagatgccgacgacaactgtgtcaccgtttgcaatatggaaaacgtggatgccatgggagtgcataccggggatagtgtcgttgtggcccctgcccagaccctttctaacgccgagtttcaaatgctgcggcgaacatccatcaacgtggtacgccatctcggtattgtaggtgagtgtaacatccagttcgcactgcacccaacctcgatggaatactgtattatcgaagttaacgcccgtcttagtaggtcctcagccctcgccagcaaggccacaggatacccactggcctttatagctgctaagatcgccttggggatcccgctgcctgagattaagaacgtggtgtcaggaaaaacctctgcctgcttcgagccctccttggattacatggtgaccaagattccccgatgggatctggataggttccacggaacctccagcagaattggctctagtatgaagagcgtgggtgaggtgatggccatcggacgcaccttcgaggagagcttccagaaggccttaagaatgtgtcacccctcaatagaaggcttcactccccgtctcccaatgaacaaggagtggccctccaatctcgatctgcgcaaggagctgagtgagcctagcagcacccgaatctacgccatcgccaaggctattgatgataacatgagtcttgacgaaattgaaaaacttacttacatcgacaagtggtttctctacaaaatgcgcgacattttgaacatggaaaaaacactcaaagggctaaatagcgagtccatgactgaagaaaccctgaagcgggccaaggagatcggcttttctgataagcagattagtaagtgtctggggctgactgaggcgcagacgcgcgagctaaggctgaaaaagaacatacatccctgggtgaaacagatcgacacattggccgcagagtacccgtctgtgacgaactatctgtatgtgacttataacggccaggagcatgatgtgaactttgacgatcatgggatgatggttctgggatgtggcccataccacatagggtcctctgtggagttcgactggtgtgctgttagttccattaggactctccgccaacttggaaagaaaaccgtcgtagtgaattgcaacccagagaccgtgagcaccgatttcgacgagtgcgacaagttgtactttgaagaacttagtctggaacgcatcctggatatctaccaccaggaagcgtgtggaggttgtataatatcggttgggggtcagatccctaataatctggccgttccattatacaaaaacggagtgaaaatcatggggacaagccctttacagatagaccgtgcagaggacagatcgattttctcggcagttctcgacgagttgaaggtagctcaggcaccctggaaggccgtcaacaccctgaatgaggctctagaatttgcgaagagtgtcgactatccctgcctgctcaggccctcttatgtgctgtctggcagcgccatgaacgtggtctttagtgaggacgagatgaagaagttcttggaggaagctactcgggttagccaggagcaccccgttgtgttgacaaagttcgtagagggcgccagggaggtagaaatggatgcggtaggaaaggacggacgcgtgatctcacacgctataagtgagcacgtggaggacgccggcgtccacagcggcgatgcgacactgatgctacccacacagacaatctcacagggggctatagaaaaagtaaaggacgccactcgcaaaatagctaaagcctttgccataagcggaccattcaatgtgcagtttctcgttaaagggaatgacgtcctggtaattgagtgtaatttaagggctagccgtagctttccctttgtttcaaagactctaggggttgactttattgacgtggcgacgaaggtcatgatcggggaaaacgtggacgaaaagcatttacccacgctggatcaccccataataccggctgactatgtggccatcaaggctcccatgtttagttggcccaggcttagagacgccgatccaattctgcggtgcgaaatggcatccactggtgaggttgcctgctttggagagggtattcataccgcctttctcaaagccatgctttcaaccgggtttaaaattccccagaaagggattttgatcgggatacagcagtcctttcgaccaaggttcttgggagtggccgagcaactacacaacgagggttttaaactgttcgccactgaggctacctccgattggctgaacgccaacaacgtgccggctacacctgtcgcttggccgagtcaggagggtcagaacccgagcctctcaagtattcgcaagttgattagagacgggagcatcgacctggtcattaacctgccaaataataatactaagtttgtgcatgacaattatgttatccgccgcaccgctgtggattctggtatacctctgctgactaacttccaagtaaccaagctgttcgccgaagctgtgcaaaaatcacgaaaagttgatagtaaatcgctgttccactaccgccagtactctgcggggaaggccgcc

SEQ ID NO: 43556 - DNA, 4500 bp, Artificial Sequence
  derived and/or modified sequence
atgacccgcatcctgaccgcatttaaggtggtccggaccctgaaaaccgggtttggtttcacgaatgtaacagcacaccaaaagtggaagttttccaggccaggtattcggttgctgtcggttaaggcgcagaccgcacacatagtcctggaggatggtacaaaaatgaaaggctatagcttcggtcatccatctagcgtcgccggtgaagttgtttttaacactggcctgggtggttacccagaagccatcactgacccagcatacaagggccagattttgacgatggcaaatcctattatcgggaacggcggcgcgcctgatacaacggcgctggacgagctgggtctgtccaagtatttggagagcaatggcatcaaagtgagcggcctcttggttttggattatagcaaagactacaatcattggctggccacgaagagcctgggccaatggctgcaggaagaaaaggttcctgcgatttacggcgtcgatacacggatgctgactaagataatcagagacaagggcacgatgttaggtaaaatagagtttgagggccaaccggtcgatttcgtcgaccctaataagcagaacttgattgcggaggttagcaccaaagacgtcaaagtgtacggtaaaggtaatccaaccaaagtagttgcggtggactgtggcattaaaaataatgtgattcgcctgctggtaaagagaggcgctgaagttcacttggtcccttggaatcacgacttcaccaaaatggaatatgatggaattcttattgccggtggtccgggtaacccagctcttgccgagccactgattcagaacgtgcgcaaaattctggagtccgataggaaggaaccactgtttggtattagcaccggcaacctgattacgggcctcgcagccggagcgaagacctataagatgagcatggccaacagagggcagaatcaaccggtgctcaacatcaccaacaaacaggcctttatcaccgcgcaaaatcacggctacgcgctggacaacaccctcccggctggttggaaaccactgttcgtgaatgtaaacgatcaaaccaacgagggcattatgcatgagagcaaacctttctttgctgtgcagttccacccggaagtgacgcccggccctatagatacggaatacctgtttgacagctttttcagcctcatcaagaagggcaaagctacgacaattacctctgtgcttccgaaaccggcgttggtggcgtcccgcgtcgaggtaagcaaggttctgatcctgggtagcggtggtctgagcattggtcaagctggtgagttcgattattccggttctcaagcggttaaggccatgaaagaagaaaatgtgaagaccgtcctgatgaatcctaatattgctagtgtgcaaaccaacgaggttgggctgaagcaggcggacactgtgtactttttgccaatcactccacagtttgtgactgaagtcattaaggcggagcagccggatggcctgatccttggaatgggtggccaaacggccctgaattgcggcgtcgagttgttcaagagaggtgtcctgaaggaatacggtgttaaggttctgggcaccagcgtcgagagcattatggccactgaggaccgccaactgttctcagataagctgaacgagattaacgaaaaaatagccccatcctttgcagtcgagtcaattgaggacgccctaaaagcggcagatactataggatatccggtcatgatacgctctgcctacgcactgggtggcctgggtagcggtatctgtcctaatcgtgaaactcttatggacctgagcactaaggcgttcgcgatgaccaatcagattctggttgagaaatcggtgaccggctggaaggagatcgaatatgaagtagtgcgcgacgctgatgacaactgtgtgactgtctgcaatatggaaaatgtggacgctatgggtgtacataccggtgatagcgtggtggttgcaccagcgcagacactgtctaacgctgaattccaaatgctgagacggacttcaatcaacgttgtcagacacctgggcattgtcggcgaatgcaacattcaatttgctttgcatccgacgtccatggagtattgtatcatcgaagttaatgcacggctgagccgcagcagtgcgctggcgtcgaaagctaccgggtatccactggccttcatcgccgcaaagatcgccctgggtatccccctgcccgagattaaaaatgtggtcagcggtaagacgtcagcctgcttcgagcctagcctggattacatggttacgaaaatccctcgctgggaccttgatcgcttccacggcaccagcagcagaattggcagctctatgaagtccgtgggcgaggtgatggctatcgggcggactttcgaagagtcattccagaaagcccttcgaatgtgccacccaagcatcgagggctttacgcctcggctgccgatgaacaaggagtggccaagcaatctggacctgcgtaaggaattgagcgagccgagcagcacgcgtatctatgctatcgcaaaagcaattgatgacaacatgagtctggacgaaattgagaagttgacgtacattgacaagtggttcctgtataagatgcgagacattctgaatatggaaaaaaccctaaagggcttaaattccgagtctatgaccgaagaaacccttaaacgcgctaaggaaataggcttcagcgataagcagatctctaagtgcctgggtctgacggaggcgcagacccgcgaactgcgtctcaaaaagaacattcacccttgggttaaacagatcgatacgctggccgcggagtacccaagcgtcaccaattatttgtacgtcacctataacggccaagaacacgacgtgaatttcgatgatcacgggatgatggttttgggctgcggtccatatcatatcggtagttcggtggaattcgactggtgcgcggtttccagcatccgcacactgcgccagctgggaaaaaaaacggtggtagtcaactgtaatcctgaaacggtcagcacggacttcgatgagtgcgataaactgtatttcgaagagttgtctctggagcgcatcctggacatctaccatcaggaggcttgtggtggctgcattatcagcgtcggtgggcagattccaaacaacctggcagtcccgctgtataagaatggcgtgaagattatgggtacaagcccactgcagatcgatcgcgctgaagacaggtccatttttagtgctgtgctggacgagctcaaagtggcccaggcgccgtggaaggcggtgaataccctgaatgaggccctggagtttgcaaagtctgtggattatccttgtttgctgcgtccgagctatgttctgagcggcagcgctatgaacgtggtatttagcgaggacgaaatgaaaaagtttttagaagaagctactagggtttcgcaggaacatccggtcgtcctgacaaaattcgttgaaggcgcccgggaggtagaaatggatgcagtgggtaaggatggccgcgttattagccacgctatttcggaacacgtcgaagatgccggagtgcactcaggggatgcaacgctgatgcttccgactcagactattagccagggcgccattgagaaggttaaggatgcaacgcgaaaaattgccaaggcctttgcaatttcgggcccattcaatgtgcaatttctagtcaagggcaacgatgtcctggttattgagtgcaacctgcgcgcaagccgcagcttcccttttgtctcgaaaactttgggcgtcgatttcattgacgtcgcaacgaaagtgatgattggtgagaacgtcgacgaaaagcacctgccaacgctcgatcaccctattattccggcagattacgtcgcgatcaaggcgccgatgttcagctggccacgcctgcgtgatgccgaccctattctgaggtgcgagatggccagcacgggggaagttgcatgcttcggtgagggcatacataccgccttcctcaaggctatgctcagcaccggctttaagatcccgcagaagggcattttgatcggcattcagcagagctttcgcccgcgcttcctgggggtcgcagagcagctgcacaatgaaggcttcaagctgtttgcaaccgaagcaacatccgattggctgaatgccaataacgtcccagccactcctgttgcgtggccgagccaagaaggacaaaatccgtctctctccagcattcggaaactgatccgcgatggtagcattgatttagtgattaatctgccgaacaacaatacgaagtttgtgcacgacaattacgttatacgcagaaccgctgtggattcgggaatcccactgttaacgaatttccaggtaacaaagcttttcgccgaggcagtgcagaaaagcagaaaggttgacagtaagagcctgttccactatcggcaatacagcgccggcaaggccgca

SEQ ID NO: 43557 - DNA, 4500 bp, Artificial Sequence
  derived and/or modified sequence
atgacacgcatcctgaccgcttttaaggtcgtacgaaccctcaaaacaggattcggctttacgaatgtgaccgcacaccagaagtggaagttcagtagacctggcatccgcttactcagcgtaaaggcacaaaccgcccacattgttctggaagatgggaccaaaatgaaaggttattccttcggtcacccctctagtgtcgcaggggaggtggtcttcaacaccggacttggcggctatcctgaagctattaccgatcctgcatataagggacagatattaacaatggccaaccctattattggtaacggaggggccccggataccacagccctcgacgaactgggactctctaaatacttggaatcaaatggaatcaaagtatctggcctgctcgttttggattactccaaagattataaccattggcttgctacgaaaagtcttggtcagtggctccaggaggaaaaggtcccggccatttatggggtggacacacggatgctgactaaaattatacgtgacaagggtaccatgctcggaaaaattgagtttgaaggacaacccgttgacttcgtcgatcctaacaaacagaacctcattgctgaagtgtctactaaggacgtcaaagtctatggcaaaggcaacccaaccaaggtagtggccgttgattgtggaataaagaacaacgtcatcagactgctggtcaagcggggagctgaagtgcacctcgtgccttggaaccatgactttacaaaaatggaatacgatggtatcctgatagccggagggccaggcaaccccgcacttgctgaacccttgattcagaacgtgaggaagatcctggagagtgaccgcaaagaacctttgttcggcataagcactgggaacctcataactggtctggcggctggggccaagacctacaaaatgagcatggctaaccgaggccaaaaccagcctgtccttaacattactaacaagcaggccttcatcaccgcgcaaaatcacggatatgccttggacaacacgttgccagcagggtggaagccgctctttgttaacgtgaacgaccagaccaacgaaggtattatgcacgaatccaagccattctttgcagtgcaatttcaccctgaagttacccccggtccaatcgataccgaatatttgttcgacagctttttttccctgattaaaaagggcaaggccacaactattacatcagtcctgcccaaacctgccctggtagccagtagagtcgaggtgagtaaggtgctgatccttggaagcggaggcctgagcatcgggcaagctggagagttcgactactccggctcccaagctgtgaaagctatgaaggaggagaacgttaagaccgtcctcatgaatcctaacattgcttccgtgcagaccaacgaagttggactgaagcaggctgacaccgtctattttctccccattaccccacagttcgttaccgaagtcatcaaggctgaacagcccgatgggctgatcttggggatggggggccagactgcactcaactgcggagtagaacttttcaagaggggcgtcctgaaggaatacggagtcaaggtgttaggcacttcggtggaaagcattatggctactgaggaccggcagctcttttcagacaagttgaacgagataaatgaaaagattgccccatccttcgctgtagagagtatcgaagacgctctgaaggctgcagacacgattggctatccagtgatgatccgatctgcgtacgccctcggcggcctggggtctggaatttgtcctaaccgggagacactgatggacctcagtaccaaggcatttgcgatgactaatcagatcctcgtggagaagagcgtgacaggatggaaggaaattgagtacgaagtcgtgagggacgccgacgataactgcgtcacagtgtgcaatatggaaaatgttgacgcaatgggtgtccacacaggagactcagttgtcgtggctccagcacagaccctctcaaacgcagagtttcagatgcttcgaagaacgtccattaacgtggtgcggcaccttggcatcgtgggggaatgcaatattcagttcgcccttcatccgacatcgatggagtattgcattatcgaggtgaacgcacggctgagccggtcctctgcgcttgcctccaaagccacagggtatccacttgcattcatcgcagctaaaatcgccttggggatccccctgcctgagattaagaacgtggtgtccgggaagacatccgcctgctttgagccttcgctggattatatggttacaaagataccacggtgggacctggatcggtttcacggaacaagttctcggataggcagctctatgaagtccgtgggtgaggtcatggcgatcgggagaacctttgaggaatcatttcagaaagccctgcgcatgtgtcaccccagcatcgagggattcacaccaaggttaccaatgaacaaggagtggccaagtaaccttgatttgcggaaggagctttctgagccaagctcaactaggatttacgcaattgccaaggccattgacgacaacatgtccttagacgagattgaaaagctcacttatatcgacaaatggttcctgtataaaatgagagatatccttaatatggaaaagacccttaagggtctgaactccgagtctatgactgaagaaaccctaaagcgagcaaaggagattggtttctcggataagcaaatctctaaatgtttgggcttgactgaggcgcagacccgggagctgaggttgaagaaaaacatccacccgtgggtgaaacaaatcgacactctggcggcggaatacccctctgtaaccaactacctctatgtcacttataatggacaagaacatgatgtcaactttgatgaccacggaatgatggtgctagggtgcggcccataccatattgggtcgagcgtagagtttgactggtgcgcagtatcctcaatcaggactcttcgacagcttggaaagaagacagtggtcgtgaattgcaatcccgagactgtatctaccgactttgatgagtgtgacaaactgtatttcgaagagctttcattggaaaggatacttgacatatatcaccaagaggcttgtgggggatgtatcatctcagtcggcggccagattcccaataaccttgcagtcccgctttacaaaaatggtgttaagattatgggcacttcccctctgcagattgatcgcgcagaggaccgatctatattctcagcggtgttggacgaattgaaagtggcccaagcgccttggaaagccgtcaacactcttaatgaggccctggaatttgctaaaagtgtggactatccttgtctgctgaggcccagctacgtcctcagcgggagcgctatgaatgttgtcttctctgaagacgagatgaaaaagtttcttgaagaggccaccagggtttctcaggaacatcccgtcgtgctgacgaagttcgtggagggcgccagagaggtcgagatggacgccgtaggaaaggatggaagagttatctcccatgcaatctcagagcatgttgaagatgccggggtgcatagtggggacgcaacgttgatgttgcctactcagaccatcagtcaaggcgcgattgaaaaggttaaggacgcgacacgcaaaattgctaaagccttcgctatatctggccccttcaatgtacagttcctggtgaagggcaatgatgtgcttgtcatcgagtgtaacctcagagctagccggagcttcccatttgtaagtaagaccttgggcgtggacttcattgacgtggccaccaaggtcatgatcggggagaatgtggacgagaagcatctacctaccctggatcacccgatcattcccgctgattatgttgccattaaggcaccaatgttctcgtggccaaggttgcgggacgcagacccgatcctgaggtgtgagatggcatccaccggagaggttgcttgcttcggagagggtatccacactgcattccttaaggcaatgctttccacggggttcaagatccctcagaaaggtatattgattggaatccagcagtcattccgaccaagatttctgggagtcgccgagcaactacacaacgaaggcttcaagctattcgcaactgaagcaacttctgactggctgaatgctaacaatgttcctgccacccccgtcgcgtggccctctcaggagggacagaacccttccttgtcatccattagaaagttgatccgcgatggttcgatagacctcgtaatcaaccttccaaacaataacacgaaattcgtacacgacaactacgtgatacggcggactgccgtggactcgggtattcctcttctgaccaatttccaggtgactaaactgttcgccgaggctgtacagaagtcccgcaaggtggacagtaaaagccttttccactatcggcaatattccgccggaaaagcagcc

SEQ ID NO: 43558 - DNA, 4500 bp, Artificial Sequence
  derived and/or modified sequence
atgactcgcattttgacggcattcaaggtcgtgcgcaccttgaaaacaggtttcggattcacgaacgttacggctcatcaaaagtggaagttctctcgacccggtatccgcctcttgtcagtgaaggcacaaactgctcacattgtgctcgaggatggtaccaagatgaaaggctactccttcggtcatccctctagtgttgctggagaggttgtatttaacaccggcctcggaggctaccctgaggccattacagatcccgcctacaagggccaaattctcacgatggccaatcctattattgggaacggcggagcccctgatacaacagctttggatgaactcggcctgtccaagtacctggagtcgaacgggattaaggtgagcggtctcttggtccttgactactcaaaggactataaccactggcttgccaccaagtccctcggccaatggcttcaagaggaaaaggttcccgcaatttatggcgtggatacacgcatgcttaccaagattattcgggacaagggaacgatgttgggcaagatcgagtttgagggtcagcctgtggactttgtcgatcccaacaaacagaacctgatcgcggaagtttctacgaaggatgtaaaagtgtatggaaaaggcaatccgactaaggtggtggctgtagactgcggcatcaagaataatgttatccgccttctcgtcaagcgaggtgccgaagttcacctggtcccatggaatcatgatttcacgaaaatggagtacgatggcattctgattgctggcggtccgggtaacccggcgttggctgagccgctcatccaaaacgtgcgcaaaatactggaatctgacaggaaagagccattatttggaatcagtaccggaaatctgatcacgggtcttgcagcgggcgctaaaacttataaaatgtctatggcgaaccgtggtcaaaatcagccggtactcaatattacgaataaacaagctttcataacggcacaaaaccatggctacgcattggacaacacgcttcccgcaggatggaaaccactttttgtgaatgttaatgaccaaaccaatgagggaatcatgcatgaaagcaagccattctttgccgtgcaattccatcctgaagttacacccggtccgatagacaccgaatatttgtttgacagtttcttcagtttgatcaagaaaggaaaggcgaccactattacctcagtccttccgaagcctgctcttgttgcttcccgtgttgaagtgtccaaggtcttgattctgggaagtggcggcctttcgatcgggcaggcgggagagtttgactattcaggcagccaggcagttaaggcaatgaaggaggaaaacgttaagactgttctgatgaatcccaatatcgcttcggtacaaaccaatgaagtcgggctgaaacaggccgacacagtctacttcttgcccattacgccccagtttgtcacagaagtcattaaagcggaacaacccgacggtctcatccttggaatgggagggcaaaccgctttgaactgtggcgtagagcttttcaagagaggtgtgttgaaagagtatggagttaaagtgttgggtacatcagtcgagtctattatggctacagaggatcggcagctttttagtgacaagttgaatgaaataaacgaaaagatcgcaccatcgtttgccgtggaatcaatcgaggatgccctgaaggcggcggacaccattggttatcccgtgatgataagatccgcctatgctttgggcgggctgggatcaggaatttgtcccaatcgcgagaccctgatggacttgtcaacgaaagcttttgccatgactaatcagatcctcgttgaaaaatcagtaacggggtggaaggagatcgaatacgaggttgtccgtgatgcggacgacaactgtgtcacagtctgtaacatggagaacgtggatgccatgggcgtgcatactggtgattcggtggtggtggcgcctgctcaaaccctttcaaacgccgagttccagatgctccgacgcacgtcgattaacgtagtgagacacctagggatcgtgggagaatgcaatattcagttcgcactgcacccaacttccatggaatactgtattatcgaggtcaatgcgcgtctctctcgttcgtcagcacttgcttccaaagctacgggctacccactagccttcatcgcggctaaaattgcacttggtatcccactgccagagatcaaaaatgttgtatcgggcaaaacctctgcttgcttcgaaccttccttggattatatggtcacaaagatcccaaggtgggatctggatcgctttcatggcacctcgagccgcattgggtcgtcgatgaaatccgtgggcgaggtcatggccattggccggacatttgaggaaagctttcaaaaggctcttagaatgtgtcacccgagtatagagggattcacccctcgactacccatgaacaaggagtggcctagcaacctcgacttgcgaaaggagctctcggagcccagctcgaccagaatttacgccatagctaaggcgattgacgataacatgtccttagacgaaatcgagaaattgacttatatcgataagtggttcctctacaagatgagggacatcttgaacatggagaagacattgaaaggactgaactcagagtctatgacggaggaaaccctaaagagggccaaggagattggtttttcagacaagcaaatttcaaagtgtcttgggctgaccgaggctcagacgcgagagttgcgccttaagaagaatattcacccctgggtcaaacaaatcgataccctggctgccgaataccccagtgtgacaaactacctctatgttacatataatggccaagaacatgacgtcaactttgatgatcatggaatgatggtgctaggttgcggtccatatcatataggctctagcgtcgaattcgattggtgtgccgttagttcgatccgaacgctccggcagcttgggaaaaagactgttgtggttaactgtaatccggagaccgtatcgacagacttcgatgagtgcgataaactttacttcgaggaactatcactcgaacggatcctcgatatataccaccaagaggcctgtggcggatgtatcattagtgtcggcggacaaatcccgaacaaccttgccgtacccctttacaagaatggtgtgaaaattatgggtactagtccactccaaatcgaccgcgccgaggatcgatctattttctctgctgtactggatgagctcaaggtggcacaagcgccttggaaagcggtaaatactcttaatgaagccctggaattcgcaaagtctgttgactacccatgtttgttgcgtcccagctatgttttgtcaggctctgccatgaatgtcgtcttcagcgaagatgagatgaaaaagtttctggaggaagccactcgcgtcagccaggagcatccagtagtcctgacaaagttcgttgaaggtgcccgcgaagtcgaaatggacgctgtggggaaggacgggagagtcatctcacacgccatctctgaacatgtcgaagacgcgggcgtgcactctggcgatgctaccttgatgctccctactcagactatttctcaaggagcgattgagaaagtcaaggacgctacacggaagatcgctaaggcattcgccatctctggaccattcaacgtgcaattcctggtaaagggtaatgacgtcttggttatcgagtgtaacttgcgcgccagtcgctcctttccattcgtgtccaagactctcggagttgatttcattgacgttgctactaaagtgatgatcggagaaaacgtcgatgaaaaacatctgcctacactagaccaccccattatacctgctgactacgtggcaataaaggcacctatgttcagctggcctcgactccgcgacgctgacccaattctgcggtgtgagatggcttccaccggcgaagttgcctgctttggggagggtatccatactgcatttttaaaagccatgctgtcgacgggtttcaagatcccgcagaaaggcatcctcattggcatccagcagtcgttccggcccagatttttaggggttgccgaacaactgcacaatgaaggttttaaactcttcgcgaccgaggctacctctgattggctaaatgctaacaatgtccctgcgaccccagttgcgtggcccagccaggaaggacagaacccctcgctgagctcaattcgcaagcttatcagggatgggagcatagacctcgttatcaacttgcccaataacaataccaagtttgtccacgataactacgtgatccggcgcactgcggttgactctggtataccattgctcacgaacttccaggtaactaagttgttcgctgaagccgtccagaaaagccgtaaggtggactcaaagtcgctgttccactatcggcaatattccgccggcaaagccgca

SEQ ID NO: 43559 - DNA, 4500 bp, Artificial Sequence
  derived and/or modified sequence
atgaccagaatattgacagcctttaaagttgtacgtacccttaaaaccggctttggtttcacgaacgtcacagcgcatcagaaatggaagttttctagaccgggaattagactgctatcagtcaaggctcagacagcacacattgttttggaagatggcaccaaaatgaagggatactcttttggtcatccgtcatcggtggctggagaagtagtttttaacacaggtcttggaggctacccagaggccattactgatccagcatataagggacaaattctcacaatggcaaaccccatcataggaaacggaggagctccagatacgacagcccttgatgaactcggactgtccaaatatcttgagtcgaatggaattaaggtttctggattacttgttctcgactatagtaaggactataaccactggctggcaaccaaatccttgggacagtggctgcaagaagaaaaagttccagcaatttacggagtggataccaggatgcttacaaagatcattcgagataaggggaccatgttaggaaaaatagaatttgaaggacaaccagtagattttgttgatccaaacaaacaaaatcttatcgctgaggtttctactaaagacgtcaaggtttatggaaaaggaaatccgacaaaagttgtggctgtggattgtggaattaaaaataatgttattcggttgctggtgaaacgaggagctgaagttcatttggtgccatggaaccatgactttactaaaatggagtacgatggtattcttattgctggaggcccaggaaatccggctctcgctgagccattgattcaaaatgtccgaaaaatacttgagtctgatcgtaaagagccattgttcggaatatcgacgggaaacttaatcactggattagccgccggtgcaaagacctataaaatgtcaatggcaaatcgaggacaaaatcaacctgtgttgaacattacaaataaacaagcctttattacagctcaaaaccatggttacgcattagacaatacacttcctgccggttggaagccattgtttgttaatgtcaacgatcagactaatgaaggtattatgcatgagtcaaaaccgtttttcgccgtccagttccatcctgaagtgacacctggaccaatagatactgaatacctcttcgattcgtttttctctcttattaaaaaaggtaaagccactacaattacgagtgtactgccaaagccagctcttgttgcctcaagagtcgaagtctcaaaagttctaatcctcggtagcggaggacttagtattgggcaggctggagaattcgactacagcggatctcaagctgtgaaagcaatgaaagaagagaacgttaaaactgttctaatgaaccctaatattgcatcagtccaaacgaatgaagtcggactgaaacaagcagacacagtctatttcttgccaattactcctcaattcgtgactgaggtgattaaagcagaacagccagatggattgattttggggatgggaggtcaaacggcccttaattgcggagtcgaattgtttaagagaggagtgctcaaagaatatggcgttaaggtccttggtacatcagtcgaatcaatcatggctacagaggacagacagcttttttctgacaaactaaacgagatcaatgagaaaatagcaccatcgtttgctgtggaatcgatcgaagacgctttgaaggcagccgacactattgggtatccagttatgatacgatctgcgtatgcactgggtgggctgggatcgggaatttgtccgaatcgggagacattaatggatctatcgacaaaggcatttgcgatgactaatcaaattttagttgaaaaatccgtgaccggctggaaagaaatagaatatgaagttgtccgtgatgcagatgataactgcgttacggtttgtaatatggaaaatgtcgatgcgatgggagttcatactggagactcagttgtggttgcaccggcgcagactttatcaaatgctgaatttcagatgcttagacgcacctcgattaacgttgttcggcacttgggaatagtcggcgaatgcaatatccaattcgctttgcacccaacgtctatggaatattgtattatcgaagttaatgcaagactgtcaaggtcctcggctctagcttctaaagcgaccggatatcctttagcctttattgcagccaaaattgcacttggaattccattgccagaaattaaaaatgttgtgagcggtaaaacttccgcatgctttgaaccgtcactagattatatggtgacaaagattcctcgttgggacctagacaggttccatggaacgtcaagcagaatcggcagttcaatgaaatcagttggagaagtgatggctatcggtcgtacgtttgaagagtcgttccagaaagcgttgcgtatgtgtcacccaagcatcgaaggattcacgccacgcttgcctatgaacaaagaatggccaagcaatcttgatcttaggaaagaactctcggagccgtcatcaacacgtatctatgcaattgccaaagctatagatgacaacatgtctcttgatgaaattgaaaaacttacttacattgacaagtggtttctttataagatgagagacattctcaacatggaaaaaactctcaaaggactgaactctgaatcaatgaccgaggagacacttaagcgggcaaaagagatcggtttttccgataaacaaattagtaaatgcttgggactgacggaagctcaaacccgtgaattaagacttaaaaagaacatacacccatgggtgaaacaaatcgacaccctcgcagccgagtatccatcggtgacaaattatttatatgtcacatataatggacaggaacatgatgttaattttgatgatcacggcatgatggtcctaggatgcggtccgtaccatattggttcttcagtggagtttgactggtgtgcagttagcagtattagaactcttcgccaattgggaaaaaaaacagttgttgtgaattgcaaccctgaaactgtgtcaacggacttcgacgaatgtgataagctgtattttgaggaattgtccctcgagcgtattctcgatatttatcatcaggaagcctgtggtggttgcattatctctgtaggaggtcaaattcccaacaacttagcagtgcctttgtataagaatggagtcaaaataatgggtacttcgccccttcagattgatcgtgcagaggataggtcgatattttcagctgtacttgatgagctcaaggttgcacaagctccatggaaggcagtgaacactcttaatgaggctctagaattcgccaagtctgtcgattatccgtgcctccttcgcccttcgtatgtcctctctggatctgctatgaatgttgtcttctccgaagatgaaatgaagaaatttcttgaagaagcgactagggtgagtcaagagcacccggtcgttttgacaaaatttgtggaaggcgcccgagaagttgagatggatgctgtggggaaggacggaagagttattagtcatgctatttcagagcatgtagaagatgcaggcgtgcattccggagacgcaactttaatgttgccaacccagaccatttcacaaggggcaatcgaaaaggtcaaggacgcaacaagaaaaattgctaaggccttcgccatatcaggaccattcaacgtccaatttttggttaaaggaaacgacgtgctggttatcgaatgtaaccttcgtgcttctcgatcgttcccgttcgtctctaaaacactcggagttgattttatcgatgtggctacaaaagttatgattggagagaacgtggacgaaaaacatctacccaccctcgaccatccgattataccagctgattatgtggcaattaaagcgccaatgttctcctggccacgtctgagggatgccgaccccattttgaggtgtgagatggcttccacgggagaagttgcgtgttttggggaaggcatacatacggcttttttgaaagctatgttgtctactggatttaagataccacaaaagggtatactaatcggcattcaacaatcgttcagacctagattcctgggagtcgcagaacaattgcacaatgaagggttcaaattgttcgccacggaagctacatcagattggttgaacgctaataacgtgcctgccaccccagtggcttggccttctcaggaaggccaaaatccttctttgtcttcaattcgtaaattaattcgtgatggaagcatagatctcgttatcaacttgccgaataacaacacaaagtttgttcatgacaattatgttatccggagaacagcagtggactctggaattccactgctgaccaactttcaggttactaagttgttcgccgaagctgtccaaaaatctcggaaagtcgactccaaaagtctttttcattaccgtcaatattcagctggaaaagcggca

SEQ ID NO: 43560 - DNA, 4500 bp, Artificial Sequence
  derived and/or modified sequence
atgaccagaatacttacggccttcaaggtcgtcagaaccctgaagactggcttcgggttcaccaatgtgacagcacatcaaaagtggaagtttagtagaccaggaatacggctcttgtctgtaaaggcacagacagcacacattgtgcttgaggatggcacaaagatgaaggggtattccttcggtcacccgtcttccgtggctggggaagttgtgtttaacactggtttgggtggctaccctgaggctatcaccgatccagcatacaaaggacagatcttgaccatggctaaccccatcataggtaatggaggcgctcctgacacaacagccctggatgagctgggcctctccaagtacctcgagtccaatgggatcaaagtgtcagggctgctggtgctggattactccaaggactacaaccactggctggccaccaaatcacttggtcagtggctgcaggaagagaaggttcccgccatatacggagtagataccaggatgctgactaaaattataagggacaaaggcaccatgctgggcaagatagaattcgaggggcagccagtcgactttgtggatcctaacaaacaaaacttgatcgcagaggtgagcaccaaagatgtgaaagtttatggaaaaggcaatcccactaaagttgttgcagtcgactgtggaatcaaaaacaatgtgattcggttacttgtcaagaggggagctgaggttcatctggtcccttggaatcatgactttacaaaaatggaatacgacggcattcttatcgcaggtggccccggaaaccccgctctggcagaacctctcatccagaacgtgcggaagatactcgagtcagaccgaaaagagccacttttcgggatcagcaccggcaacttgatcacaggtctggccgcaggagctaaaacctacaaaatgagcatggctaatagggggcagaaccagcccgtgctcaacatcaccaacaaacaagcgttcatcaccgcgcaaaaccacggctacgccctggataacaccctcccagccggctggaagcctctcttcgtcaacgtgaacgaccagaccaacgagggaataatgcacgagagcaagcccttcttcgcagtccaattccaccctgaggtcacccctgggcctatcgataccgagtacttatttgacagtttttttagtctgattaaaaaggggaaggccacaaccattaccagcgtcctgccaaaacctgccctggtggcgtctagagtggaggtgtccaaagtgctgatacttggctctggcggcctttcaatcgggcaagctggagagttcgactattcaggctcacaggcggtgaaagctatgaaagaggagaatgtgaaaacagtacttatgaatcctaacattgcctctgtccaaaccaatgaagtcgggctgaaacaagccgatacggtctacttccttcccatcactcctcagtttgtgactgaggtcatcaaagcagaacaacctgatggcctgatcctcggaatgggtggccaaaccgcattaaactgcggggttgaactcttcaaaaggggcgtgctgaaagaatatggagtgaaagttctgggaacatctgtggagtccatcatggctaccgaggatagacagttgttcagcgacaagctcaacgaaattaacgagaaaatagcaccttccttcgccgtcgaaagcatcgaggatgctctgaaggcggccgacacgatcgggtatccagtgatgattaggtctgcatacgccttgggaggccttggatctgggatatgcccaaaccgcgagacactgatggacctgtcaacaaaagcatttgccatgactaatcagatcctagtggagaaatccgtaaccggctggaaggagatagaatatgaagtggtcagggatgctgatgataactgcgtgaccgtctgtaacatggagaacgtcgatgccatgggggtgcatacaggcgactcggttgttgttgcgccagcacagacactgtccaacgccgagtttcaaatgttgcgcaggaccagcattaatgtcgtgagacacctcggcattgttggcgagtgtaacatccagtttgccctgcatcctacatccatggaatattgcatcattgaagttaacgccaggctttcgagaagcagcgctttggccagcaaagctaccggatatcccctggccttcatagctgctaaaatcgcacttggaattcccctgccggagatcaagaacgttgtaagcggcaaaaccagtgcatgtttcgagccatcactcgactacatggtgacaaagattccaagatgggatctcgataggtttcatggcacttccagccgcatcggatcctcaatgaagtcagtcggtgaggtgatggcaattggtaggacattcgaggaaagttttcagaaagccttgcgaatgtgccatccctctatcgaggggttcacacctagactaccaatgaacaaagagtggccatctaacttggatttaaggaaggaattgtccgaaccatctagcaccagaatttacgctatcgcaaaagcaatagacgacaacatgtcattggatgaaatcgaaaagttaacatatattgacaaatggtttctgtacaagatgagagatattctaaacatggagaaaaccctcaagggactcaacagcgagagcatgacagaagagaccctgaagagggccaaagaaataggcttctctgataagcagatcagcaaatgcctggggctcaccgaagcacagacaagggagctgagactcaaaaaaaacatacacccctgggtgaaacagattgatacactggcagcagagtatccaagcgtcactaattacctgtacgttacttataacggtcaggagcatgacgtgaactttgacgaccatggcatgatggttttggggtgcggaccgtaccacattggtagcagcgtggaattcgattggtgtgccgtgagttctatcagaacactgagacaactgggaaaaaaaaccgtcgtggttaactgcaacccggagactgtgtccaccgattttgacgagtgcgataagctgtacttcgaagagctgagcctggagaggatcctcgacatataccaccaggaggcgtgcggggggtgcataatttccgttggcgggcagatcccaaacaacctggccgtgcctttatataaaaatggagtaaaaatcatgggaaccagtccactgcagatcgaccgcgcagaagataggtccatatttagcgcagtgctcgatgagctcaaggtagcccaggccccatggaaagccgtcaatacgcttaacgaggcactggagtttgcaaaatcagtcgactatccctgtcttttgcggcctagctacgtgctgagcggcagcgcaatgaatgtcgttttttcagaggatgagatgaagaagtttctggaggaggcaactagggtctcacaggagcaccctgtggtgctgactaagtttgtggagggggctagagaagtcgagatggacgctgttggcaaggatggcagagtgatcagccacgccatttctgagcacgtcgaggatgctggcgtgcatagcggcgacgctacactgatgctgcctacgcagacgatctcacagggcgcaatcgagaaagtaaaagacgccactaggaagatcgccaaagcattcgccatctcaggcccatttaacgttcagtttttggtgaagggcaacgacgttctggtaattgagtgcaaccttcgtgcttccagatcatttccgttcgtttccaagactctcggagtcgattttatagacgtcgccactaaagtgatgattggcgagaatgtggatgagaagcacctccctaccctcgatcacccaattatccccgcagattatgtcgctatcaaggccccgatgttctcttggccgaggctgagagacgctgacccaatcttgaggtgtgaaatggcctctacaggcgaagtcgcatgcttcggggaaggtatccatacagcttttttgaaggccatgttgagtactggtttcaaaatccctcaaaagggaatcctgatcggaattcaacaaagcttcaggccaaggttcctgggagtggctgaacaactgcataacgaaggtttcaagctgtttgctactgaggccacaagcgattggctcaatgctaataatgttccagcgacccccgtggcttggcctagccaggaaggtcagaacccaagtctgtctagtatcaggaagctgatccgggatggatccatagatctcgttatcaaccttcctaataataataccaagtttgtgcacgataactatgtcattcggcgaactgcagtggatagcggaattcccctactgacaaactttcaagtgacaaagctctttgctgaagctgtccagaagtctagaaaggtcgatagcaagagcctgtttcactacaggcagtattctgcggggaaagcagca

SEQ ID NO: 43561 - DNA, 4500 bp, Artificial Sequence
  derived and/or modified sequence
atgacccgaattttgactgcttttaaggtagtcaggactctgaaaacagggttcggatttactaacgtgactgcgcatcagaaatggaagttttcccggccaggcattagactactctcagtaaaagcgcagacggcacacattgtactggaagatggaacaaaaatgaagggatattcatttggccaccccagtagtgtggctggagaagttgttttcaacaccggacttggagggtatccagaggctatcaccgatccggcttacaagggtcagatccttaccatggctaatccgataatcggaaacgggggggcaccagacacgacggccttggacgaactgggattgtccaaatacctggaatctaatggcattaaggttagcgggctgctggtgctcgactactccaaagattacaaccactggctagccaccaagtcgttagggcagtggctgcaggaggaaaaggtgcccgcaatttatggggttgataccaggatgctgaccaagattattagggacaagggcacaatgctgggcaagatagagtttgaaggccaacccgtagacttcgtggatcctaataagcagaatctcatagctgaggtgtccacaaaagacgtgaaggtgtacggcaaggggaacccaacaaaagtagtcgctgttgactgcggcattaaaaacaatgtcatcagactcctggtcaaaaggggcgccgaggtgcacctagttccttggaaccatgactttaccaagatggaatatgacggcatccttatcgccggaggccccggtaatccagccctggccgaacctctcattcaaaacgtaaggaaaatacttgagagtgacagaaaggaaccactcttcggaatctcgacaggcaacctgatcacaggcctcgcagcaggagctaaaacatataagatgtcgatggctaacaggggacagaaccaaccagttctgaacatcactaacaaacaggccttcataactgcccagaaccacggctacgccctggacaacacgctgcccgcgggttggaaaccattattcgtcaacgtcaacgaccaaacaaatgagggaatcatgcacgagtcaaaaccttttttcgcagtccaattccaccccgaagtcaccccaggccccatcgatacagaatacttattcgacagtttttttagtttaatcaagaaggggaaagcaaccactatcactagcgtgctaccaaagccagcactggtagctagcagggtcgaagtctccaaagtccttattctggggagcggggggctgagcatcgggcaggccggagagttcgattacagtggaagtcaggctgtgaaagccatgaaggaagaaaatgttaaaacagttctgatgaatcccaacattgccagcgtacaaacgaatgaggtcggcctcaagcaggcagatacggtgtacttcctgcctattacgcctcagtttgtgacagaagtcataaaggccgagcagccggacggcctcattctcggtatgggaggccagactgcacttaattgcggagttgagctgtttaagagaggcgttctaaaagagtatggtgtaaaggtacttggaaccagcgtggaatcaattatggcgaccgaggacaggcagttattcagtgacaagcttaatgagatcaacgaaaaaattgccccatctttcgccgttgagtcaatcgaagatgctctcaaagcagccgatacaatcggttaccccgtcatgatacgctctgcctacgccctcgggggcttgggaagtgggatatgtcccaaccgtgagacattaatggatctgtcaacaaaggcttttgcaatgactaaccagattctggtggagaaatccgtgacggggtggaaggagatcgagtacgaagttgtcagggacgctgacgacaactgtgtgacggtgtgtaacatggagaacgtcgatgccatgggggtacatacaggcgacagcgttgtagtggcccccgcgcagacattgagcaatgccgaattccagatgctacgcagaacgtccattaacgttgtaaggcacctgggaatcgttggcgagtgcaacatccagttcgccctgcacccaacctcaatggagtactgtatcattgaggtcaatgccaggctgtcccggtcatcagcactggcttcaaaagccacaggatatcccctcgcattcattgcagccaagatagccctaggcatacccttgccagagatcaaaaatgtggtatctggtaagacatctgcctgcttcgaaccttccctggattacatggtcactaaaatccctcgctgggatctcgatcggtttcacggcacctcctccagaatagggtcctccatgaaaagcgttggcgaggtgatggcaattggacggacattcgaggagagttttcagaaggcgcttcggatgtgccatccttctattgagggtttcaccccaaggctcccgatgaacaaggaatggccctctaatctggaccttaggaaagaactaagcgaaccatcttcaacacgcatctatgccattgctaaagctatagacgataacatgtctctggatgagattgaaaagctgacctatattgataaatggtttctgtacaaaatgcgagacattctcaatatggaaaagaccttgaagggactcaatagcgaatccatgacggaggagacactgaaaagggcaaaggaaatcggtttttccgataagcagattagtaaatgtctgggcctcactgaagctcagacgagagagctgcgattgaagaaaaatatccacccctgggtgaagcagattgacacactcgctgctgagtatccctctgtaacaaattacctctatgtcacctacaacgggcaggagcacgacgtgaactttgatgaccacggcatgatggtgctcggatgcggtccttaccacattggatcctctgtcgagtttgactggtgtgctgtgtcatctattcgcacactgaggcagctcggcaagaaaacagtcgtggtgaactgcaacccagagactgtgtcaacggattttgatgagtgtgacaagctgtactttgaagagcttagtctcgaacgaattctcgacatatatcaccaagaggcctgcggcgggtgcataatcagtgtcggtgggcaaattcctaataacctggctgtgccactatacaaaaacggggtgaaaataatgggtacctcaccgctgcagatcgacagggcagaggatagatcgatctttagcgcagtcttggatgagctcaaggtcgcgcaggcgccttggaaagccgttaatactttgaatgaagccctggagttcgctaaaagcgtagactacccttgtctgctgcgcccatcctatgtgctgtctggtagcgcaatgaacgtggtcttctcggaggacgagatgaaaaaattcctggaagaggcgactcgggtaagtcaagagcatccagtggtgctgacaaagttcgtggagggcgccagagaagttgagatggacgccgtggggaaggacggcagggttatctcgcacgcaatttccgagcacgtggaagatgccggggtgcattcaggcgatgcaaccttaatgttacccacgcagaccatttctcagggggctattgagaaagtcaaggacgcaacacgcaaaattgccaaagcctttgctatcagtgggccctttaatgtgcagttcctagtcaagggaaacgacgtgctcgtgatcgagtgcaacctcagagcctctcgttcatttcccttcgtgtccaaaacactaggcgtggatttcatagacgtcgccactaaagtcatgatcggggagaatgtggatgagaaacacttgcccacactcgatcaccccattatccccgcggattacgtggccattaaggctcctatgttttcttggcctagactgcgcgatgctgacccgattttgaggtgtgagatggcttcaaccggggaagtggcatgctttggcgagggaattcacactgcgtttctgaaggctatgctatccaccggattcaagattcctcaaaaaggcatcctgattggcatccagcaaagtttcagaccccggttcctgggggtggccgaacagttgcacaacgaagggttcaaactgttcgctaccgaggccacttctgactggttgaacgccaacaatgtgcccgctacacctgtggcctggccctcgcaggaaggtcagaatccgagcctatcctctattagaaagctgataagggatggtagcatcgacctcgtcatcaatctgccaaataacaatactaaattcgtgcacgacaattatgtgattcgccggactgccgtggacagtggaatacccctgctgacgaactttcaggtgacaaaactttttgcagaagctgtgcagaagagccgcaaggtggattctaaatctctgtttcactaccggcagtacagcgccggaaaggcagcc

SEQ ID NO: 43562 - DNA, 4500 bp, Artificial Sequence
  derived and/or modified sequence
atgacacgaattcttacggcttttaaggttgtgaggactctgaagactggcttcggttttaccaatgttacagcccatcagaagtggaagttttcgcgtcctggtatccggcttctcagcgtcaaagctcaaaccgctcacatagtcttagaggatggcactaagatgaagggttactcctttggtcacccatccagcgtagctggcgaagttgtgttcaatacaggattgggaggttacccagaagctattaccgaccccgcatataaggggcaaatcttgacgatggcaaatcctattatcggcaacgggggagcccctgatacaacggcactggacgaactaggactatctaaatacctcgaaagtaatggaatcaaagtttctggcttgcttgtgctcgattattcaaaggattataatcattggctagctactaaatctttaggccaatggcttcaagaggagaaagtacctgctatctatggagtggacaccaggatgcttaccaaaatcataagagataaaggcacaatgcttggcaaaattgagtttgagggtcaacccgtcgattttgttgatcctaacaagcagaatcttattgccgaggtttctacaaaagatgttaaggtttatggtaaagggaatcctactaaggttgtcgcagttgactgtggtataaagaataatgtgatcaggttgttggtcaagagaggtgctgaggtgcacctcgttccttggaatcatgattttaccaagatggaatacgatggtatactgatcgccggtggtcctggtaatcctgctcttgcagaacctttgatccaaaacgttagaaaaattttggaatccgaccgtaaagaaccacttttcggtatcagtacgggtaacttgatcacaggtcttgctgcaggagccaagacttacaagatgtctatggctaatagaggtcagaatcagccagttctcaatattactaacaagcaggcattcatcaccgcacaaaatcacggttacgccttggataacacgcttcccgcaggatggaaaccacttttcgttaatgtaaacgaccagactaacgagggaattatgcacgaaagcaagcctttcttcgccgttcaatttcatcctgaagttactccagggcccattgatacagagtacctgtttgattccttttttagtcttataaaaaagggtaaggctactacaatcactagcgttctaccgaagcccgcacttgtggctagccgcgtagaggtatccaaggttcttatccttggtagcggaggactttccattggccaggctggcgagtttgactactcaggatctcaggcggtcaaggccatgaaggaagaaaacgtgaaaactgttcttatgaatccgaatattgcgtccgttcagacgaacgaagtagggctgaagcaggcagatacagtgtattttctgccaataacacctcaattcgtcacagaagtcattaaggccgaacaacctgatggtttgattttgggaatggggggtcagacagctcttaattgcggcgtggagctctttaagcgaggcgtgttgaaagaatatggtgtaaaagtgctgggcacaagtgttgaaagtatcatggctaccgaagacaggcaacttttttccgataaattaaatgagatcaatgaaaagatagctccatcattcgctgttgaatcaatcgaagacgctcttaaagccgcggatacgattgggtatcctgtgatgatccgcagcgcctacgccttgggagggttgggaagtggcatctgccctaatagagaaactcttatggatttgtcaacaaaagcttttgccatgactaaccaaattctcgttgaaaagagtgtgactggatggaaggagatagaatacgaggttgtcagagatgctgatgataactgtgtgactgtttgtaatatggaaaacgtagatgctatgggtgttcacactggggattcagttgttgtggctcctgctcaaaccttgagcaacgcagaattccaaatgttgaggagaactagcattaacgtggtgagacatttggggatagtgggtgaatgcaacatccagtttgctcttcatcctactagtatggaatattgtatcatcgaggttaatgcgaggctaagtaggagcagtgccctggcatcaaaggctaccggttatcctcttgcgttcatcgcagcaaagatagctcttggcattccattaccagagatcaagaacgtagtatcaggtaaaacatctgcttgcttcgaaccatcattagattatatggtgacaaagataccacgctgggatcttgatagattccacggaacctcaagcagaatcgggtcatctatgaagtcggttggagaagtgatggcgattgggcgtactttcgaggagtcattccagaaggcactccgcatgtgtcatccttctattgaaggctttacacctcggctccctatgaacaaagagtggcctagcaacctagacttgcgtaaagagttgtcagagccttcttcaacgaggatctatgcaattgccaaagcaattgatgataacatgtccctagatgaaattgaaaagcttacatatatcgataagtggttcttgtataagatgagggatatcttgaacatggaaaagaccctaaagggtctaaacagtgagtcaatgactgaggagacccttaaacgggcaaaggaaatcggattcagtgataaacagatctcaaaatgtcttggattgacagaggctcagacaagagaactgcggttgaagaaaaatattcatccttgggttaaacagatcgatactttggccgcagaatatccttcggtgacgaactatctttatgtcacctataacggccaggaacatgacgtcaatttcgacgaccatgggatgatggttctgggatgtggtccatatcacataggtagctctgtcgaatttgactggtgtgccgtgtccagtatccgaactttgagacaattaggaaaaaaaacagtcgttgtgaactgtaaccctgagaccgtttccacggattttgatgagtgcgataaactgtactttgaggaactctcactggagcgaatcctcgatatttaccatcaagaggcatgtggtggttgcattatatcagttggagggcaaattccaaacaacttggctgtgcctttgtataaaaatggtgtgaagatcatgggcacgtctccactccagattgatcgagcggaagataggtccattttttcagctgttttggatgagttaaaagtggcacaggccccatggaaggccgttaacaccttgaatgaagcactcgagttcgctaagagtgtcgattatccatgcctcctgagacccagttatgtactttcaggatccgcaatgaatgtggttttttctgaagatgaaatgaaaaaatttcttgaagaggctacgcgagtttcccaggaacatcctgtggttttaactaaatttgttgagggtgctcgtgaggtggagatggatgctgtaggaaaagacggcagggttatttcccatgcaatatcagaacatgttgaggatgcgggggtgcactcaggagacgcaactctcatgcttccaacacaaaccatatcccagggagcaatcgaaaaggttaaggatgcgaccagaaaaattgcaaaggcgttcgctatctccggaccctttaacgtgcagtttttagtgaaaggcaatgatgtccttgtcatagagtgcaacctgagagcatcaagaagctttccttttgttagtaaaactcttggtgtggactttattgacgttgctactaaggtaatgataggggaaaacgtggatgaaaaacatctacctacacttgatcatccaataattcctgctgactatgttgctataaaggcaccgatgttctcttggccaaggctgcgtgacgcagatcctatcttgcgatgtgaaatggcttctactggagaagttgcctgttttggagaaggaattcatactgcctttctgaaggcaatgcttagtactgggttcaagatcccacagaaaggcatcttgataggtatacagcagtccttccgtcccagatttttgggtgttgcagagcaactccacaacgaagggttcaagctttttgcaacagaggcaacctccgattggttgaatgctaacaacgttccggctacacctgttgcatggccatcacaggaaggccagaatccgagcctttctagtatcagaaaactcatacgtgatggttcaatagatttggtcattaatctccccaacaataacactaagttcgttcatgataattacgtcattagaagaactgcagttgatagcggtatccctctcctcactaattttcaggttaccaagttgttcgctgaggcagtgcagaagtcgaggaaagtcgatagtaaatccttatttcactatcgacaatactccgctggtaaggctgct

SEQ ID NO: 43563 - DNA, 4500 bp, Artificial Sequence
  derived and/or modified sequence
atgaccagaatcctgactgctttcaaggtggtgcggaccctgaaaactggattcggattcactaatgtaaccgcccaccagaagtggaagttctcccgcccaggaatccgactcctgtccgtcaaggcccaaaccgcacatatcgtgttggaggacggcaccaagatgaaaggatactcctttggccacccctcgagcgtggcaggtgaagtggttttcaatacgggcctcggaggctacccggaagcgatcactgatccagcttacaaaggccagatcctgactatggccaatcctatcatcggaaacggcggagccccggacacgaccgcgctggacgaactgggcctgtcgaagtacctggagtctaacgggatcaaagtctccggtctgctggtgctggactactccaaggattataaccattggctcgcaaccaaaagtctgggccagtggctccaggaggagaaagtgccggcgatctacggggtcgacactcggatgctgaccaagattatccgcgataaagggacgatgctgggtaagatcgagttcgaaggccaaccggtcgacttcgtggatccaaacaagcagaacctgatcgcggaggtgtcgacgaaggacgtgaaagtgtacggtaagggaaaccctaccaaggttgtcgccgtcgattgcggtatcaagaacaacgtgatccgccttctggtgaagcggggagcggaggtgcatctggtgccctggaaccacgatttcactaaaatggagtacgatgggatcctcatcgcgggaggacctggtaatcctgccctggccgaaccccttatccagaatgtgcggaagatattggaaagcgacagaaaagagccgctgtttggaattagcaccggaaacctgatcaccggattggcagcaggggccaagacttacaagatgtctatggcgaatagaggccagaaccagccggtgctgaacatcactaataaacaggcttttatcactgctcagaatcatggctacgccctggacaatacgctgccagcaggctggaagccactgtttgtgaacgtgaacgaccaaaccaacgaagggattatgcatgagtcaaagccgttctttgccgttcagtttcaccctgaagtcacgccgggacctatcgacactgaatacctgttcgatagcttcttctcgctgatcaagaaggggaaagcaaccactatcactagcgtgctgcccaagccggcactcgtcgcatcacgcgtggaagtctccaaggtgcttatcctgggctcgggaggactctcgatcggacaagcgggtgagttcgactactccggaagccaggcggtgaaggccatgaaggaagaaaacgtgaaaacggttctcatgaacccaaacattgcttcagtgcagaccaatgaggtggggcttaagcaagccgacaccgtgtacttcttgccgatcactccgcagttcgtgaccgaagtgatcaaggccgaacaaccggatggcctcatcctgggaatgggcggccaaaccgccctgaattgcggagtggaactgttcaagagaggagtgctgaaggagtacggagtcaaggtgctcggcacctcggtggaatccatcatggcgaccgaagatcgccagctgttctcggacaaactcaacgagatcaatgaaaagattgcgccgtcgtttgctgtcgaatcgattgaagatgctttgaaagccgcagacacgataggatacccggtgatgattcgctcagcctatgccctcggcggcttgggatcgggaatctgcccgaaccgcgaaactctcatggacttgtccactaaagcatttgcgatgaccaaccaaatcctggtcgagaagtcggtgactggatggaaggaaattgagtacgaagtcgtgagggatgcggatgacaattgcgtgaccgtatgcaatatggagaacgtggatgcgatgggcgtccacactggagactccgtcgtcgtggctccggctcaaaccctgtcaaacgcagaattccagatgctgcggcgcacttccatcaatgtggtccggcatctcggaatcgtgggggaatgcaacatccaattcgcactccacccaacttcaatggaatactgcatcatcgaggtgaacgctcgcctcagccgctcatcggcccttgcgagcaaggctactggttacccgctggcgtttatcgccgccaagattgccctgggaattcctttgcctgagatcaaaaacgtagtctcaggtaagacctccgcctgcttcgaaccctcccttgactacatggttacgaagattccgcggtgggacttggaccgtttccacggaacttcgtcccgcatcggatccagcatgaagtcggtcggagaagtgatggcaatcggaaggaccttcgaagagagcttccaaaaagctctgagaatgtgccacccatcaatcgaaggattcaccccgcgcctgcccatgaataaggagtggccaagtaatctggatctgcgaaaggaactcagcgagccttcgagcactcggatctacgccattgcgaaggcgatcgacgacaacatgagcctggatgaaatcgaaaagctgacctatatcgacaagtggttcctttacaaaatgcgcgacatcctgaacatggagaaaactttgaagggactcaattcagagagcatgaccgaagaaaccctgaagagagccaaggaaatcggtttctccgacaagcagatctcgaagtgcctcgggctcactgaagcgcagactcgggaactgcggctgaagaaaaacatccatccttgggtgaaacagatcgacaccctcgccgcagagtacccgagcgtgaccaactacctgtacgtgacctacaacggccaagaacatgacgtgaatttcgacgatcacggaatgatggtcctgggatgtggaccataccacatcggctcatccgtggagttcgattggtgcgccgtgtcatcgatcagaactcttcggcaactgggtaaaaagacggtggtcgtcaattgcaatccagagactgtgagcactgattttgatgagtgtgacaagctgtacttcgaggaactctcactggagcgcatcctcgacatctatcaccaagaggcctgcggaggttgtatcattagcgttggagggcagatccctaacaacctcgctgttccgctttacaagaatggcgtgaagatcatggggacctctccgctccagatcgatcgtgcggaggaccggtcgattttctccgccgtgctcgatgaacttaaagtcgcacaggccccttggaaagcagtgaacactcttaacgaggccctggaattcgctaagtcggtggattacccatgcctgctgcgaccgtcgtacgtgctctccggtagtgccatgaatgtcgtgttctccgaagatgagatgaagaagtttctggaagaagccacccgggtcagccaggagcatcctgtggtcctgactaaatttgtggaaggtgctagagaggtcgagatggacgccgtcgggaaggatggacgggtgatttcacacgcaatcagcgaacatgtggaggacgcgggcgtgcattccggagacgccactctgatgctccccacccagactatctcccagggagcaattgaaaaagtgaaggacgccacccgcaagattgcaaaggctttcgctatctcgggaccgttcaacgtccagttcctggtcaagggaaacgacgtgctcgtgatcgagtgtaacctgagagcctcgcgcagctttccgttcgtgtccaagaccctgggggtggactttatcgacgtggccaccaaagtgatgatcggagagaacgtcgacgaaaaacacctgccgaccctcgaccacccaatcatcccagcggattacgtggcaattaaggcgccaatgttctcatggccaaggctccgcgatgcggacccgatcctccgctgtgaaatggcctccacgggcgaggtggcctgtttcggagagggaatccacactgccttcctgaaggctatgctttccaccggctttaaaatcccacaaaagggaattttgatcgggattcagcaatcgtttcggcctagatttctgggggtcgcggaacaactgcacaacgaaggctttaagctcttcgcaactgaggctacctcagactggctcaatgccaacaacgtgccagctacccccgtggcgtggccgtcgcaggaaggacaaaacccgagcctctcttccatccggaagttgatcagggatggctcaatcgacctcgtcatcaatttgccgaataataacactaagttcgtacatgataactatgtgatcagaaggaccgccgtggatagcggaatccccctcctgaccaacttccaggtcaccaagttgttcgcggaggccgtccagaaatcaaggaaagtcgactcgaagagccttttccactacaggcagtactcggcaggaaaggccgcc

SEQ ID NO: 43564 - DNA, 4500 bp, Artificial Sequence
  derived and/or modified sequence
atgacccgcattctgacagctttcaaggtcgtgcgcaccctgaaaacgggattcggcttcactaacgtgaccgcccaccagaaatggaagttctcgcgccccggtatcaggttactttccgtgaaggcccagaccgcgcacattgtattggaagatgggaccaagatgaaaggatactcgttcggtcaccccagttcagtcgctggagaggtggtattcaataccggcttgggtggataccccgaggccatcacagatcccgcctataagggacagatccttacgatggcaaacccaattattggcaatggtggtgctccggacaccactgcgcttgatgaacttggcttgtcgaagtacttggagtccaacggcattaaggtcagtggtctgctggttctcgactacagcaaggattacaaccattggctcgccaccaaatcccttgggcagtggctccaagaggaaaaggtccccgctatttacggcgtcgatacgcgtatgctgacgaagattattagggataagggcaccatgctgggcaagatcgagtttgaaggccaacccgtggacttcgttgatcccaacaagcagaacctcatagctgaggtgtccaccaaagacgttaaggtgtacggtaagggcaaccctaccaaggtcgtcgccgtagactgcggtatcaagaacaacgttatccgcctcctggttaagcgcggcgcagaggtgcacctggtcccctggaatcacgacttcaccaagatggagtatgatggaattcttattgccggaggtcccggtaacccggccttggctgagcccttgatccagaacgttcgtaagattctcgagtccgatcggaaggagcccctcttcgggatctctaccggaaacctgatcaccggcctggctgccggggccaagacttacaagatgagcatggcgaatcgaggacaaaaccagcctgtgctgaatatcacgaacaagcaggctttcatcaccgcacagaatcacggctacgctttggataacacgcttcccgctggctggaaacctctcttcgttaacgttaacgaccagaccaacgaaggtatcatgcatgagtctaagcctttcttcgcagtccaatttcatcccgaggtgacgcccggccccatcgacaccgaatacttatttgattccttcttctcccttattaagaagggaaaggccacgactattacgtccgtcctccccaagcctgcgctggttgcctcccgtgtggaagttagcaaggttctcatccttggctccggcggtctgagcattggtcaggctggcgagtttgactattcgggatcacaggcggtcaaagcgatgaaggaggagaacgtcaaaaccgtcttgatgaacccgaacattgcaagcgtccagacaaacgaggtgggacttaagcaggccgacaccgtctatttcctgcccattaccccccagtttgtcaccgaggtgatcaaggcagaacaacccgacgggttgatcctcggcatggggggccagacggccctgaactgcggcgtcgagttattcaagcgtggagtgcttaaagagtacggcgtgaaggtgttgggtacttcagtcgagtcgatcatggctaccgaagaccgccagctgttttccgacaagctcaatgagataaacgagaagatcgccccgtctttcgctgtggaatcaatcgaggatgccctgaaagcggctgacactatcggttaccccgtcatgattcgcagcgcttacgcgctcggaggcctagggtccggaatttgcccaaaccgggagacgctgatggatttatcgaccaaagccttcgccatgactaatcagatcctggtggagaagtccgtcactggttggaaggagatcgagtacgaagtcgtgcgcgacgcggacgataattgcgtgactgtctgcaacatggagaacgtcgatgctatgggcgtgcataccggtgactccgtggtcgttgcccccgctcagaccctctccaatgctgagttccagatgctccggcgcaccagtattaacgttgtcagacatttgggcattgttggtgaatgcaacatccaattcgccctccaccccacgtcgatggagtactgtatcattgaagtgaacgcgcgcctctcacgttcatcagcactcgcttccaaggctaccgggtacccgctcgccttcatagccgcaaaaattgctctgggaatcccactccctgaaataaaaaacgttgtcagtgggaaaacatctgcatgcttcgaaccttccctggattacatggttaccaagatcccccgatgggacctcgaccgtttccatgggaccagctcccgaattggcagttctatgaagagtgtcggcgaggtcatggccattgggcgaacgttcgaggagtccttccagaaggccctccgtatgtgtcatccatcgatcgaaggattcactccccgcctccctatgaacaaggagtggcctagcaacttggatctgagaaaggagctttccgagcccagctccaccaggatttatgccatcgcaaaggccatcgatgacaacatgtccctggacgaaattgagaagctcacctatatcgacaaatggtttttgtataagatgcgtgacatcctgaacatggaaaagacgcttaagggccttaactcggagtccatgactgaggagacccttaagcgagccaaggaaatcgggttcagcgacaagcagatctccaagtgcctcggcctcactgaggcacagacaagggaacttagactgaagaagaacattcacccctgggttaagcagatcgacactctcgctgccgagtatccttcggttacgaactacctctacgtcacctataacggccaggagcatgatgtcaatttcgacgatcatggaatgatggttcttggttgcggaccgtaccacattggtagctcagtcgagtttgattggtgcgcggtgtcgagcatcaggactctgagacagttgggaaagaaaactgtcgttgtcaactgtaaccccgagaccgtgtccaccgacttcgacgagtgcgacaaactatattttgaggagcttagtctggagcgcatcctcgacatttatcaccaggaggcttgcggcggctgcattatctcggtgggtggtcaaatccccaacaaccttgccgttcccctttacaaaaacggggttaagatcatgggcacctcccccctccagattgatcgtgcggaggaccgcagtatcttttccgcagtccttgatgaattgaaggtcgcccaggccccgtggaaggcggtcaacaccctgaacgaagcactggagttcgcgaaatccgtcgactacccgtgcctgctgcgcccgagttacgtcctgtccggcagcgctatgaacgttgtcttcagtgaggacgagatgaaaaagttcctggaggaggcaacccgggtctcacaagaacaccctgtcgttctcacgaagttcgtcgagggagccagggaggttgaaatggacgccgtcggcaaggacggaagggtcatctcacacgccatctccgagcatgtggaggatgctggagtccacagcggcgatgccaccttgatgctgcccacccagacgatcagccagggagccatagaaaaggtgaaggacgccactcgcaagatcgccaaggctttcgccatctcgggcccttttaatgtgcagttcctcgtgaagggcaacgacgtcctcgttatcgagtgcaacttgcgcgcctcgcgttcgttccccttcgtctcgaagactctcggagttgacttcatcgatgtcgccacgaaggttatgatcggtgaaaacgtcgacgagaagcatctgccgaccctggaccacccgattattcccgcggattatgtcgctatcaaggcgcctatgttctcgtggccccgcctgcgtgacgctgatccgatcctgcgatgcgagatggcttctaccggcgaggtggcttgctttggagaaggaatccataccgcgttcttgaaggccatgctttccaccggcttcaagatcccacagaaggggatcttgattggcatccagcagtcgttccgcccgcgctttttgggtgtcgctgaacagcttcataacgaaggtttcaagctcttcgctacggaggcaacttccgactggctgaacgctaacaatgtcccggcaacccccgttgcttggcccagtcaagagggtcagaacccgagtctgtcttcgatccgaaagctgatccgcgacggatctattgacctcgtgataaatttacctaacaacaacacaaagtttgtccatgacaactacgttatcagacgtaccgctgtggattccggaatccctctccttacaaacttccaggtcaccaagctcttcgcggaggccgttcagaagtcccgaaaggtcgacagcaagtccttgttccattaccgccagtactcggccggcaaggccgct

SEQ ID NO: 43565 - DNA, 4500 bp, Artificial Sequence
  derived and/or modified sequence
atgacgagaatcctgaccgcctttaaggtggtgcggaccctgaagaccggctttggttttactaatgtgacggcacaccagaagtggaagttttctcgccctggaattagactgctctctgtcaaggcccaaactgcccacatcgttctggaagatggtacaaagatgaaggggtattcattcggtcatccctctagcgtggccggtgaagttgtgttcaatacagggctgggaggctatcccgaagccattaccgacccagcttataagggacagattcttactatggcgaaccctattattgggaacggcggcgctccagatacaaccgccttggacgagctcgggctctctaaatacctcgaatccaatgggataaaagtctcgggactactggtcctggattatagtaaagattataatcactggctagccacaaagtcccttggccagtggctacaggaagagaaagtgcccgctatatacggtgtggacacccgcatgttgactaagattattcgtgataagggtactatgttgggcaaaatcgagttcgaaggacagccagtggatttcgtggaccctaacaagcaaaatcttattgccgaagtctcaaccaaagatgtgaaagtgtacggaaaaggaaatccgaccaaagttgtggctgtggattgcggcataaagaacaatgtgatccggctgctggtcaagcgtggagcagaggtccatctcgtgccctggaatcacgatttcacaaagatggagtacgatggtatcctcatcgcaggaggccccgggaacccagccctggccgaaccactgattcagaacgtgagaaaaattctggaatcagacaggaaggagccactgtttggcatcagcactggaaatttgatcaccgggctagcagcaggtgcgaaaacttacaaaatgtccatggccaacaggggccagaaccaaccagtactcaacattaccaataaacaggcctttatcactgcacagaatcacggctacgcactggacaatacactgccggctggatggaagcctctgttcgtgaacgttaacgatcagaccaatgaggggattatgcacgagtctaagccttttttcgctgttcagttccacccggaggttacaccaggaccaattgatacggaatatctcttcgattcgttcttcagtctcatcaagaaggggaaggccacaaccataacctccgttctccccaagccggcgcttgtggcaagccgggtggaagtgtccaaagtgcttatccttgggtccgggggccttagcattggccaggctggggagtttgactactctggctcacaggcagtgaaagccatgaaggaagaaaacgtgaaaactgttctgatgaaccctaatatcgcgtccgtacagaccaatgaagtagggctaaagcaggctgacacagtttactttttgcctatcaccccccagttcgtgaccgaggtaattaaagccgaacaacctgacgggctaatccttggcatgggaggtcagactgcccttaattgcggggtggagctctttaaacgtggagtgttgaaggagtacggagtgaaggttctgggtacaagcgtggaatccatcatggccacagaggatcggcaattattcagtgataagctgaatgaaatcaacgagaaaattgcaccctcttttgccgtagagagtattgaggacgcccttaaggcagctgataccatcggatatccggtcatgattcgaagtgcctacgctctcggcggactcgggagtgggatctgccccaacagagagacacttatggacctgtccaccaaggcctttgcgatgacaaaccagattttggtagagaagtcagtaaccggctggaaggaaatcgaatatgaggtcgtgcgagacgctgacgataattgtgtaacggtctgtaatatggagaatgtggacgccatgggtgtgcatactggcgactccgtggtggtggctccagcacaaactctttcaaatgccgaatttcagatgcttcgccgcaccagtatcaatgtcgtcaggcacctaggaatagtcggagaatgcaacatacagttcgctttgcatccaacttccatggaatattgcataatcgaggtgaacgcccgtctgtcccggagttcggcactcgctagcaaggctaccggctacccgctggctttcatagcagcaaagatagcgcttgggattccccttccagagataaagaacgtcgtatcgggtaagacttccgcctgcttcgaacccagcctggattacatggtaaccaaaattccgaggtgggacctagatcgattccatggcacatcttcgaggatagggtcctccatgaaatccgtgggtgaggtgatggcgatagggaggacttttgaagaaagcttccagaaggccctgagaatgtgtcacccctccatcgagggtttcactccaagactaccgatgaataaggaatggccatccaatctggatctacgaaaagaactctcagagccaagctcgacaagaatatacgctatcgcaaaggccatcgacgataacatgtctctcgatgaaatcgaaaagctgacctacatcgacaaatggttcttatataaaatgagagacatcctcaacatggagaagaccctcaaggggctcaattctgagagcatgaccgaagagacactcaagcgcgcaaaagagattggtttctccgataaacagatctccaagtgtctgggcctaactgaagcccagacaagagaactaagactcaagaagaatatccacccatgggttaagcagatcgacacacttgcggccgagtatccctctgtcactaactacctatacgtgacatacaatggacaagaacacgatgttaattttgatgaccatggaatgatggtgctgggatgcggcccatatcacatcgggagcagcgtcgaattcgactggtgcgcggtttcaagtatcaggactctgaggcaactgggtaagaagactgtggttgtaaattgtaatccggagactgtcagtaccgatttcgacgaatgtgacaagctgtacttcgaggagctatcattggaacgcattctggatatttatcaccaggaggcgtgcggggggtgcattatttcagtgggcggacagatccccaacaacttggcggtaccgctctacaagaacggcgtcaaaatcatgggcaccagccccttgcaaatcgaccgagcagaggatcggtcaatcttctccgcagtgctagacgaacttaaagtcgcccaggctccctggaaagctgtaaacacattaaatgaggcattggagtttgcgaagtccgtggattatccttgcctactcaggccctcctacgtcctctccgggagcgcaatgaacgtcgtattcagcgaagatgaaatgaaaaagttcttagaggaagcaaccagggtgtctcaagaacatcctgtggtgctgaccaagtttgtcgagggcgccagagaggtggagatggacgcagtcgggaaagatggcagagtgatcagtcatgctatctcagagcacgtcgaggacgctggcgtgcactctggagatgccacattgatgctcccgacgcagacaatcagccagggcgctattgagaaggtgaaagacgctactcggaaaatagccaaagcctttgccatcagtgggccgttcaacgtgcagtttctagtcaagggcaacgatgttctggtgattgagtgcaatctcagggcgtctcgctcttttccattcgtgtcgaaaactctaggagtggattttatagacgttgccacaaaagtcatgatcggagagaacgtggacgagaagcatctcccaacactggatcaccctatcatccctgccgactacgtcgctatcaaggcacccatgtttagttggccgcggctgcgcgatgccgacccaattttgagatgtgagatggctagcacaggggaagttgcctgcttcggcgaggggatacacactgccttcctcaaggcaatgctcagcacggggtttaagatcccccagaagggcattctgatcggcattcagcagagctttcggcctcggtttctaggggtggcagaacaactacataatgaaggctttaaactgtttgccaccgaggctacatccgattggctgaacgcaaataatgtgcctgccacccccgtggcttggccatcacaggaaggtcaaaacccctctctgtcatcaatcagaaaattgatcagggacggaagtatcgacttggtcatcaatttgcccaacaacaatacgaagttcgttcacgataactacgtgatccgccggacggccgtggattctggtatacctcttcttacgaacttccaagtaactaagctattcgctgaggctgtacagaagagccggaaggttgactcaaaatcattatttcactataggcagtatagcgcgggcaaggccgcg

SEQ ID NO: 43566 - DNA, 4500 bp, Artificial Sequence
  derived and/or modified sequence
atgactagaatcttgactgcttttaaggttgttcgtacacttaaaactggattcggtttcacaaatgttactgctcatcaaaaatggaaatttagtagaccaggaattagattactttctgttaaggctcagacagctcatattgtacttgaagatggaactaaaatgaagggatattcatttggacatccatcaagtgtagctggagaagtagtatttaatactggattaggaggatatccagaagcaattacagacccagcttataaaggacaaattcttacaatggcaaatccaatcataggaaatggaggagcaccagatacaacagctcttgatgagctaggattaagtaaatatttagaaagtaatggaattaaagtttcaggtttacttgttttagattatagtaaagattataaccattggttagcaacaaaatcattaggacaatggttacaagaagaaaaagttccagctatttatggtgttgacactcgtatgttgactaaaattatcagagataaaggaactatgcttggaaaaatagaatttgaaggacaaccagttgactttgttgatccaaataaacaaaatctaatagctgaagttagtacaaaagacgttaaagtatatggaaagggaaatccaactaaagttgttgcagttgattgtggtataaaaaacaacgttattagacttttagttaaaaggggagcagaagttcatttggttccatggaatcatgattttactaaaatggagtatgatgggatactcattgcaggaggaccaggtaatccagctttagcagaaccattaatccaaaatgttcgaaaaatattagaatctgatagaaaagaaccattatttggtattagtacaggaaatttgattacaggattagctgctggagctaaaacttataaaatgtcaatggccaacagaggtcaaaatcagccagtacttaacattactaataaacaagcttttattacagctcaaaatcatggttatgctttagataatacattaccagctgggtggaaaccattattcgttaatgtaaacgatcaaactaatgaaggaattatgcatgaatcaaaaccttttttcgcagttcaatttcatccagaagttactccaggtccaattgacacagaatatctttttgattcttttttctcattaattaaaaaaggaaaagctacaacaattacaagtgttcttccaaaacctgctttagtagcaagtagagttgaggttagtaaggttttaattctaggtagtggaggattgtcaataggacaagctggagaatttgattattctgggtcacaagcagttaaagcaatgaaagaagaaaatgttaagacagttttaatgaacccaaatatagctagtgttcaaactaatgaagttggactaaaacaggctgatacagtttatttccttccaattacgcctcaatttgttactgaagtaattaaagcagaacaaccagatggtctaatattagggatgggtggacaaacagctttaaattgtggtgttgagctatttaagagaggagtacttaaagaatacggagttaaagtacttggaacatcagtagaatcaattatggcaacagaagataggcaattattttcagataaacttaatgaaattaatgagaaaattgctccatctttcgccgtagaaagtattgaagatgctttaaaggcagctgatacaattggatatccagttatgataagatcagcatatgcattaggaggtttaggaagtggtatttgtccaaatagagaaacattgatggatttaagtacaaaagcttttgcaatgacaaaccaaatattagttgaaaaatcagttacaggttggaaggaaatcgaatatgaagtggttcgtgatgctgatgataattgtgttactgtctgtaatatggaaaatgttgatgctatgggtgtacatactggtgattcagtagttgttgctcctgcacaaactctttcaaatgcagaatttcaaatgctaagaagaacatcaattaatgttgttagacatttaggaattgttggagaatgtaatattcaatttgctcttcatccaacgtcaatggaatattgtattattgaggttaatgcacgattaagtagatctagtgctttagcttcaaaagcaactggatatcctttagcttttattgctgcaaaaattgctcttggtattccattacctgagattaaaaatgtggttagtggaaaaacttcagcatgttttgaacctagtcttgattatatggtaacaaaaattccacgttgggatcttgatcgtttccatggaacatcatctcgtattggatcatcaatgaaaagtgtcggtgaggttatggctattggaagaacttttgaagaaagtttccaaaaagctttaagaatgtgtcatccatcaattgaaggatttacacctagactaccaatgaataaagaatggccatccaatcttgatcttagaaaagaattatccgaaccaagtagtacaagaatatatgctatagctaaagctatagatgataatatgtcattagatgaaattgaaaaattaacatatattgacaaatggtttttatataagatgcgagacattttgaacatggaaaaaactttaaaaggtcttaatagtgaatcaatgacagaggaaactcttaaaagagctaaagaaattggattttcagataaacaaataagtaaatgtttgggattaacagaagcacaaacaagagaattgcgtcttaaaaaaaatattcatccatgggttaaacagattgatacacttgcagctgaatatccatcagtgaccaattatttatatgttacgtataatggacaagaacatgatgtaaattttgatgatcatggaatgatggtattaggttgtggtccatatcatattggtagttcagttgaatttgattggtgtgcagttagttcaattagaactttaagacaattaggtaaaaaaacagttgttgttaattgtaatcctgaaactgtttctacagattttgatgaatgtgataaattatattttgaggaattgtcattagaaagaattttagatatttatcatcaagaagcatgtggaggatgtatcatttctgttggaggacaaatacctaataatttagcagttccactttataaaaatggtgttaaaattatgggaacttcaccattacaaatagatcgagcagaagatagatcaatattttctgctgttcttgatgaacttaaagttgcacaagcaccttggaaagcagttaatactctaaatgaggcattagaatttgctaagtctgttgattatccatgtcttttaagaccaagttatgttttatcaggatctgctatgaatgttgtctttagtgaagatgaaatgaaaaaatttttagaagaagctacaagagttagtcaagaacatcctgttgttttaactaaatttgttgaaggagcaagagaagttgaaatggatgccgttggaaaagatggaagagtcatttctcatgctatatcagaacatgttgaagatgctggagttcattcaggagatgcaacattaatgctacctactcaaactatttctcaaggtgctattgaaaaggtaaaagacgcaacacgaaaaatagctaaagcatttgctatatcaggaccatttaatgtacaatttctcgttaaaggaaatgatgttttagttattgaatgtaatcttagagcatcaagaagttttcctttcgtttcaaaaacgttaggagttgattttattgacgtcgctactaaagttatgataggagaaaatgttgatgaaaaacatttaccaactttagaccatccaattattcctgctgattatgttgctataaaagctccaatgttttcttggccaagattacgagatgctgatccaattttacgatgtgaaatggcatctactggagaagtagcatgttttggagagggaattcatacagcttttttaaaagctatgttaagtacaggttttaaaattccacaaaagggtattcttattggaatccaacaatcatttagaccaagattcttaggtgttgcagaacaattacataatgaaggatttaaattatttgcaactgaagcaacaagtgactggttaaatgctaacaatgttccagcaacaccagtagcttggccatctcaagaaggacaaaatccatcattatctagtattagaaaactaattagagatggatcaattgatttagttattaaccttccaaataataatactaaatttgtgcatgataattatgttattagaagaactgcagtcgattcaggaattccacttcttactaattttcaagtaactaaattatttgcagaagctgttcaaaagtctagaaaagttgacagtaaaagtctttttcattatagacaatattctgcaggaaaggctgca

SEQ ID NO: 43567 - DNA, 4500 bp, Artificial Sequence
  derived and/or modified sequence
atgacacggatcttaactgccttcaaggtggtccgcacactgaaaaccggctttggattcactaatgtgaccgcacaccaaaaatggaagttctcccgcccaggaataagattgctgagtgtgaaggcccagacggctcatatagttctcgaagatggcacgaaaatgaaggggtattcttttggtcacccttccagcgtcgcaggggaggttgtgtttaatacgggcctgggcggatacccggaggcaattacagaccctgcctacaagggacagatccttaccatggcgaacccgatcatcgggaacgggggcgcccccgatacaacagcattagacgaactaggactgagcaagtatctggagagcaatggcatcaaggtgagcggcttactggtgctggactacagcaaggactacaaccactggctcgctacaaaatcactgggccagtggttacaggaagaaaaggtccccgcaatctatggcgtggatactcggatgctgacaaagatcatccgcgacaaggggaccatgcttggaaagatcgagttcgagggacaaccagtggattttgtcgatccgaacaagcagaatttgatagcagaggtcagtactaaggacgtcaaagtgtatggaaagggtaacccaacgaaagtggtggcggtcgactgcggcattaagaacaatgtcatacgcctgctagtgaagagaggggccgaagttcacctggtgccttggaatcatgacttcactaagatggagtacgatggcatcctcatcgccggtggccccggcaaccctgctctggcagagcccctgattcagaacgtgaggaagatcttggagagcgatagaaaggagccgttattcggcataagtaccggcaatctgatcaccggtctggccgccggcgctaaaacgtacaagatgagcatggccaatcgggggcagaaccaacctgtcttgaatatcaccaacaaacaggcattcattaccgcccagaaccatggttacgcgcttgacaacactctgcctgccgggtggaagccattatttgtaaatgtaaatgatcagacgaacgaaggcattatgcatgagtcaaaacccttctttgctgtgcagttccatcccgaagttacccctgggccgattgatacagaatacctgttcgactcgttcttttctctcattaagaagggaaaagctaccaccattacttcagttcttcccaagcctgccctggtggcgagtcgggtcgaagtgagcaaggtactcatcttgggctctggaggcctcagtattggtcaagctggggagttcgactacagtggtagccaagccgtgaaggctatgaaagaagaaaacgtgaagactgtgttaatgaatcctaatatagcctcagtgcagaccaatgaggtcggtctgaaacaggccgacaccgtctacttcctccccatcacccctcagttcgttactgaggttatcaaagccgagcagcccgatgggctcattttggggatgggggggcagaccgcgttaaactgtggggtcgagctcttcaagcggggtgttctcaaagagtacggtgtgaaagtcttgggcaccagcgtcgagtccatcatggcgacagaagaccgacaactgttcagtgacaaattaaacgagatcaacgagaaaatcgcccccagctttgccgtggaaagcatcgaagatgccctgaaagcagcagatacaatcgggtatcctgtgatgattcgcagtgcttacgctctcggcgggcttggaagcggcatttgtccgaaccgcgagacactgatggacctctctactaaggcctttgcgatgacaaatcagattctggttgagaagtccgtgaccgggtggaaggagattgagtacgaagttgtacgcgatgccgacgataattgtgtgaccgtttgcaatatggaaaatgtagacgccatgggggtgcacactggcgactcagtggtcgtggcaccagctcagactctgtctaatgcagaattccagatgttacggaggacctccattaatgtggtccgccacctgggcattgtaggagaatgcaatatccaatttgccctgcacccgacctcaatggaatactgcatcatcgaggtaaatgcccgccttagcaggagttccgccttggcctcaaaggccactggatacccactggcctttatcgctgcgaagatagcactgggcattcctctgccggaaataaaaaacgtagtgagtgggaagacttccgcatgtttcgaacctagcctcgattacatggtcaccaagataccacgatgggacctcgaccgattccacgggacttcgagcagaatcgggagctccatgaagagcgtgggcgaagttatggccattggaaggacattcgaggaatcttttcagaaggcactacgaatgtgtcaccctagcatcgagggctttacaccgagactaccaatgaataaggagtggccctccaatttagacctgaggaaagagttgagtgagccttcctccacgcgcatatacgctattgcaaaggcaattgatgataacatgtccctcgacgagattgaaaaactcacgtacatcgataagtggtttttatacaaaatgcgagatatcttaaatatggagaaaactctgaaaggcttaaattccgagagtatgactgaggagaccctgaagcgcgccaaggagatagggttctccgataagcagatttccaagtgtttgggcctcacagaggcacaaacccgcgagctgagactaaagaagaacattcacccatgggttaagcagatcgacaccttggcagcggaatacccatcagttaccaattacctttacgtcacctataatgggcaggagcatgatgttaacttcgatgaccatggcatgatggtcttgggctgtggaccttaccatatcgggagctctgtagaattcgactggtgcgcagtgagctccatccgtaccctccggcagctgggcaagaagaccgttgttgtgaactgcaatccagagaccgtttcaaccgactttgacgagtgcgataagctgtatttcgaagaactcagtttagaacggattcttgacatctatcaccaggaggcttgtggcggctgcattataagtgttggggggcagatccctaataacttagccgtacctctgtacaagaatggggtgaagataatgggcacctccccacttcagatcgatcgcgcggaagataggagcattttttcagctgtcctcgatgaactgaaagtcgctcaggcaccttggaaggccgttaacactcttaatgaagccctggaattcgcaaaatccgtggattacccttgtctgctcagaccatcatatgtgttatccggatcagcgatgaatgtggtctttagtgaagacgaaatgaagaaattcctggaggaggccacacgcgtctctcaagaacacccagtggtgctgacaaaatttgtggagggagctagggaagttgaaatggatgccgtaggcaaagatggtcgggttatcagtcacgcgataagcgagcacgtcgaggacgcaggggtgcacagtggtgacgcaactctgatgctgccaacacagaccattagccaaggcgcaatcgagaaggttaaagatgctacccgcaagatagctaaggcttttgccatctctggcccttttaatgtacagtttttggtgaagggcaatgatgtgctggtgatcgaatgtaacttgagagccagccgttcatttccatttgtgagcaagaccctgggcgtggacttcattgatgtggcaaccaaggtaatgattggcgaaaatgtggatgaaaaacacctgccgactctggaccatcctattatcccggcagactacgtggctatcaaagctccaatgttcagctggcctaggctgagagacgccgatccaattcttcgctgtgagatggcctctacaggtgaggttgcttgtttcggcgagggaatccacaccgccttcctgaaggccatgcttagcacaggttttaagatcccccagaaaggaattctgataggcatacagcagtcgttccggccaagattcctgggggtggccgagcagctgcataacgagggtttcaaactgtttgctactgaagcaacttctgactggctcaatgccaataatgtgccagctacccctgtagcatggccaagccaggagggacagaatccttctttgtctagcatccgcaagctgatcagggatggctccatagatctagtgataaacctgcctaacaacaatacaaagtttgtgcacgataattatgtgatccggagaaccgccgttgactcgggaattcctctgctgactaacttccaggtcaccaagttatttgccgaagcggtccagaaatcgcggaaagtcgattccaagtccttattccactaccggcagtatagtgctggaaaggctgcg

SEQ ID NO: 43568 - DNA, 4500 bp, Artificial Sequence
  derived and/or modified sequence
atgactcggattctaacagctttcaaagtagttcgcactctaaagactgggttcgggtttactaatgtgacagcacatcagaaatggaagttttctaggcccgggataagactcctttctgtcaaagcccaaacagctcacatcgtgttagaggatgggactaagatgaaaggatattcctttggacatcctagtagtgtggccggagaagttgtatttaatacaggactaggaggataccctgaggctataacagatcccgcttataaagggcagatactcacaatggctaacccaattatcggaaacgggggggcccccgacactactgctcttgatgaactaggactgagtaaatacctggaatcaaacgggattaaagtgtctgggctgctagttttggactattctaaggattataatcattggttagcaactaagtctctggggcagtggctacaagaagaaaaggtccccgctatctatggagtggatacaagaatgcttacaaaaattatccgggacaaagggacaatgcttgggaagatcgaatttgagggacagccagtcgatttcgtcgatcctaacaaacagaatctcatcgcagaagtgtcaacaaaagatgtaaaagtgtacggaaaagggaacccaactaaagtcgtagccgttgattgtggaatcaaaaacaacgtaatccgcctgctggtgaaacgcggagcagaagtgcatttggtgccctggaaccacgattttactaaaatggaatatgatggaatactaatcgctggggggcctggaaacccagccctggctgaaccattaatacagaacgtcagaaagatattagaatcagacaggaaagaaccactatttggaatctccactgggaatttaatcactggactagctgctggagctaaaacttataaaatgtctatggccaatagggggcagaatcagccagtgctgaatatcacaaataaacaggcattcatcactgcccagaaccacgggtatgccctagataatactctgcccgccggatggaaaccactcttcgtcaacgtgaacgatcagacaaacgagggaataatgcatgagagtaaacccttttttgcagtacagttccaccctgaagttactcccggacccatagatacagaataccttttcgacagtttcttctcactgataaaaaaggggaaggcaactacaattacttctgttctgcccaaacctgctctagtcgcttcacgcgtggaagtctcaaaagtcctgattctcgggagtggagggctgtctatcgggcaagcaggggaattcgattattcaggatcacaggcagttaaggctatgaaagaagaaaatgtgaaaacagttcttatgaatccaaatatcgcttcagtgcagacaaatgaagtcgggctgaaacaggcagacacagtgtatttcctacctatcacaccacaatttgttacagaggtgataaaggctgaacagccagatggactgattctggggatgggggggcagacagcacttaactgcggggtcgaactgtttaagcggggggtgctgaaggaatatggagtgaaggtgttagggacttctgtagagtcaatcatggccacagaagaccgacagctgttctccgataagctgaacgaaatcaatgaaaaaatagccccatctttcgccgtggagtccatcgaagacgctcttaaagccgcggatacaatcggatatccagttatgatccgcagtgcttatgcactcggaggattagggtctggaatctgtccaaatcgagaaacacttatggacctgtctacaaaagcattcgcaatgacaaatcagatccttgttgagaagtctgtaactggatggaaagaaatcgaatatgaagtggttagggacgcagacgataactgcgttactgtgtgcaatatggaaaacgtcgatgcaatgggagtgcatacaggggattctgtggtagtcgccccagcccagacactgtctaatgctgaattccagatgcttcgaaggacatcaatcaatgttgtaagacacctagggatcgtcggagaatgtaacatacagttcgccctccatcccacaagtatggaatactgcatcatcgaggtgaatgcacggctttctcgctcttctgcactggcatccaaagctacagggtatccactggcattcatagcggccaaaatagcattgggaatacccctgcccgaaataaaaaatgtggtctcagggaaaacaagtgcctgctttgaaccttcactggattacatggtgacaaagattccacggtgggatctcgatcggttccatggaactagttctagaatagggtcttccatgaagtccgtcggggaagtaatggcaatcgggaggactttcgaagaatctttccagaaggcactacggatgtgtcacccatcgattgaggggtttactcctaggctccctatgaataaagagtggccctctaacttggatctgaggaaggaactatcggaaccctcatctacaaggatctacgctatagctaaagctatagacgataacatgtctctcgacgaaatcgagaaattaacatatatcgataaatggttcctttacaaaatgcgagatatactaaacatggaaaagactctcaagggattaaattcagaatctatgactgaagaaacactcaaaagagcaaaagaaatcggattttcagataaacagatatctaaatgtttagggctcacagaggctcagactcgggaacttaggctaaaaaaaaatatacacccctgggttaaacagattgatactctcgccgccgagtatccatctgtcactaattatctctatgtgacatataatgggcaggaacacgatgtgaactttgatgatcatggaatgatggtactggggtgtggaccttatcacataggatcttcagtcgaattcgattggtgtgctgtatcgagtatcagaacactacggcagctaggaaaaaaaacagttgttgtcaattgtaatcccgaaactgtatcaactgattttgatgagtgcgataagttatattttgaagaattgagtttagaacgaatactcgatatctatcatcaggaagcctgtgggggatgtatcatctccgtagggggacagatacccaataaccttgctgtgcccctctataaaaatggagttaagatcatggggacatctccactccagatagatcgagccgaggacagatctatcttttctgcagtgctggatgagctgaaagtagcccaggcaccctggaaggctgtgaacacacttaatgaagctctcgaattcgctaaatcagtcgactatccctgtctattgaggccctcttacgtactcagtgggtctgctatgaatgtggtcttctcggaagatgaaatgaagaaattcctggaggaagccacaagggtgtcacaggaacacccagttgttctcacaaaatttgtggaaggggcaagagaggttgaaatggatgccgtcgggaaagacgggagagtaatctcccacgcgatatccgaacatgtagaagatgcgggagtacactccggagatgcaacactgatgctgcccacacagacaataagtcagggggcaatagaaaaagtgaaagatgccacacggaaaatcgccaaagcctttgctatctcagggccatttaatgtccagtttctggtaaaagggaatgatgtgctagtcatagaatgtaatttaagggcttctcgatccttccccttcgtctctaagactttaggagtagatttcatcgatgtagccactaaggtgatgataggggaaaacgtggatgaaaaacatctccctacacttgatcatcccatcatacctgctgattacgtagcaatcaaggccccaatgtttagttggcccaggttgcgcgatgccgatccaatccttcgatgtgaaatggcgtctacaggggaggtcgcatgctttggagaggggatccacacagccttcctaaaagccatgctatctacggggtttaaaataccacagaaggggatactgattggaatccagcagtcgttcaggccccgatttttgggggtggccgaacagctgcataatgaggggtttaaactcttcgccactgaggctacatcagactggctcaatgccaacaatgtgcctgccactccagtagcctggccctcccaggaaggacagaacccttcactctccagtattaggaaactcatcagggatggatctatagatttagtgattaatctccccaataacaatacaaaatttgtgcacgataactacgtgataagacggacagcagttgattcagggataccacttttgactaacttccaggtaacaaaattatttgccgaagccgtacagaaatcgaggaaagtagattccaagtcgttattccactatcgacagtacagtgccggaaaagctgca

SEQ ID NO: 43569 - DNA, 4500 bp, Artificial Sequence
  derived and/or modified sequence
atgactagaatactgacagcgtttaaggtggtacgcaccctaaagactggattcggattcacaaatgtcacagctcaccagaaatggaagttcagcagaccaggtataagactactctcggtgaaggcacagacggcccacattgtgctggaagatgggactaagatgaagggatactctttcggccatccctccagcgtcgccggagaagtagtgttcaacaccggtctgggcggatatcctgaggccatcacagaccccgcctacaagggtcagatactgactatggccaatcccatcatcggaaatggaggagctcccgacaccactgcactcgacgaactaggtctgtccaagtaccttgagagtaacggtatcaaggtatctggtctgctggtcttagactattccaaagactacaaccattggttagctaccaagtccctcggacagtggctgcaggaggagaaagtgccggccatatacggcgtggatacgaggatgttaactaaaataattcgggataaggggactatgctggggaaaatcgaattcgagggccagcccgtagactttgtagatccgaacaagcagaatttaattgctgaggtatcgactaaggacgtaaaagtttacgggaagggtaaccccacaaaagtcgtggcagtggactgcggtattaagaacaatgtgattcgtctgctggtcaagaggggcgctgaggtgcacctcgtgccctggaaccacgatttcaccaaaatggagtacgacggaattctaattgcaggcggccctggcaaccccgctctagccgagcccttaatccagaatgtcaggaagatcctggagagcgacaggaaggaacctttgttcggcatatcaacagggaacctgatcactggcctggctgctggcgcaaagacttacaagatgtcgatggctaacagggggcagaaccagcccgtcctaaacattactaacaaacaggctttcatcaccgctcaaaatcatggctacgcattagataacaccctgccagcgggttggaagcctttatttgtgaacgttaatgatcagacgaacgaaggaatcatgcacgaatctaaacccttcttcgcggtgcagttccacccggaggttacgcctggaccaatagacaccgaatacctcttcgatagttttttttcactcataaagaagggaaaggcaacaactatcacctcagtgctgccaaagccagccctggtggcatcgagagtggaggtgagtaaggttctaatcctcgggtctggcggtctgtcaatcgggcaggccggtgagttcgactactccgggtcccaagccgttaaagccatgaaggaagagaacgtaaaaactgtcctcatgaacccaaacatagcgtctgttcagacgaatgaggtcggactcaaacaagcagacacagtttattttctgccaatcactccgcagttcgtaactgaagtgatcaaggccgagcagcccgatgggctaattctcgggatgggcgggcagactgccctgaattgtggagtggagctgttcaagagaggagtcctgaaagagtatggcgtgaaagtcttgggcacatcagtggagtccattatggccaccgaggaccgtcagctgttttccgacaaacttaatgaaataaatgaaaagatcgccccttcattcgccgtcgagagcatcgaagatgccttgaaggctgccgatacaatcggttaccctgtaatgatacggtctgcttatgctctaggcggcctgggttctggaatatgcccaaaccgagaaacactgatggacctgagcacgaaagcgtttgctatgacgaatcagatcctggtcgagaaatccgttactggatggaaggaaatcgagtacgaggttgtgcgtgacgctgatgataattgcgtaacggtatgtaacatggagaacgtggacgcaatgggcgtgcataccggagactcagtggtggtggcccccgctcaaaccctgagcaatgctgagttccagatgctgcgacgaacgtccatcaatgtggtcaggcatctcggaattgtcggggagtgcaacatccagttcgccctccacccgacaagtatggagtactgtatcattgaagtgaatgcccgtcttagcagaagcagcgccctggcctcaaaggcaactggctatcctctggcttttatcgctgctaagattgcccttggcatccccctgcccgaaatcaagaacgtggtgtctggtaaaaccagtgcctgctttgagcctagtttagactatatggtgaccaagattccaagatgggatctcgacaggtttcatggcacatcaagccggatcggctcctcaatgaagtccgtaggggaggtcatggcgatcggacggacctttgaggagagcttccagaaagcgctcagaatgtgccacccaagcattgaagggttcaccccacggctccccatgaataaggaatggccgtctaatctggatttgcgcaaagaactttccgaaccctctagcacacggatctacgctatcgccaaggccattgatgacaatatgtcacttgacgaaatagaaaagctgacatatatcgacaagtggttcctatacaaaatgcgggacattctcaatatggagaaaacccttaagggcctcaattctgaatcaatgacagaggagacgcttaagcgagcaaaagagatcggattttctgacaaacagatcagcaagtgtttgggactgaccgaagcacagacgagagaactgagattgaaaaaaaatattcacccctgggtgaagcagatcgataccttggcagcagagtaccccagtgtgaccaactatctgtatgttacctacaatggacaagagcacgacgttaactttgatgaccatgggatgatggtgttggggtgtggtccttatcacatcggcagcagtgtggaattcgactggtgcgcagtgtcgtccataaggaccttaaggcagctgggcaagaagacagttgtggttaactgtaaccctgaaacagtgtctacggatttcgacgagtgtgacaagctgtactttgaggaactctcgctggaaagaatcctcgatatttaccaccaggaggcatgtggaggctgcattatcagcgtgggcgggcagataccaaataacttagctgtccccctgtacaagaacggcgttaaaataatggggacttccccattgcaaattgaccgcgctgaggatcggtccatcttcagtgctgtactggatgagctcaaggtggctcaggccccttggaaggcggtgaatactttgaacgaagcactggagtttgctaagtctgtggactatccttgtctacttcgtccttcctatgtgctctccgggagtgcaatgaatgtcgtgttcagtgaggacgagatgaagaaattcctggaggaggccacccgggtgtcacaggagcatcctgtggtattgacgaagttcgtagagggcgcgcgagaggtggagatggacgcagtcgggaaggacgggcgggtaatatctcatgccattagtgaacacgttgaagacgctggagtgcactctggtgacgctactctcatgctcccaacacagacaatatcccagggtgctatagagaaagtcaaggacgctacacggaaaatcgccaaggcctttgccatatctgggccttttaacgtgcagtttttggtgaagggtaatgacgtcctggtcatcgaatgcaacctgcgggcttcgcggtcatttccctttgtgtccaagaccctgggagtggatttcatagacgtggcgaccaaggtaatgatcggagaaaatgtggacgagaagcatctgcccacattggatcaccccattatccccgctgactacgtggcaattaaagcccctatgttcagttggccacgcctgcgcgatgcagatccaatcctccggtgcgaaatggcttctacaggtgaggtagcatgctttggggagggaatccacaccgcatttctcaaggctatgctgtcgaccgggtttaaaatcccacaaaaaggtatcctgatcgggatccagcaatcgtttaggcctcggtttctgggggtcgctgagcagctccataatgaaggtttcaaattatttgcgacggaagccacatcggactggttaaatgctaataacgtacccgccacacccgttgcgtggccaagccaggagggtcagaacccctctctgtcgtcgatacgtaaactcattagagacgggtccatcgacttggtcatcaacttaccaaataataataccaaattcgtgcatgacaattacgtgattaggcggactgctgtagattcgggtatcccccttctaacaaattttcaggtcacaaagctgttcgcagaagctgtgcagaagagccgcaaggtggattccaagtccctgtttcattacaggcagtactctgcgggtaaggcggca

SEQ ID NO: 43570 - DNA, 4500 bp, Artificial Sequence
  derived and/or modified sequence
atgaccagaattctgacggccttcaaagtagtgcggacactcaagactggatttggcttcactaatgtcacagcccaccaaaaatggaagttctccaggccggggatcagacttctatctgtcaaggctcagaccgcccacattgtattggaagatggcacaaaaatgaaaggttactccttcgggcatcccagctctgtggccggcgaggtcgtcttcaacactggcctgggtggctatcctgaggcaattaccgacccggcgtataagggacagattctgacaatggcaaaccccatcattggtaacggaggcgctcctgataccaccgccttagatgagctgggcctgtcgaaatatctggaatcaaacggaattaaggtgagcggtcttcttgtcctggactactctaaggactataaccactggctggcaactaagtccctgggtcagtggttgcaggaagagaaggtgcccgccatctatggtgtggatactcgaatgctaacgaaaatcattcgagataagggtactatgctcggaaagatcgaattcgaggggcagcccgtcgacttcgtggatcctaacaaacagaacctgatcgctgaagtctctacaaaggacgtgaaggtgtacgggaagggcaaccccactaaggtcgtcgccgtggactgcgggatcaagaacaatgttataagacttttggtcaaacggggagctgaggtccacctcgtcccttggaatcatgactttactaaaatggaatatgacggcatcctgatcgccggcggacctggcaatcctgcccttgccgagcccctaatccagaacgtgagaaagatcctggaatccgaccgaaaggaaccactcttcggtataagtactgggaacctcataaccggcctcgctgccggtgcaaagacctataagatgtccatggcaaatcgagggcagaatcagcccgtgcttaacatcaccaacaaacaggctttcataactgctcagaatcatggctacgccctggacaacacgttgccagcaggctggaagcccctgtttgtcaatgtaaacgatcaaacaaatgaaggcatcatgcatgagtcgaagccattctttgctgtacagtttcaccctgaagttacacccggcccaatagatactgaatatctttttgactcttttttctctctcatcaagaaaggaaaagccacgaccatcacaagcgtccttcccaaacctgcgctggtggcctctagggtggaagtttcaaaggtgttgatcttaggctccggcgggctatcgatcggacaagccggtgaatttgactactctgggagtcaggcagtgaaggcaatgaaggaggagaacgtcaagacagtcctaatgaaccccaacattgcctccgtccaaaccaacgaagtgggcctgaaacaggccgatactgtctatttcctcccaataacccctcagttcgtgacggaagtcatcaaggctgagcagcctgatgggcttatattggggatggggggccagacggccctaaactgcggcgtcgaactgtttaaaagaggcgttttgaaggagtatggagttaaggtcctggggacctctgtcgaatcgattatggccactgaagaccgccagctgttttccgataagctgaatgagataaatgagaaaatcgctccctccttcgccgttgagtcaatcgaggacgctctcaaagccgccgatactatagggtacccggtgatgataagatctgcttacgcccttgggggcctgggctctggcatttgccccaatagggaaactcttatggacctgtccacgaaggcatttgcaatgaccaatcaaatcctggtggagaagtctgttaccggatggaaggaaattgagtatgaagtggttagggacgccgacgacaattgcgtgacggtgtgcaatatggagaatgtagatgccatgggtgtccatactggcgattcagtggtggtcgcccccgctcagaccctgtccaacgccgagttccaaatgcttaggaggactagcatcaatgtcgtacgacacctgggaatcgtgggtgaatgcaacattcagttcgctctccaccccacaagcatggagtattgcattattgaggtgaacgcaagactgagcaggtcatccgctctagcaagtaaggccactgggtatcccttggctttcatcgcggctaaaattgctctcggcattccccttcctgagattaaaaatgtggtgtccggtaagacgtccgcctgttttgaaccttcactggactacatggttaccaagatccctcgatgggatctggaccgttttcacgggacgagctccagaattggctcgagcatgaaaagcgtgggagaggtgatggccattggccgaacctttgaggagtcttttcagaaagcacttcgaatgtgtcacccctcaatcgaaggctttacccccagactgcccatgaataaggagtggcctagtaaccttgacctgagaaaggagctctccgaaccatcctcgacccgcatatatgctattgccaaggccatagatgacaatatgtcgctggatgagatcgaaaaacttacttatatcgataaatggttcctctacaaaatgagggacatactcaacatggagaagaccctgaagggcctgaacagcgaaagcatgacggaagaaacactgaagcgagcaaaggaaatcggattctccgacaagcaaatctcgaaatgcctgggcctcacagaagcccagacgagggagctccgactgaagaagaatattcatccgtgggtgaaacagattgacactctggccgcagagtacccctcagtgacaaactatttgtatgtgacctataacggtcaggagcacgacgtgaattttgacgatcatggtatgatggtattgggctgcgggccttatcacattggcagttccgtagaattcgactggtgcgccgtgagctcaattcgaactctccgacagctgggaaagaagactgtcgtcgttaattgcaaccccgagaccgtatccaccgattttgacgaatgcgacaaactgtattttgaggaactcagtctggagagaattctcgacatttaccatcaggaggcctgcgggggctgcatcatttccgtaggaggccagattcccaacaacttggctgttcctttatacaagaacggggtgaaaatcatggggacttcccccttgcagatagatcgtgccgaggaccgatcaatcttcagcgctgttttggatgagttgaaggttgcgcaggcgccatggaaggcagtgaacaccctcaatgaggcactggagtttgccaaatccgtcgactacccatgcctgctgaggccatcctacgttctgtctggaagcgcgatgaacgtggtttttagcgaggacgagatgaaaaagttcctcgaggaggcaacaagagtgtcacaagagcacccagtcgttcttacaaagtttgtcgagggagcgagagaagtcgagatggacgccgtggggaaagacggtagggtgatttcgcacgccatttctgagcacgttgaggacgcaggagtgcacagtggtgacgcaacactcatgctgccaacacagactatctcccagggcgcaatcgaaaaggttaaagacgcaacccgcaaaatcgcaaaggcattcgctatctccggaccctttaatgttcagttccttgtgaagggaaatgacgtgctggtgatcgaatgcaacctcagagcttctaggtcctttccttttgtgtccaaaacactcggagtcgattttatcgacgtggccacaaaggtgatgatcggggaaaacgttgatgaaaaacacctgccaacccttgatcatccgataataccagcggactacgttgctattaaggccccaatgttctcttggccgagactaagggacgcggatcctattttgagatgcgagatggcttcaacaggagaagtggcctgcttcggtgaaggcatacatactgctttcttaaaggccatgttgtccacaggcttcaagatcccacagaagggcatcctgattgggatacaacaatcttttagacctaggttccttggcgtggcagagcaactacacaatgaagggttcaagctctttgcaaccgaggctacaagcgactggttgaatgcaaacaacgtaccagccaccccagtggcgtggcctagccaggaagggcagaacccaagtctgtccagcataagaaagctaattcgcgacggaagcattgatctggtaattaatctgccaaacaataacactaaatttgtgcacgataactacgtgatacgacgaaccgcagttgacagcggcatccccttgttgaccaacttccaggtgactaaactgtttgccgaggccgtgcagaaatcacgaaaggtggatagtaaatcactgttccattacagacaatatagcgccggtaaggccgca

SEQ ID NO: 43571 - DNA, 4500 bp, Artificial Sequence
  derived and/or modified sequence
atgaccaggatcctgacagcttttaaggtcgtgaggacactgaagaccgggttcgggtttacgaatgttacagcccatcagaagtggaagttcagtaggcctggaataagacttctctctgtgaaagcgcagactgctcacatcgtacttgaggatggaacgaagatgaaaggttattccttcggccatccaagcagcgttgcgggggaggtagtgttcaacaccggcctggggggctacccggaggcaattaccgatccagcctataagggacagattttgacaatggccaaccccattattggaaacggcggcgcccctgataccaccgctctggacgagttgggtctgtccaagtatctggaatccaatggcataaaagtaagcggattgctcgttcttgactacagtaaggattacaaccactggctggccacaaagagtctgggccagtggctgcaagaggagaaagtacctgcaatctacggggtggacacaagaatgttgacgaagattattcgcgacaagggaacgatgctcggcaaaatcgaatttgaaggccagcccgtcgatttcgtggacccaaacaagcagaacctgatcgccgaggtttcaacaaaagatgtaaaggtgtacggcaaaggtaaccctaccaaggtcgtcgctgtggactgcgggatcaaaaacaacgttataaggctgctggtgaagagaggtgccgaagtgcacctcgtgccttggaaccatgattttactaaaatggagtacgatggtattctcattgcagggggtccaggcaacccagcattggccgaacctctgatacaaaatgtacgcaagatactcgaaagcgaccggaaagagcccttgttcggaatctctactggaaaccttattacaggcctcgccgcaggcgcaaaaacttataagatgagtatggccaacaggggacagaatcagcctgtgttgaatattacaaataagcaggcctttatcacagcgcagaaccacggctacgctctggacaacacactccctgcgggatggaagcctcttttcgtgaacgtaaatgaccagacaaatgagggtattatgcacgaatctaagccctttttcgctgttcagttccatcctgaggtgactcctggtccaattgatacggaatacctgttcgattcattcttttcacttatcaagaagggaaaagccacgacgatcacctcagttttgccaaagcctgccctggtcgcatctagagttgaggtctctaaagtcttgatcctgggctctggcggactctctatcggtcaagcgggcgaattcgactatagcggctcccaggccgttaaggccatgaaggaggagaatgtgaaaaccgttctgatgaaccctaacattgcaagcgtacaaacaaacgaggtgggccttaagcaagcagacaccgtgtacttcctcccaataacacctcagttcgtgactgaggttatcaaagccgaacagcccgacggcctgattttgggtatgggcgggcagaccgcactgaactgcggcgtggaactctttaaacgaggggtgcttaaagaatatggggtgaaagtcctgggtaccagcgtagagagtattatggccaccgaggatcgccagctgttcagcgacaagctgaatgaaattaacgagaaaatcgccccttcctttgctgtagagagcatcgaggacgctttgaaagctgcagacacaattgggtatcccgtgatgattcgatccgcctacgcacttggaggccttggatctggaatctgccctaaccgcgagactctcatggacctgagtaccaaggcgtttgcaatgactaatcaaatcctggtggaaaagtccgtcaccggatggaaggagattgagtatgaggtcgtcagagatgccgacgataactgtgtgactgtctgtaatatggaaaacgtcgacgcaatgggagtccataccggcgattctgtggttgttgcgccagcccaaacgttgagcaacgctgagttccaaatgctgagacgcacatcaattaacgtggtgcgccacctggggatcgtgggggagtgtaatatacaattcgctttgcatcctacgagtatggagtattgtattatcgaggtcaacgctagactttcccggtcatctgctctggcatctaaggctaccgggtatcctttggcttttatcgccgctaagatagcactcggcatccctctgcctgagataaagaatgtggtgagcggcaaaacttctgcatgcttcgagccttccctggactatatggtgactaagattcctagatgggatttggatagatttcatggcaccagcagtcgcatcggatcctccatgaagtcagtcggcgaggtgatggccatagggcgaacgttcgaggaatcctttcaaaaggccttgcggatgtgtcacccttctatcgaagggtttacaccccgacttcccatgaacaaagagtggcccagtaatcttgacctgcgcaaggaactgagcgaaccctccagcacgcgaatctacgctattgccaaagccattgacgacaacatgagccttgatgagatcgagaagctgacttatatcgataaatggtttctctacaaaatgagagatatattgaatatggaaaagaccctgaaggggctgaattccgagtccatgaccgaggaaacactcaagcgcgccaaagagattgggttctcagataagcagatatccaagtgtttggggctcaccgaagcccagacaagggagctgagactgaagaagaacattcacccctgggtgaagcaaatcgataccctcgccgccgagtacccttcagtgaccaattacttgtacgtgacatataacgggcaggagcatgatgttaactttgatgatcatgggatgatggtgctgggctgtgggccctaccatatcgggtctagtgtggagttcgactggtgtgcagtttctagtatcaggactcttcgacagctggggaaaaagaccgtcgtcgtaaactgcaaccctgagaccgttagcactgactttgatgaatgcgacaagttgtacttcgaagagctgtctcttgagagaatccttgacatataccaccaggaagcctgcggaggatgtatcatctctgtaggcggtcagataccaaataacctcgccgtgcccctctataaaaatggggtgaagatcatgggcacaagtccattgcagatcgatcgggcagaggataggtccatattctcagcagtgctggacgagcttaaggtggcccaagccccctggaaggcagtcaacacacttaatgaggccctcgagttcgctaagagcgtggattatccctgtctgctcaggccaagttacgttctgagcggatcagctatgaatgttgtcttctcagaggatgagatgaaaaagttcctggaagaggcgactcgcgtgtcccaggagcaccccgtagtgctgacaaaatttgttgagggcgcccgagaagtcgaaatggacgccgtcggcaaggatggtcgcgttatttctcatgccatatctgaacacgtggaagacgcaggcgttcatagtggggacgctacattgatgttgcccacgcagaccatttctcagggtgccatcgagaaagtgaaggatgcaacccgcaagattgcgaaggctttcgccatttcagggccttttaacgtgcagtttcttgtcaagggaaatgacgtgctcgtcatcgagtgcaatctgcgagcatccaggtcctttccattcgtgagtaagacacttggagtcgatttcatagacgtcgctactaaggtgatgattggcgaaaacgtggatgaaaagcacttgccaacactcgatcacccaattatacccgccgattacgtagccattaaagcacctatgtttagttggcccagactgagagacgctgaccccatcctgcgatgtgagatggcttccacgggggaggtagcctgtttcggagagggcattcatactgccttcctcaaagccatgctctcaaccggcttcaagatcccacagaagggtattctgataggcattcagcagagtttccggcccagatttcttggggtcgcggagcagttgcacaatgaggggtttaagctgtttgctacggaggcaacgtctgattggctgaacgccaataatgtgcctgcgacaccagtggcttggccctcccaggaggggcagaatccaagcctctccagtatcaggaagctgatacgcgatggctccattgacttggtgattaatctgcccaacaataacacgaaatttgtccatgacaactacgtgatcagaaggactgctgtggacagcggtatccctctcctgaccaattttcaggtaaccaagctttttgccgaagcagttcaaaaatctaggaaagtagacagcaagagtctgtttcattatagacaatatagcgcaggcaaggcagct

SEQ ID NO: 43572 - DNA, 4500 bp, Artificial Sequence
  derived and/or modified sequence
atgacgcgcatcctgacagcatttaaggtggtgaggactttgaagacaggatttggattcacgaacgtgactgcccatcagaaatggaagttctccaggcctggaatcaggctcctctccgttaaggctcaaacagcacatatagttttggaggatgggactaagatgaagggctacagcttcgggcatccgtcttccgttgcaggggaggtggtgttcaatacaggcctgggagggtaccccgaggcaataacagatccagcatacaaaggtcaaattttaacaatggctaacccgataataggcaatggaggcgctcccgatacaacggccttggatgagctgggcctgtctaaatatttggagtctaacggcataaaggtgagcggacttctcgtcctagactactcgaaagactacaatcattggttggccactaagtcactggggcagtggctacaggaagagaaggtgcctgccatatatggcgtggatacacgaatgctaactaagattatccgagacaagggcacaatgctgggaaagattgagttcgaagggcagcccgtggatttcgtcgatcctaacaagcagaacctgatcgcggaggtgagtaccaaagatgtaaaggtatatggtaagggtaacccaacgaaagtggtggccgtggactgtggtatcaagaataacgtgattaggcttttggtcaagaggggagccgaggttcatcttgttccctggaatcacgactttaccaagatggaatacgacgggattttgattgccgggggccccggaaatcctgccttggctgagccactgatccaaaacgtgcggaagatattggagagcgacaggaaggaacccttattcgggatatcaaccgggaatctaatcactggactcgccgctggggctaaaacctacaagatgtccatggccaaccgcggacagaaccagccggtgctcaatattactaacaagcaggcattcatcaccgctcagaatcacggatacgccctggataatacgctgcctgcaggctggaagcccttattcgtgaatgttaacgaccagactaacgagggcattatgcacgagagcaagccattcttcgcagtgcaattccatccagaagtaacacctggccccatcgacacagagtatcttttcgactccttcttttcattaatcaaaaaaggtaaagccaccaccataacgtcggtgctacccaaacccgccctggtggcctctcgagtggaagtttctaaggtcctgatccttggttctggcgggctttccatcggccaagcaggagaattcgattattcggggtcacaggcagtgaaagccatgaaggaggaaaatgtaaagacagtcctgatgaacccaaacattgcaagcgtgcagacgaatgaggtcgggctcaagcaggcggatacagtttattttctgcccatcactccacagttcgtgactgaggtaataaaagccgaacagcctgatgggttaattctggggatgggaggtcagactgctctgaattgtggggtcgaactgttcaagcgaggcgtccttaaagagtacggcgtgaaagttctcggtacaagtgttgaaagtattatggccacagaggatcgacagctcttcagcgacaaactgaatgagatcaatgagaaaatcgcgcccagttttgccgtagagtctatcgaggatgctctcaaagcggctgacacaatcgggtatcccgtgatgatccgatcggcctatgcccttggcggtctgggctctgggatctgtcccaatcgggagaccctgatggacttatctacaaaggcgtttgccatgaccaaccagatcctggtggaaaaatcggtaacaggctggaaagaaatcgagtacgaggttgtgcgggacgccgatgacaattgtgtgacggtctgtaatatggagaacgtagatgccatgggagtccataccggagacagcgtggtggtggccccagctcagacactgagtaacgccgaatttcagatgttacgccggacctcaataaatgtcgttcgccatttgggtattgtcggggagtgcaacatccaattcgcacttcacccaaccagcatggagtattgcatcatcgaggtcaacgccaggctgtcacggtcgtctgctctagcgtcgaaggccaccggatacccactggctttcattgctgcaaagattgcactgggaatccccttgcctgagatcaagaacgtggtgagcggcaagacaagcgcttgctttgaaccatcgctggactacatggttacaaaaattccacgatgggacttagacaggtttcacgggacctccagtcgaataggctcctctatgaagtcggtcggagaagttatggccatcgggcgtacctttgaagagagctttcagaaggctctacgaatgtgtcaccctagtattgagggtttcaccccccggttaccaatgaataaagaatggccaagcaatctcgacctccggaaggaactgagcgagccctcaagcactagaatttacgccatcgccaaagcaatcgacgataatatgagtttggatgagatcgagaaactgacgtacattgacaagtggttcctctacaagatgcgcgacatactcaatatggagaaaacgctcaagggtttgaactccgaatccatgactgaggagaccctgaaacgagctaaggagatcgggttcagtgataaacagatctccaaatgtctcgggctgactgaagcacagacaagggaattaagattgaagaagaatattcacccttgggtgaagcagattgacaccttagcggcagagtacccttctgtgactaactatctatatgtgacatataacgggcaggaacatgacgtgaattttgatgaccatgggatgatggtcctcgggtgtggtccctatcacatcggaagtagtgtggaatttgattggtgtgcagtatcatctatccgcactttgcgccagctgggaaagaagacggtggtcgtcaattgcaaccccgagaccgtgagcacagactttgacgaatgtgataagttgtacttcgaggagctctcgctggagagaatcttggacatctatcaccaagaggcctgcggcggctgcattatcagcgtaggcggccaaattccgaacaacctagctgtccccctgtataaaaatggagtgaaaatcatggggacaagtccccttcaaattgaccgcgctgaggatcggtcgatcttcagcgcagttctcgatgagctgaaagtcgcacaagcaccgtggaaggcggttaatacactcaacgaggccctggagttcgccaaaagtgtggattacccctgcttgctgagaccctcctatgtgctgtcaggctctgcgatgaatgtcgtgtttagtgaggatgagatgaagaaatttctggaggaggcgacccgggtctcccaggagcatcctgtggtactaaccaagtttgtcgagggagcaagggaggtggagatggatgctgtgggcaaggacggccgagtgatctctcacgccatcagtgagcacgtggaggatgcaggggtgcacagtggtgatgcaaccctcatgcttcctacccagactatttcacagggtgctattgaaaaagtcaaggacgccacgaggaaaattgcgaaagccttcgcaatctccggcccgttcaacgtgcagttcctagtaaagggcaacgacgtcctcgtgatcgagtgcaacttgagggcatcacggagtttccccttcgtcagcaagaccctgggagtggattttattgatgtggccaccaaagtcatgattggcgaaaacgttgatgaaaaacacctcccgacgttagatcacccgataatccctgctgattacgtcgctataaaggcaccaatgttcagctggccacggttgagagatgcagacccgatccttagatgtgagatggccagcaccggcgaggtggcttgcttcggagaaggcatccataccgcgtttctcaaagcaatgctcagtacaggtttcaagataccccagaagggcatcctgattggtatccagcagtctttccgaccacgcttcctgggcgtggccgaacaactgcacaacgagggctttaagctgttcgcaaccgaagcaacatcagattggctaaatgcgaacaacgtcccagctaccccagtggcatggccgagtcaggagggacagaacccctccttgtcctctattaggaaacttatccgagatggcagcatcgacctagtgataaacctgcctaacaataacacaaaatttgtccacgacaattacgttatccgtcggaccgcagtagacagtggaatcccgctacttactaattttcaggttacgaaattattcgccgaagcagtccagaagagtcgcaaggtcgactctaagtctctgttccattatcggcagtactcagccgggaaggccgca

SEQ ID NO: 43573 - DNA, 4500 bp, Artificial Sequence
  derived and/or modified sequence
atgactcgcatattaactgctttcaaggtggtgagaacactcaaaacaggattcggatttaccaatgttacagctcatcaaaaatggaagttcagtagaccaggaataaggctgctctctgtgaaggctcagacagcacacatagtgctcgaggacgggacgaaaatgaagggttattcttttggccacccttcttctgtggctggtgaggttgtattcaacacaggcctcggaggctacccagaggcgattactgatccagcttataagggccagattctaaccatggctaaccctatcataggaaatggcggcgctccggacacaaccgcactggacgagctcggacttagcaagtacctcgagtctaatggaataaaagtgtcagggttgcttgtgctcgactacagcaaggattacaatcattggctggcaacaaaaagcctgggccagtggttgcaggaagaaaaggtccccgcgatctatggagtggatacccgcatgctgaccaaaatcatccgggacaaaggcactatgctggggaaaatcgagtttgagggacagcctgtggactttgttgaccccaataaacagaacctcatagccgaagtgagcacaaaggacgtgaaagtttatggaaaagggaacccgacaaaagtggtggcggtggattgcggaatcaaaaataacgtgattaggctgctggtgaagagaggggctgaggtgcacctggtcccctggaatcacgacttcactaagatggagtacgatggaattttaatcgccggggggccgggaaacccagcactggctgaacccctgatacaaaacgtcaggaagatactcgaatccgatagaaaagaaccactcttcggcatctctacagggaaccttatcaccggcctggccgccggagctaagacctacaaaatgtcgatggctaaccgcggtcagaaccagcccgtgctgaacatcaccaacaagcaggcttttatcacagctcagaaccacggatatgccctggataataccctgcctgccggatggaaacctctgttcgtgaatgttaacgaccagacaaatgaggggatcatgcatgaaagtaaaccttttttcgccgtccaatttcaccccgaagtgacaccgggacctatagatactgagtacctgttcgactcattcttctcccttattaagaaaggcaaagctaccacaattactagtgttctgcccaagcctgcactggtggcgagccgggttgaggtcagcaaagtgttgattttgggctctggcggtctgtctattgggcaagctggagaatttgactacagtggctctcaggcagtgaaagccatgaaggaggaaaacgtgaagactgtgctgatgaacccgaacattgcaagcgtacaaactaacgaggtgggccttaagcaggcagatactgtatatttcctgcctatcacaccgcagtttgtgacagaggtcataaaagcagaacagccggatggccttatcctggggatgggtgggcagacagcgctgaactgtggtgttgaactcttcaaaagaggagtgctcaaagaatacggggttaaagtgctcggtacctccgtggaatctatcatggcaacagaagatagacaactttttagcgataagcttaatgagatcaacgagaaaatcgccccatcttttgctgttgagtctatcgaggacgcactgaaagctgctgacacaattggctatcccgtgatgatccgcagtgcctacgccctgggcggactgggcagcggcatttgtccaaatcgtgaaactctaatggacctatccactaaagcttttgccatgacgaatcaaatcctagtggagaagagtgtcaccggatggaaggagattgagtacgaggtcgtcagagatgccgatgataactgcgtcaccgtatgcaatatggaaaacgtcgacgcaatgggcgtccatacaggcgatagtgtagttgtagcacccgcccaaacactgagcaacgctgaattccaaatgcttagaaggacaagtatcaatgttgtgcggcacttgggaatcgttggagagtgtaacatacaatttgccctccaccctacttcaatggagtactgtataatcgaggtgaacgccagactgagtcgcagctctgccttagcaagcaaggccacaggctaccctctggcatttatcgctgccaaaatcgctctgggaatccctctgcctgaaattaaaaacgtggtgagtgggaaaaccagcgcttgctttgaaccatcactggattatatggtcactaaaattccaaggtgggacctcgacagatttcacggaacttcgtctcggatcggctcctcaatgaagagtgtgggagaggtcatggccatcggcaggaccttcgaagagtcatttcagaaggcactgaggatgtgccatccaagcattgaaggatttacacccaggttacccatgaacaaggagtggcctagcaatctggacctgagaaaggagcttagcgagcccagttccacccggatctacgctattgcgaaggccatcgatgataacatgagcctcgatgagatagagaagctgacatatatcgataagtggttcttgtacaagatgcgggacattttgaacatggagaaaacccttaagggattaaacagcgaatctatgactgaggagaccctgaagcgagccaaggaaattggattcagcgacaagcagatctccaaatgcttgggccttaccgaggcccagactagagagctacgccttaagaagaacattcacccttgggtcaaacagatcgacaccctcgctgccgagtacccgagcgtcacaaactacctgtacgtgacctataacgggcaggaacacgatgttaactttgatgaccatggcatgatggtgttggggtgcggcccctatcacatcggaagcagcgttgaatttgactggtgcgctgtttcaagcattcgcactttgcggcagctcggaaagaagacagtagttgtaaactgcaaccccgagaccgtctctacggacttcgacgaatgcgacaaactttacttcgaagaactgagtctcgagaggattctggatatttatcaccaagaagcctgcggaggctgcataatatccgtgggtggacagataccgaacaacctggctgtgccactgtacaaaaatggggttaagatcatgggcacctcaccactgcaaattgatagagcggaagacaggagcatcttttcagccgtccttgacgagctgaaggtcgcccaagcaccctggaaagctgtgaatacacttaacgaggctttagagtttgctaaatctgtcgattacccctgtcttctgagaccttcttacgtgctgtctggatccgcaatgaacgtggtgttcagcgaagacgaaatgaagaaatttttggaggaggcaacacgggtctcacaagagcaccctgttgtcctgacaaaattcgtagaaggcgcaagggaagtcgagatggatgccgtgggcaaggatggaagagtgatcagtcatgccatttccgaacacgtcgaggatgccggagtgcactcaggggacgcaactctcatgctgcctacccagacaatttctcagggggcaatcgaaaaggtgaaagacgccacgagaaagatcgctaaagccttcgctatctccggtccctttaacgtgcagttcttggtaaagggaaatgacgtcctggtgatcgagtgcaatctgcgcgcaagccgttcttttccctttgtaagcaagactttgggcgtggatttcatcgacgtcgctactaaggtcatgatcggagagaatgtggacgagaagcaccttcccaccctcgaccatcccatcatcccagccgactacgtcgctataaaggcgcctatgttttcctggccaaggctccgggatgctgatcccatcttgagatgcgaaatggcaagcaccggcgaagtggcttgctttggcgagggcattcacacggcattcctgaaggctatgcttagcaccgggtttaagatcccccagaagggaatcctgattggcatccagcaatcctttagacccagattcctgggcgttgccgaacaactccataatgaggggtttaaactattcgccactgaggccacaagcgattggctgaatgcaaacaatgtcccagctaccccagtcgcatggcctagccaggagggacaaaacccatctctgagttcaatcaggaaattgattagggatggaagcattgacctggtcatcaaccttcccaacaataacacaaaatttgtgcatgataactacgtgataagaaggactgcagttgactccggtattccactgctgaccaactttcaggtgaccaaactttttgccgaggcggtgcaaaagtctcgtaaagtggattccaagagcctctttcattatcgtcagtattcagctggaaaagctgca

SEQ ID NO: 43574 - DNA, 4500 bp, Artificial Sequence
  derived and/or modified sequence
atgacaagaattttgaccgcctttaaggtcgtgagaaccttaaagacaggctttggctttacaaacgtgaccgctcatcagaaatggaagttcagtcgacccgggattcgcctgctatctgttaaggcccagactgcacatatcgtcctcgaggatggcacaaaaatgaaaggctattccttcggtcatccttcctctgtcgccggagaggtggtgttcaatacagggctgggggggtatcccgaggccattacagatcctgcatacaaaggccaaatcctgaccatggccaaccctattatcggtaatgggggcgccccggatactactgccttggatgagcttggcctcagtaaatacttagagagcaacgggattaaggtgtcagggctgctcgttctggactattccaaggactataatcattggctagctaccaaaagcctggggcagtggttgcaggaggaaaaagtgccagccatctatggcgtggatacgaggatgctcaccaaaattatccgggacaagggtactatgctcggcaaaattgaattcgagggccaaccagtggactttgtagatcccaacaaacagaatctgatcgcagaggtgtcaacgaaggatgtgaaagtttatgggaagggaaacccaacaaaggttgtggcagtcgactgtgggatcaagaataacgtcatcagactgcttgtgaaaaggggtgccgaggtgcaccttgtgccgtggaatcatgattttactaagatggaatatgatggcatactaattgccgggggcccaggcaaccccgctctggccgagcccctcatacagaatgtgcggaagattctggagagcgataggaaagagcctttgtttggaattagcacaggcaacctgatcacaggactcgcagctggagctaaaacttacaagatgtccatggctaaccgtggacaaaaccagcctgtcttgaacataacaaacaaacaggcctttatcactgctcagaatcacggctatgctttggacaacacactgcccgctggatggaagcccctgtttgtgaacgtcaacgaccagactaatgagggtataatgcacgagtctaagcccttcttcgctgtgcaatttcatcccgaggttacacctggaccaatcgatacggagtatctgttcgactcattctttagcctcattaagaagggcaaggcaactaccatcacttcggtactgccaaagccagcacttgtcgcaagccgggtcgaggtgtctaaagtgttgatcctgggtagtggcggcttgtccatcggacaggctggcgaattcgattacagtggctctcaggccgttaaggctatgaaagaggaaaatgtgaagacagtgctgatgaatcccaatatcgcttccgtccagacaaatgaggtgggccttaagcaggccgacaccgtctacttcctccctattacaccacaatttgttactgaagtgattaaggccgaacaaccagatgggctgatacttggaatgggtgggcaaactgcattgaactgtggcgtggagctctttaagcgaggagttttgaaggaatatggggtcaaagtgctcggcacaagcgtcgagagtattatggccactgaggaccggcagctgttcagcgataagttgaacgagatcaatgagaaaatagccccttcgttcgccgttgagtccatcgaggacgccctgaaggctgcagacaccatcggctatcctgtgatgattaggtccgcatacgcactcgggggcttgggatctggtatctgcccgaatcgggagacactgatggacttgtccaccaaggctttcgccatgaccaatcaaattctcgttgagaaatctgtgacagggtggaaggagattgagtatgaagtcgtgagagacgcagacgataactgcgtaactgtgtgcaatatggaaaatgtggatgcgatgggggtacacacaggtgattccgtcgtggtggctccggcccagacgctgagcaatgccgagtttcagatgctgcggcggaccagcattaacgtcgtgcgccatctcggaattgtgggagagtgtaatatccagttcgctttgcatcccaccagcatggagtattgtatcatagaggtgaacgcccgcttgtctaggtccagcgctctggcctcaaaggcgactggttacccacttgccttcatagctgccaagatcgcgttgggaataccactgccagagatcaaaaatgtggtttccggaaaaaccagcgcctgtttcgagcctagtctcgattatatggttactaaaatccctagatgggaccttgatcgcttccacggcaccagtagcaggatcggctccagcatgaagagcgtcggagaggtcatggctattggtcggaccttcgaggagagttttcagaaggcgcttcggatgtgccacccctccattgaaggtttcacaccaaggctgccgatgaataaggagtggccgtcgaacttggacttgcgaaaagagttatcagaaccttcctctacacggatctatgccattgcaaaggctatagacgacaatatgtccctcgacgagatagagaagcttacttatatcgataaatggttcctctacaaaatgcgagatatcttgaatatggagaagaccctgaaaggactcaacagcgagtcgatgaccgaggagaccctaaagagggctaaagaaattggcttttcagataagcagatctctaaatgtttaggcttaacagaggcacagacacgggagctgcgtctcaagaaaaacatccatccctgggtcaaacagattgacacgctcgcagcggaatatccctccgtgacaaactacctgtacgtgacctataatggacaggaacatgatgtcaactttgacgaccatggtatgatggtactgggctgtggaccctaccacattggttcctctgtcgagttcgattggtgtgctgtttccagcattcggacactgcgacagttaggtaagaaaactgtggtggtgaactgcaatccagagacagtgtcaactgatttcgacgagtgcgataagttgtacttcgaggagctgagtttggagagaattctcgatatttatcatcaagaagcctgtggcggttgcattatatccgtgggcggccagattcctaacaatctggctgttccgctgtataagaatggggttaagatcatgggaacatccccgctccagatagatcgcgcagaagatagaagtattttttctgctgtgctggacgagctgaaagtcgctcaggctccctggaaggctgtcaatacgctcaatgaggccttggagtttgccaagagcgttgactacccctgtctgctgcggccaagctatgtccttagcggtagcgccatgaacgttgtattctctgaggatgaaatgaaaaaatttctggaggaggcaacacgagtatcacaggagcacccggtcgtgctgacgaaattcgtagagggcgcaagggaggtcgagatggatgctgtgggcaaagacgggagggtgatttcccacgccatctccgagcatgtagaggacgccggtgtgcattccggcgatgccactctcatgttgcctactcaaaccatctctcagggcgccatcgagaaagtgaaggacgctacgcggaaaatagcgaaggcctttgcgatttcaggtccattcaatgtgcagttcttagttaaagggaacgatgtgttagtaatcgagtgtaatcttagagcctccaggtcctttcccttcgttagtaaaactttaggagtggacttcatagacgtagctaccaaggtgatgataggcgagaacgtagatgaaaagcatctgccgaccctagatcatcctatcatacccgccgattacgtggccatcaaggcccccatgttttcatggcccaggttgcgcgacgcagacccaatcttgcggtgtgagatggccagcaccggagaggtcgcgtgtttcggcgaaggaatccacactgccttcctgaaggcaatgctaagcacaggttttaaaattcctcagaaaggtatcctaattggaattcagcagagttttagaccaagatttctcggagtggcagaacagctacacaacgaagggtttaagctttttgccacggaagccacctcggattggttaaatgccaacaacgttcccgctacccctgtggcttggccaagccaggagggccaaaacccttcattgtcgagcattaggaagctgattagggatggctcaattgatttggtgatcaacctgcccaacaacaacaccaagtttgtgcatgacaattatgttattagacgtaccgcagtcgactcaggaataccacttctcacaaattttcaggtcaccaagctcttcgccgaggcagtgcaaaagtcacgtaaggtggatagtaagtcactgtttcattaccggcagtacagcgctggaaaggccgct

SEQ ID NO: 43575 - DNA, 4500 bp, Artificial Sequence
  derived and/or modified sequence
atgacccgaatcctcaccgcattcaaggtcgtgcggactctgaaaacaggattcggattcacaaatgtcaccgcccatcaaaagtggaagttcagtcggccagggatacggttgctctcagttaaggcccaaacagcccacatcgtcttggaagatgggacaaagatgaagggatactctttcggacacccatctagtgtggccggagaggttgtgttcaatactgggctgggcggctatccagaggctatcaccgacccggcttacaaaggacagatccttacgatggcaaatccaatcatagggaacggaggcgcacccgacactaccgccttggatgaactgggactctccaagtacttggagagtaacgggatcaaggtctcaggcctgctcgtacttgattactcaaaggattataatcactggttggctacaaagtccctgggccaatggttgcaggaggaaaaggtccctgccatttatggcgtcgataccagaatgctgacgaaaatcatccgggacaaggggacgatgctgggcaaaattgaattcgaagggcaaccggtggactttgtggaccccaataaacagaatctcattgccgaagtatctactaaggatgtcaaggtgtatggaaaggggaaccccacaaaagtcgtggccgtcgactgcggcattaagaataacgtcattcgcctgttggtgaaacgcggcgctgaagtgcatttggtcccgtggaaccatgatttcacaaaaatggagtatgacggcatactgattgcagggggtccgggaaacccagccctggccgagcctctgattcagaacgtccgcaagatcctggaatctgatcgcaaagagccgttgttcggcatttccaccggaaatcttattacgggacttgctgcaggagcaaagacatacaagatgtcaatggccaatcgggggcagaaccagcctgtactcaatatcacgaacaagcaagctttcatcacggctcagaatcacggttacgcgttggataacacactcccggccggctggaagcccctcttcgtcaacgttaacgatcaaacgaatgagggtattatgcatgagtctaaaccgttcttcgctgttcagttccacccggaagtgacacctggccccatcgatactgagtatctgttcgactcttttttctcactgatcaagaagggtaaggctacgacaatcacatccgtacttcccaaacctgcactggtcgcgagtagagtagaagtcagcaaagttcttatactgggatctggcgggttgagcatcggacaagccggtgaatttgattactcaggatcccaggctgtcaaggcaatgaaggaggaaaacgtgaagaccgtgctcatgaaccccaatattgccagcgtccagacaaatgaagtcggcctgaaacaggccgatactgtgtactttctccctattacaccacagttcgtgactgaagtgatcaaagctgagcagccagatggcctgatactgggaatggggggacaaacagcactgaattgcggggtggagttgtttaagaggggcgtcttgaaggagtacggggtcaaagtgctgggcacctccgtggaatcaatcatggccactgaggaccggcagttgttctctgataaactcaatgagattaacgagaaaatcgctcccagctttgccgtagaatccatagaagacgcactgaaggccgcggatacaatcggatacccagttatgataaggtctgcgtacgcactcggaggtctgggcagcggcatttgcccaaatcgcgagactttgatggatctgagcacaaaagcattcgctatgaccaatcagatacttgtggaaaaatccgtaaccgggtggaaagagatagaatatgaagtggtgagggacgccgatgataattgcgttaccgtgtgcaatatggagaacgtcgacgctatgggagtccacaccggagattccgttgtagtggcacccgcacaaacactgagcaatgctgagtttcagatgctgcggcggacatctattaatgtcgtgagacacctggggattgtgggagaatgcaacatccaattcgctctccaccctacatcaatggaatactgtatcatcgaggttaacgctcgcctgagcagatccagtgctctggcatccaaggccacaggatacccccttgcatttatcgctgcgaaaatcgcactcggtatcccactgccagagatcaagaacgtggtttctggtaagacctcagcttgttttgagcccagtctggactacatggtgacaaagattcctcggtgggacctggataggttccacggaacttcttcccgcatcggatcttcaatgaaaagtgtcggtgaggtgatggccattggaagaactttcgaggaaagcttccagaaggctttgaggatgtgtcaccccagcatcgaagggtttacaccaagactgccaatgaacaaagagtggccatcaaatctggacctgaggaaggagctgtctgaaccatcttccactaggatttacgctattgcaaaagcaatcgacgataacatgagtcttgacgagatcgagaaattgacctacattgataagtggttcttgtacaaaatgcgcgacatcctgaacatggaaaaaacgctgaaggggctgaattccgaatccatgactgaggagaccctgaaaagggcaaaggagattggcttcagcgataaacagatttcaaaatgtctgggcctgacagaggcccaaactcgagagcttcgcctgaagaagaatatccacccatgggtcaagcagattgacaccctggccgcagagtatccctccgtgactaactatctgtacgtgacctataatggacaagagcatgacgtaaactttgatgaccacggtatgatggtgctgggttgcggcccataccacattgggtcttcagtcgaatttgactggtgtgccgtgtcatcaatcagaacactgcggcagctcggaaagaagaccgtggttgttaactgcaatccggagactgtttccaccgattttgacgagtgtgacaaactgtacttcgaggagctgtctctggagcgaattctggacatctaccatcaagaagcttgcggaggctgtataattagtgtgggcggacagattccgaacaacctggccgtccccctgtacaagaatggagtgaaaatcatgggaactagcccactccaaatcgacagagccgaggataggtctattttcagtgccgtgctggacgaattgaaagtcgcccaggccccatggaaggcggtgaacactcttaacgaggccctggagtttgccaaaagcgtggattatccatgcctgcttaggccatcttacgttttgtccggatcagccatgaacgtcgtattcagcgaggacgaaatgaagaagttcctggaggaagccacccgcgtgagtcaagaacaccctgttgtgttgaccaaatttgtcgagggggcacgggaggtcgaaatggacgcagtgggcaaggacggacgcgtgatctctcacgcaattagtgagcacgtcgaggatgccggggtgcacagcggagacgcaactctcatgctgcctactcagacaatcagccagggcgccattgagaaagtgaaggatgccactagaaagatcgcgaaggcttttgccatctctggcccgttcaatgtccaatttctcgtgaagggtaacgatgtgttggtcatcgagtgcaatctccgagcctcccggtcatttcctttcgtgtcaaagaccctgggcgtggacttcattgatgtggcaactaaggtgatgattggggagaacgtggatgagaagcacctgccaacattggaccacccaattatacccgcagactatgttgccatcaaggctcccatgttttcctggccacgattgcgagacgccgacccaattctcaggtgcgagatggccagcacgggcgaagtggcttgctttggcgagggaatccacaccgctttccttaaggcaatgctctcaactggctttaagatacctcagaaggggatcctcatcggcattcaacagtcatttaggccccgcttcttgggcgtcgcagagcagctccacaatgagggcttcaagctgtttgcgactgaggcgactagcgactggctcaatgccaataatgttcccgccacacctgtggcctggccgagccaggagggtcaaaatccatccctttctagtatccggaaactgataagagatggctctattgatcttgtgatcaatctgcccaacaataacaccaaattcgtgcatgacaactatgtaatccggcggacggccgtggatagtgggatcccactccttaccaactttcaggttacaaagctgttcgcagaggccgtgcagaaatccaggaaagtggacagcaagtctctgtttcattaccgacaatactcagccggcaaggccgct

SEQ ID NO: 43576 - DNA, 4500 bp, Artificial Sequence
  derived and/or modified sequence
atgactcgaatcctgacggccttcaaagtggtgcggacgctgaaaacagggttcggcttcaccaacgttacagctcaccaaaaatggaaatttagccggccagggatccgtctccttagcgtgaaggcgcaaactgcacacattgtactggaggatgggactaaaatgaagggttactctttcggccacccctcgtcagtggccggcgaggtcgttttcaatactgggctgggtggttatccagaagccattaccgatcctgcgtataaggggcagattttgacaatggctaatccaattataggtaatggaggtgccccggacaccactgctctcgacgaacttgggctgtcaaagtatctcgagtccaatggcattaaagtctctggactgttggtactggattattcgaaggattacaaccactggctggccaccaagtccctgggccagtggctccaggaggaaaaagtaccggccatctacggcgtggatacaaggatgcttaccaagatcatccgagataagggcactatgctcggcaaaatcgaattcgagggacagcctgtggactttgtcgaccccaacaaacagaatcttatcgccgaagtctccacaaaggacgtgaaggtctacgggaaaggcaaccctaccaaagttgtcgctgtggactgtgggatcaagaacaacgtgatacggctgctggtgaaacgcggggccgaagtccatctcgtcccatggaatcacgacttcacaaagatggaatatgatggcatccttatcgcgggcggaccgggcaacccggcactcgcggaacctttgattcaaaacgtcagaaaaattctggagtctgatcgcaaggagcctctgttcggaatctctaccggaaacttgatcaccgggctggcagccggtgctaaaacctataaaatgtcaatggcaaatcggggccagaaccagcccgtcttgaacatcacaaacaaacaagccttcatcaccgcccaaaatcatggctacgcactcgacaatacactgcccgctgggtggaagcctctgtttgtcaatgtgaacgatcagacgaacgagggcattatgcatgagtctaaaccttttttcgcagtgcagtttcatccggaggtgaccccagggccaatcgatactgagtacctgtttgattcattcttttcacttattaaaaaaggaaaagcaactacaattacttctgtacttccaaaacccgccctggtggccagccgagtggaagtgtcaaaagtgctgatactgggcagcggaggactctctatcgggcaggccggtgagttcgattattctggttcccaagctgtaaaggccatgaaagaggagaacgtgaaaaccgtcctgatgaaccctaatatcgcctctgtccaaacaaatgaggtaggattaaagcaagctgatactgtgtacttcctgcctattactccacaattcgtgactgaggttatcaaagccgagcagcctgacggactcatactcggaatgggtgggcagaccgcactcaattgtggagtcgagctcttcaaaagaggtgtgctgaaagaatacggagtaaaggtcttgggcacctccgtcgagtcgatcatggccaccgaggaccgccaattgttctcagacaagctgaatgagataaacgagaagattgcgccctctttcgccgtggaatcaatcgaggatgcactgaaggcagcagataccatcggctatcctgtgatgatccgcagtgcatacgccttagggggcttgggcagtgggatctgccccaatcgagaaaccctgatggacctgtcaaccaaggcttttgctatgaccaatcagattctggtcgagaaatccgttaccggttggaaggaaattgagtatgaggttgtacgcgatgcagacgacaactgtgtgaccgtatgtaacatggaaaacgtggatgccatgggcgtgcatacaggtgattcagtcgttgttgcacccgctcagaccctcagcaatgctgaatttcaaatgctgagaagaacgtccattaacgttgtccgacacttgggaattgtgggggaatgcaatatacagttcgcactgcatcccacttctatggagtattgtattatcgaagtcaacgctagactgagtaggagctcagctctcgcttctaaggccaccggctatccgttagcattcatcgctgccaagatagcactcggcatccccctccctgagatcaaaaacgtggtgagcggaaagacttcggcctgcttcgagccgtcattggactatatggtgacgaagataccgcgctgggacctggaccgctttcatggtacctcttcgaggatcggctcctcaatgaagagtgtgggggaagttatggcaattggcaggacgtttgaagaatcattccaaaaagctctgcgaatgtgccaccccagtattgaggggttcaccccacggttgcctatgaacaaggagtggcccagtaatttggacttgcgcaaagagctgtccgagccttcctccactaggatatacgcaatcgctaaagcaatcgacgacaatatgtcactcgacgagattgagaaactgacctacatagacaaatggtttttatataagatgcgtgatattctaaatatggagaaaaccctaaagggtctgaactccgaatccatgacagaggagacactgaaacgggctaaagaaatagggttttctgataagcagatcagtaaatgtttgggactgacagaagctcaaacaagagaattgcggctgaaaaaaaatatccatccctgggtcaagcagatcgacacgctagccgcggaatacccctccgtgacaaactatttgtacgttacgtacaatggacaggaacatgacgtcaactttgacgatcacggaatgatggtactcggctgtggcccctaccatattggatctagtgtcgaattcgattggtgcgcagtttcatcaattcgcaccctgaggcaactgggaaagaaaactgtggtggtgaattgcaatcccgaaacggtctccactgactttgatgaatgtgataagctttatttcgaagagctgtctctggagaggatacttgatatctaccatcaagaagcgtgtggcggttgcatcatttctgtaggcggccagattcccaataatttagcagtacctctttataagaacggcgtcaaaatcatgggcacatcaccattgcaaatcgacagggccgaggatagatctatcttctctgccgtgttggatgaactgaaggtggcacaagctccgtggaaagccgtgaacaccttgaatgaggcactggagtttgcaaagtcagtagattacccgtgtctcttgaggccaagctacgtactgagcggaagtgcaatgaacgtcgtattctctgaggacgaaatgaagaagtttctggaggaagcgaccagggtgagccaggagcatcctgttgtcctcaccaagttcgtcgagggcgctagggaagttgagatggatgccgtggggaaagacggacgggtgatctctcacgcgatcagcgagcacgtcgaagatgctggtgttcatagcggagacgccacattaatgctcccaacccagactatcagccagggagctatagagaaggtcaaagacgcaacacgtaagatcgcgaaagctttcgctatcagcggacctttcaatgtgcagttcctggtgaaagggaacgatgtgctggttatagaatgcaaccttcgggcgtctcgaagctttccatttgttagtaaaacactgggcgtggattttattgatgttgcaacaaaggtcatgatcggcgagaacgtggacgagaaacatctcccgacactcgatcacccgattatccctgccgactacgtggccatcaaggcccctatgttttcttggcctaggctgagagacgcggacccgattcttcggtgtgaaatggcttcaactggggaagtggcttgctttggagagggtatccatactgcatttctaaaggctatgctctcaaccggattcaaaattccgcagaagggaattctgattggaattcagcagagctttcgccctagatttttaggggtggcagagcaactccacaatgagggctttaaattgttcgccacagaggcaacatccgactggctcaatgctaacaatgtgccggccacccccgtcgcatggccttctcaggaagggcagaatccatctctctcatccatacgcaagctcattcgcgatggatctatcgatcttgtaattaatctgcccaacaataacacgaaatttgtacacgacaactacgttatacgacggacggccgtggattccggcatccccctgctcacaaatttccaagtgaccaaattgttcgctgaggcagtccagaagtctcgcaaggtggattcgaaatctctgttccactaccggcagtactcagccggaaaagcggct

SEQ ID NO: 43577 - DNA, 4500 bp, Artificial Sequence
  derived and/or modified sequence
atgacaaggatcctgactgcgttcaaagttgtgcgcaccctgaagaccggatttggctttaccaacgtgaccgcacaccagaagtggaaattcagcagacccgggatccgcctgctgagcgtgaaagcacagacagcccatattgtgctggaggatggtactaaaatgaaaggatactcctttggccatccctcttcggtcgccggtgaagtggtgttcaacacaggattgggcgggtaccccgaggctatcaccgatcccgcatataagggccagatcctgaccatggccaatcctatcatcggcaacggcggagctcctgatacaaccgctctcgacgaactagggctgtctaaatatcttgagagcaatgggataaaggtgtcaggactcctcgtcttggactactctaaagattacaaccactggctggcgaccaaaagtctggggcaatggctccaagaggagaaggtcccagcaatatatggggtcgataccaggatgctgactaaaattatacgcgataaggggacgatgctgggcaaaatcgagtttgaaggccagccggtcgattttgtggacccgaataagcagaacctcatcgccgaggtgtccaccaaagacgtgaaggtttatggcaaggggaatcccacaaaggttgtggcggttgactgcgggatcaaaaacaacgtcattcgcctgctcgttaaacggggcgccgaagtgcatctcgtgccgtggaatcatgacttcacaaaaatggagtatgatggaatactgattgctggggggcccgggaacccggcactggccgaacccctcatacagaatgtgcggaagatcctggagagtgacagaaaagaaccactctttggcatttctaccggcaatttgattactggtctggctgctggagccaagacatacaagatgagtatggccaatcgaggtcagaaccagcctgtcctcaatatcacaaacaagcaggcttttataaccgcccagaaccacggatacgcgctggataacactcttccggcaggttggaaacctctttttgttaatgtaaacgaccagaccaatgaagggatcatgcacgaaagcaaaccgttcttcgcggtccagttccatcctgaagtgacacccggaccaatcgacaccgaatacctgtttgatagctttttcagcctgattaagaaaggaaaggccacgacgattacctccgtcctgcctaagccggcattggtcgcctcgcgggtcgaagtgtctaaggttctgatcctagggtcaggcggactttccataggccaggccggtgagttcgattatagcggaagccaagccgtaaaggcaatgaaagaggagaatgtgaaaacggttctgatgaaccccaatatagccagcgttcaaacaaacgaagtcgggctcaaacaggccgacaccgtctacttcctgcccattacaccccagtttgtaacagaggtaattaaggcggagcagcccgacggtctaatacttggtatgggtgggcagacagccttgaattgtggcgtggagctgtttaaacgtggcgtcctgaaagagtatggggtgaaggtgttaggcacaagcgtcgagagcatcatggccaccgaggacaggcagctattctctgacaagcttaatgaaattaatgaaaagatcgcgccttcattcgccgtggaaagcatcgaagatgccctgaaggccgccgatacaatcggatatccggtcatgataaggtctgcctacgcgcttggcggcctaggatccggaatttgtcctaatcgcgagacgctgatggacctatccactaaggccttcgctatgacaaatcagatcctcgttgaaaaaagtgtgacaggctggaaggagattgaatatgaagttgtgagagatgccgatgacaattgcgtaacggtctgcaacatggagaatgtggacgcgatgggcgtccatacaggcgactcagtggtggtggcccctgctcagaccttatccaacgctgaattccagatgctgcggcggacatctatcaatgtagtcaggcacctcggcattgtcggcgagtgtaacatccaatttgccctgcaccccaccagcatggagtattgcatcatagaagtgaacgcgaggctgtcacgttcctccgcacttgcctctaaggccactggctacccgctcgccttcattgcagctaagatcgcattgggcatccctctgcccgagatcaagaatgtggtgtccggcaaaactagtgcgtgtttcgagccaagtttagattatatggtgacgaaaatacctcgttgggatctcgataggttccatggaacctcgtcgagaattggaagcagcatgaaatcagtcggggaagttatggctatcggccgtaccttcgaagagtctttccagaaggcactaaggatgtgccacccttctatcgaggggttcaccccacgcctgcctatgaacaaggagtggccttctaacctagaccttcggaaagagttgtccgaaccgagttcgacacggatttacgcaatagcaaaagctatcgacgataatatgtcccttgacgaaatcgaaaagcttacttacattgacaagtggttcctgtataagatgagagatattctgaacatggagaagacattaaagggcctgaatagcgaaagcatgacagaggagactttgaagcgggccaaggagattggattcagtgacaagcagattagcaaatgcctggggttgaccgaagcgcagacgagggagctgagactgaagaagaacattcacccctgggtgaaacagatcgacaccttggccgctgagtacccgagcgtaactaactacctgtacgtgacctataatgggcaggagcacgatgttaattttgacgatcacggaatgatggttctagggtgtggtccttatcacattggctctagcgtcgaattcgattggtgcgcagtaagcagtatccgaactctgaggcaactgggcaaaaaaacagtggtagtcaattgtaatccggagacagtaagtacggattttgacgagtgtgacaagctttatttcgaggagctgtctttggaaaggattctggatatctatcaccaggaagcctgcggcgggtgcattatctcagttggaggccagattcctaataatctagccgtcccactgtataaaaatggggtgaagattatgggcacatccccactgcagatagatcgcgccgaggacagaagcatcttctccgctgtcctggacgaacttaaggtggctcaggccccttggaaggcggtgaacactctgaacgaagctttggaatttgccaagtcggtggactatccatgcctgttgcggccctcatacgtcttgtccggtagcgctatgaatgttgtgtttagcgaagatgagatgaagaaatttctcgaggaggctaccagggtttcacaggaacaccccgtggtgctgaccaaattcgtggaaggcgcacgggaagtcgagatggacgccgtggggaaggacgggagagtgatcagccacgctattagcgaacacgtggaagacgcgggcgtgcactctggcgatgctacacttatgctgcccactcaaacaataagccagggagcaattgaaaaagttaaggacgcaacgcgtaagatcgccaaggcattcgcaatctccgggccattcaacgtacagttcctggtaaagggcaacgacgtgctggtaatcgaatgcaatctcagagcctcccgttcatttccatttgtcagtaagacactgggagtggacttcatagacgttgccactaaggtgatgatcggggaaaacgtggatgagaagcacctgcccaccttggaccacccgattattcccgccgactacgtcgccataaaggcccctatgtttagctggccgcgtttgcgggacgctgacccaattctacgctgtgaaatggcgtctacaggggaggttgcatgtttcggtgagggcattcatacggctttcctcaaggcaatgctctcaacagggtttaagataccgcagaagggaatcctgatcggaatccagcagtctttccggccaagattcctcggagtggcggagcaactccacaatgaggggtttaaactgttcgccacagaggctacgagtgactggttaaacgccaacaacgtacccgctacaccagtcgcatggccttctcaggaagggcagaatccttccctatccagcatccggaagctgatccgagacggctcgatcgacctagtcatcaatttacccaacaataatacgaagtttgtacacgataattatgtgatccggcgaactgccgtcgatagcggcatcccactattaactaacttccaggtgaccaaattgtttgccgaggccgtgcaaaaaagccggaaggtcgactcgaaatccctatttcattaccggcagtattctgctgggaaggccgcg

SEQ ID NO: 43578 - DNA, 4500 bp, Artificial Sequence
  derived and/or modified sequence
atgactcgcattttgaccgccttcaaggtagttagaactctcaagactggattcggcttcaccaacgttaccgctcatcagaagtggaaatttagtagacctggcatacgcctcctgtctgttaaggcccagaccgcacacatagtgctggaggacggaaccaagatgaagggttatagtttcggacacccttcttccgtggcaggcgaggttgtattcaacaccggcctcggcggatatccagaagccattactgatcccgcttataagggtcagatcctcactatggccaacccaatcatcggtaacggcggtgcccccgacacaactgccctggacgagctcggcctgtctaagtatctggagagcaatggcatcaaagtgtcaggtttgctcgtcctggattactcaaaagattacaaccactggctggccacaaaatctctgggccaatggcttcaggaagagaaagtgcctgctatctacggcgtggacacccgtatgctcaccaagattatacgcgataagggtaccatgctgggcaagatcgaattcgagggacagcctgttgacttcgtcgaccctaataagcaaaacctcatagcagaagtgtccaccaaggatgtcaaagtctacggaaaaggaaaccctaccaaggttgtggctgttgactgtggaattaagaacaatgttatccgcttgctggttaagcgtggcgctgaagtacacctcgtcccatggaaccacgacttcaccaagatggaatatgatggtatcctgatcgctggaggcccaggcaatcccgcccttgctgagccccttattcaaaatgtccgtaaaatcctggagtccgaccgcaaggagccacttttcggtataagtactggaaacctcattacaggtctggccgccggcgctaagacatacaagatgtccatggctaaccgcggccagaatcagccagtgctgaacattactaataagcaggcttttatcaccgctcagaaccacggttacgccttggataatactctcccagccggttggaagcccctgttcgtaaatgtcaacgaccagaccaatgagggtattatgcatgagtctaagccattttttgctgtacagtttcaccctgaagtcacacctggacctatcgacacagaatacttgtttgattccttcttttcacttatcaagaaaggcaaggctaccacaataacctctgtgttgcccaagccagctcttgtcgcaagcagggtggaagtctcaaaagtgttgatcctgggcagtggaggcctctctattggacaggccggtgaattcgattattctggatcacaagccgtcaaggctatgaaggaagagaatgtgaaaaccgtccttatgaaccccaacatcgccagcgtgcagactaatgaagttggtctgaagcaagcagacacagtatacttcttgccaatcactccccagttcgtgactgaggtcataaaagctgagcagccagacggcttgatcttgggaatgggtggacaaacagctctcaactgtggagtagagctgttcaaaagaggtgttttgaaagaatacggcgtgaaagtactgggaacctctgtggagtcaataatggccacagaagatcgtcagttgttttctgataaactcaacgagatcaacgagaaaatcgctccctctttcgctgtagaatccatcgaggacgccctcaaggccgccgacaccattggataccccgtcatgatccgttccgcctacgcacttggaggtcttggctccggaatttgccccaacagggagactctgatggaccttagcaccaaagcctttgcaatgactaaccagattctggtggaaaagtctgtgactggttggaaggaaatcgaatatgaggtcgtgagggacgccgatgacaactgtgtcaccgtttgcaacatggagaacgttgacgccatgggtgtccacacaggagatagcgtggtggtcgctcccgcacagacactgtcaaacgccgaattccagatgttgagaaggacctctatcaatgttgtgcgtcacttgggaatcgtgggcgaatgtaacattcaattcgctttgcaccccacctccatggaatactgcatcatcgaagtcaatgcccgcctcagcagatcaagcgccttggcttctaaagcaaccggttatcctctggctttcattgctgctaagattgccctgggcatccctctgcctgagattaagaacgtggtttcaggcaaaacctctgcatgttttgaaccttctctcgattacatggtgactaagatcccacgttgggacctggatagatttcacggtacttcaagcagaatcggatcctctatgaagtcagtcggtgaggtgatggcaattggacgcaccttcgaagagtccttccagaaagccttgagaatgtgtcatccctcaattgaaggcttcacacctcgcctgcccatgaacaaggagtggcccagtaacctggatttgaggaaggagctgtcagaaccctcttccacccgcatatacgctatagctaaggctatagacgataacatgtctcttgacgagatagagaaactgacttacatcgacaagtggttcctgtacaagatgagagatatattgaacatggaaaagaccttgaaaggtcttaattccgagtctatgaccgaggagaccttgaagcgtgcaaaggagataggatttagcgacaaacagatctctaagtgccttggactcaccgaagctcaaactagggaattgcgtttgaagaagaacattcatccatgggtgaaacaaatcgatactctggccgcagagtaccccagcgtaaccaattatctgtacgtcacttacaacggacaggagcacgacgttaattttgatgaccacggtatgatggtactcggctgtggtccctaccacataggctcatctgtggaattcgactggtgcgccgtcagtagcattcgtactctgagacaactgggcaagaaaactgtggttgttaactgtaaccctgagacagtgtctacagactttgatgagtgtgataagctctactttgaagagctgtccttggaacgtatcctcgatatctaccaccaggaggcctgcggtggatgcatcatctctgtgggcggacagattcccaacaaccttgccgttcccttgtacaagaacggagtgaagatcatgggaacatcccctcttcaaatagacagagccgaagataggtccatcttctctgctgtcctggacgagctgaaggtcgcccaggcaccctggaaggccgtcaatactcttaatgaagctctggaatttgctaagtcagtggactacccatgtctgcttcgcccttcctacgtgctcagtggaagtgctatgaacgtcgtgttctcagaagacgagatgaaaaagttcctggaggaagctacccgcgtgagtcaagagcaccctgtagttctcacaaaattcgttgagggcgcccgtgaagtcgagatggatgctgtaggaaaggatggcagggtaatcagtcatgcaatcagcgagcacgtcgaagacgctggcgtacattcaggtgacgctaccttgatgcttcctacacaaaccatctctcaaggagctatcgagaaggtgaaggatgccacccgcaagatcgctaaggcttttgcaatctcaggacctttcaacgttcagttcttggtgaagggcaacgacgttctcgtgatcgaatgcaacctgcgtgccagccgtagcttcccattcgtttctaaaacattgggagtggacttcatcgacgtcgccacaaaagtgatgatcggcgagaatgtcgatgagaaacacctgcccaccctggatcacccaatcatcccagctgattacgtggctataaaagcccctatgttttcctggcctcgtctgagagatgccgacccaatcctcagatgcgaaatggcatctactggcgaggtcgcctgctttggagaaggaatccatacagcttttttgaaggccatgctgtcaaccggatttaagatcccccaaaaaggtatcctgatcggtattcagcagagcttccgtcccagattcctgggagtagctgaacagttgcacaacgagggctttaagctcttcgctactgaagctaccagcgattggttgaacgcaaacaatgtccctgctactcccgtggcctggcccagtcaagagggacagaatccaagtctgagtagcatcagaaagttgatacgtgacggatcaattgacctcgtgatcaaccttcctaacaataatactaagttcgttcatgacaattacgtaatcagaagaaccgccgtcgattcaggaatccctcttttgacaaacttccaagtcactaagttgtttgccgaggctgtacagaagagtaggaaggtggactccaagagtttgttccactaccgccaatacagtgccggcaaggccgcc

SEQ ID NO: 43579 - DNA, 4500 bp, Artificial Sequence
  derived and/or modified sequence
atgacccgcattctcaccgcgttcaaagtggtcaggacactgaagacgggatttgggttcactaatgttaccgcacatcagaagtggaagttcagtaggcccgggatccggctgctgtctgtgaaagctcagacagcacacatcgttctggaagatggtaccaagatgaaaggttattcatttggacatccaagtagtgtggctggtgaggtggtgttcaacactggactcggtggctatccagaagccattacggaccctgcttacaagggtcagattctgactatggcaaatccaatcattggaaatgggggagctcccgacaccactgcgctcgatgagctcggcctgagtaagtatctggagtccaacggtataaaggtgagcggactgctcgttctcgattactccaaagattataaccactggctcgccaccaagagtcttggccagtggctccaggaggagaaagttcctgccatttacggcgtggacacccgcatgctgacaaaaattattagggacaaggggaccatgttgggcaaaattgaatttgagggtcagcctgtggacttcgtggacccaaataagcagaacttgatcgccgaagtttcaaccaaagacgtgaaggtgtatggcaaagggaatccgaccaaggtcgtagctgtagactgcggcattaagaataacgtcattaggttgctcgttaaacgcggagccgaggtgcatctggttccatggaaccatgactttactaagatggagtacgatggaattcttatcgcgggcgggcctggcaaccccgcactcgctgagccgctaatacagaacgtcaggaagatcttggaaagtgatcgaaaagagcctttgtttggcatttctaccggcaacttaattacgggtctggccgccggcgccaagacctacaaaatgagcatggccaatcggggacagaatcagccagtgctgaatattacgaataaacaggccttcatcacagcccaaaaccacggatacgccctcgacaacactttgccagcgggatggaaacccctatttgtgaatgtgaacgatcagactaacgaaggcatcatgcacgagagtaagcctttttttgcagttcagtttcatcctgaagttacccccggcccgatcgatacggagtacttgtttgatagctttttttcattgataaagaagggcaaagcaactacaatcacatcagttctgcccaagcccgcccttgtcgctagtagagtcgaggtttctaaggtgctgattttaggcagtggcgggctgagcatcggccaggctggtgagttcgattattccggctcccaggctgtgaaggccatgaaggaagaaaatgttaaaacggttcttatgaaccctaatatcgctagcgtacaaaccaatgaagtcggtcttaaacaggccgacactgtctacttcctccctattactccccagtttgtgacggaagtgatcaaggcggagcagcccgacggactgattctggggatgggtggacagacagcgcttaactgcggagtcgagctattcaagcgtggcgtgttgaaggagtatggggtaaaggtattagggacttccgtagagagcataatggccaccgaggaccgacagcttttctctgacaaactgaacgagatcaatgagaagatcgctccatcttttgctgtggagtctattgaggacgccctgaaggctgcagataccattggatatcctgttatgatccggtcagcgtacgctctcggggggctgggttccggaatttgcccgaaccgggaaaccctgatggacctgtccactaaggctttcgcgatgactaatcaaatcctggttgagaaatctgtgacagggtggaaagagatcgaatatgaggtcgtaagggacgccgatgataactgcgtgaccgtctgcaatatggagaatgtcgatgccatgggcgttcatacaggggattcagtggtagttgcccccgcacagaccttgtctaatgctgaatttcagatgctgagaagaacaagtatcaatgtggttcgccatctcggaattgtaggcgagtgcaacattcagttcgcgcttcatccgacttcaatggagtactgcattattgaggtgaatgctaggctgagtagaagttcagccctggctagtaaggctacaggctatccccttgccttcatcgcggctaagatcgcactcgggattccactgcctgagattaagaacgtggtatctggcaagacctcagcttgcttcgagccctccctggactacatggtgaccaagataccgcggtgggatctagaccgcttccatggaacatccagtaggattggaagttcaatgaagtctgtcggggaggtcatggccattggtcgtacatttgaggaatcctttcagaaggctctgaggatgtgtcatcctagtatcgaggggtttactccccgattacctatgaacaaggagtggccttctaacctcgacctgaggaaagagttaagtgagccctcatctacccggatctacgctatcgcaaaggccattgatgataacatgtccttggatgagattgaaaaattgacctacattgataaatggttcctttacaaaatgcgtgacattcttaacatggagaaaacacttaagggtcttaactctgagtccatgactgaagaaacactgaaacgggcaaaggagatcggattttccgataagcagatctcgaagtgtctaggactaactgaagcccagacccgggagctgcgccttaaaaagaacattcatccttgggtgaagcagatcgacaccctggcggctgagtatccatcagtgactaattacctttacgtcacgtataatgggcaggagcacgacgtgaatttcgacgaccatggcatgatggtgttgggctgtggcccttaccacatcgggagctctgtcgagttcgactggtgcgcagtgtctagcatcaggactcttaggcaactgggcaaaaaaaccgttgtggtgaactgcaatcctgagaccgtgtccactgactttgacgaatgcgacaagttgtatttcgaagagttgagtcttgagcgcatcctggatatctaccaccaagaagcctgcggtgggtgtatcatcagtgtgggcgggcagattcctaacaatctggctgtgcctctctacaagaacggcgttaaaatcatgggtacttccccacttcagatagatagagccgaggaccggagcatttttagtgccgtgctggatgaattgaaggtagcccaggctccatggaaggcagtgaataccttaaacgaggccctagagttcgcgaagagcgtggattatccatgcctgctgcggccgtcttacgttttatccggtagtgccatgaatgtggtgttctccgaagatgaaatgaaaaagttcctggaggaagctacgcgggtgagccaggaacatcctgtggttttgactaaatttgttgagggtgcccgcgaggtggaaatggacgccgtgggaaaagacggcagagtgatcagtcatgccatctcagagcatgttgaggatgcaggtgtgcattccggtgatgcaaccctgatgttgcccactcaaaccatatcacagggtgccatcgagaaggtaaaggacgcaactcgcaagatagctaaggcctttgcaatatcaggcccttttaatgtgcaatttcttgtgaagggaaacgacgttcttgtgattgagtgcaatctgcgtgcatcacggtccttccccttcgtctccaagaccttaggagtagattttatagatgtggccacaaaagtcatgatcggcgaaaatgtagatgaaaagcacctccctacactggatcatcctataatcccggccgactacgtcgccattaaggcacctatgttcagttggcctaggctacgtgatgctgatcctattctgaggtgcgagatggcgtcgactggcgaagtcgcctgcttcggcgaaggtattcacactgcctttttaaaggccatgttaagtaccgggtttaaaataccccagaagggtatcttgatcggcatacaacagtccttcagacctagattcctcggagttgcggaacagctgcacaatgagggatttaagctcttcgctaccgaggctacatccgattggctaaatgctaacaacgtacccgctacgccggtagcatggccctcacaagagggacagaacccgtcactgtcctcaatccgcaagttaatccgcgacggttctatcgacctagtgatcaatctacctaataacaacaccaaatttgtgcacgacaactacgtgatcagaaggaccgccgtagacagcggaatccctctgctaacaaatttccaggtgacaaagctctttgctgaagccgtccagaaatcaaggaaagtggatagcaagtccctgttccattatcggcagtactccgctggcaaggccgcc

SEQ ID NO: 43580 - DNA, 4500 bp, Artificial Sequence
  derived and/or modified sequence
atgacgaggatcctgactgcattcaaggtggtgcgtacgcttaagacgggttttggattcaccaacgtcacagcacaccagaagtggaagtttagcaggcccggaattaggctcttgtctgtcaaggcccagaccgcccacatagtgctcgaagacggtacaaaaatgaaagggtattcattcggccacccatcatctgtggctggcgaggttgtattcaacacaggcctcggggggtacccggaggcaatcaccgatcctgcctacaagggtcagatcctgactatggccaatccgatcattggaaacggcggggctcctgatactaccgccttggacgagctggggctcagtaaatacttggagtcaaacgggatcaaggttagcgggttgctggtcttggattacagcaaagattataaccattggttggcaaccaagtctcttggacagtggcttcaggaagaaaaggtgcctgctatctacggggtggatacgcgcatgctcacaaagattattagagacaaaggaacaatgcttgggaagattgagtttgaaggtcagcctgtggacttcgtggaccccaataagcagaatctgattgcagaggtgtccactaaggacgtgaaggtgtacggaaaaggcaatccgacgaaagtggttgccgtggactgcggaatcaaaaataatgttattcgtctgcttgttaagaggggcgccgaggtgcaccttgtgccctggaaccatgactttacaaagatggaatacgatggcattttaatagctgggggcccaggtaatccggccttagccgaaccgctgattcagaatgtccggaagattctcgagtctgatcgtaaggagcctttatttggcatcagtactggaaacctgataactggactggcagcaggggccaaaacttacaaaatgagcatggcaaatagaggccagaaccagcccgtgttgaatatcaccaataagcaggcattcattacagcccaaaatcatgggtatgcactggataacaccctgccagccggatggaagccactttttgttaatgtaaatgatcagacaaatgaggggatcatgcatgagtctaaacccttttttgctgttcagtttcaccccgaagtgacacccgggcctattgacaccgagtacctgtttgacagcttcttttcacttattaagaagggaaaggctacaacgattacttctgtgctgcctaagcccgcgttggtcgcttccagagtggaggtgtctaaggtcctgattctgggctcaggcggcctcagtatcggccaggccggtgaattcgattactctggctctcaggccgtgaaggccatgaaagaggagaacgtgaagacagtgctgatgaaccctaacatcgcctccgttcagaccaacgaagtgggcctgaaacaggctgataccgtatacttcttgcccattactccccagtttgtcaccgaggtcattaaagccgagcagcctgacggccttatattggggatgggcgggcagaccgcactgaattgtggggttgagctctttaaacggggtgtgctcaaagaatacggcgtaaaagttctcgggacaagtgtggagagtatcatggctaccgaagatagacagctcttcagcgataagcttaatgagattaatgagaagattgcgccatccttcgccgtggagtctatcgaggacgccctcaaagccgccgacaccatcggctatccggtgatgatccggtccgcatacgcattgggcggcctgggctccggaatctgtcctaacagagagaccctaatggacttgtcaactaaggcgttcgccatgacaaaccaaatccttgtggagaaatcagtcactggctggaaggagatcgagtatgaggtggttagagatgccgacgataattgtgttaccgtctgcaatatggaaaacgttgatgccatgggggttcatacaggagactctgttgtggtggcccccgcccagactttatctaatgccgagttccagatgctgcgacgtacaagcattaacgtcgttaggcacttggggatcgtcggtgagtgcaacattcagttcgcacttcatcccacctcgatggagtactgcatcatagaagttaatgcccgactgtcacggtccagcgccttggcctcgaaggcaaccggatatcccctagcattcattgctgcaaagatcgcactgggtatccctctccctgagattaagaatgtcgtgagtggcaagacttcagcgtgctttgagccctcccttgactatatggtgaccaaaatcccgagatgggatcttgatcggtttcacggcacttcttctagaatcggttcgtccatgaagagcgtcggagaagttatggcgatcggccggacgttcgaagaatcatttcaaaaggcgcttcggatgtgtcatccctcaatcgagggttttacacctcggctgccgatgaacaaagagtggccaagcaatctggacctgcgaaaagaactgtctgagccatccagcactcggatttatgcaattgcaaaagctatagatgacaatatgagcctggacgaaatcgaaaagctcacatacattgacaagtggttcctttataaaatgcgcgatattctgaatatggaaaagaccttgaaaggactgaacagtgagagtatgacagaagagacccttaagcgcgctaaagaaattgggttttctgacaagcagatctccaaatgcctgggcctaactgaagcgcaaactcgcgaattaaggctcaagaagaatattcacccatgggttaaacagatcgataccttggctgccgaatacccctctgtgacaaattacctttacgtgacctacaacggccaggagcacgacgtaaatttcgacgatcacggcatgatggtcctgggctgtggcccgtatcatatcggctcctccgtagaatttgactggtgcgcagtcagtagcatacgcactctgcgtcaactgggtaaaaaaaccgtggttgtgaattgtaacccggaaacagtatctacagattttgacgagtgtgataagctttacttcgaggaactttcactggagcgaattctggacatttaccatcaggaagcttgtggaggatgcattatttctgtaggcggacagattccgaataatctggctgtaccactctacaagaatggcgtcaagattatggggacatctccccttcagattgatagagctgaggataggtccatcttcagtgccgtgctcgatgaacttaaggtagctcaggccccttggaaagcggtgaatacgctgaatgaggctcttgagtttgctaaatctgtggattacccttgcctgctgcggccttcttatgtactgtctggatccgccatgaatgtggtcttctctgaggacgaaatgaagaagtttcttgaggaagccacacgggtgtcgcaggaacatcctgtcgtcttgactaagttcgtagagggggcccgagaggttgaaatggacgctgtcggaaaagacggaagggtgatctctcatgctatcagcgagcatgttgaagatgccggggtccactccggagatgccactctaatgctgcccactcagacaatctctcagggggcaattgagaaggtaaaagacgccactagaaaaatcgctaaagcattcgctatctctggcccattcaatgtacaatttctggtcaagggaaatgatgtgctcgtaattgaatgcaacctgagagcctcgcgcagcttcccgtttgtctctaaaactctgggcgtagatttcatcgatgtggctaccaaggtaatgattggcgaaaacgtggatgaaaagcacttacctactctggaccaccctatcatcccagccgattatgtggccatcaaggctcccatgttctcttggccaaggttgcgggacgccgatcctattctgaggtgcgagatggccagcacgggcgaagttgcctgttttggcgaggggatacacacagcatttctcaaggcgatgctcagtaccgggtttaaaataccgcagaagggcatccttattggtatccagcagtctttcaggccacgattcctgggcgtggctgagcagcttcacaacgagggatttaaactttttgctacagaagcgacaagtgattggctaaatgctaataatgtgcccgctacgcctgtcgcctggccttctcaagaggggcagaaccctagcctcagttccattaggaagctgatccgggacggctcgatcgacctcgtgataaatttgcctaataataatactaaattcgtgcacgacaattacgttattcggaggaccgccgtggacagcggcatccccttgctgaccaacttccaggtgacaaaactattcgctgaggctgtgcagaaaagcagaaaagtcgactctaaatcactctttcactaccgccagtactcagctggcaaagctgct

SEQ ID NO: 43581 - DNA, 4500 bp, Artificial Sequence
  derived and/or modified sequence
atgaccaggatcttgaccgccttcaaggttgtgcggaccttgaagacagggttcggcttcactaacgtgacagcccatcagaaatggaagttctctcgccctgggattaggctcctgtccgtgaaagcccagactgctcatatagtgttggaggacgggacaaaaatgaaaggctacagcttcggacacccatcttctgtcgccggagaagtggtgttcaatactggactgggagggtatccagaggccataactgatcccgcctataaaggccagatactaaccatggcaaacccgatcataggtaacgggggggcgccagatacaaccgctttggacgaactgggcctgtcaaagtaccttgaatctaatggcataaaagtttccggcctattggtactggattactcaaaagactacaatcattggctggcgacaaagagtctgggacagtggcttcaggaggaaaaggtgcctgccatctatggggtggacacacgaatgctgaccaaaatcattcgtgataaaggaactatgctcgggaagatagagttcgagggtcaacccgttgatttcgtggacccaaacaagcagaatctcatcgctgaggtttcgaccaaagacgtcaaggtgtacggcaaagggaaccccaccaaggtggtggccgtggattgcgggatcaagaataatgtgatccgcctcctggtcaaacgtggagcagaggtccacttggtcccctggaaccacgacttcaccaagatggagtatgacggtatcctcatcgcgggtggacctgggaatcctgcactggccgagcccctgatccagaacgtgcgcaagatcctcgagtctgatcggaaggagcccttatttgggatcagcaccgggaacctgatcaccggcctggcggctggggctaagacatataagatgtcaatggctaatcgtggccagaatcagcccgtactgaacattactaacaagcaggctttcatcacagctcaaaaccacggatatgccctggataatactttacccgccggctggaaacccctcttcgtgaacgtgaatgaccagactaatgaaggaatcatgcacgaatctaaacccttctttgccgttcagtttcatcccgaagtcaccccaggcccaatcgatacagagtatcttttcgattcctttttcagtctcatcaagaagggcaaagcgacaaccatcaccagcgttctaccaaaaccggcactggtagcatctcgggtcgaggtctccaaagttctgattctcgggagtggaggactgagtatcgggcaggctggcgagttcgactactcaggctcccaggctgttaaggccatgaaggaagagaacgtgaagaccgtgctcatgaaccctaatatcgcatcagtgcagactaacgaggtgggtctgaagcaggccgataccgtctacttcctgcccataacgccccagttcgtcacagaagtgatcaaagcggaacagccggatggcctgatactgggaatgggtgggcagactgccttaaactgcggcgtcgagctcttcaagagaggggtgctcaaggagtacggcgttaaggttctgggcacatccgtcgagagtatcatggcaacggaggatagacagttgttctctgacaagctcaatgaaataaacgagaagatcgctccgtcatttgctgttgaaagtatcgaggatgccctgaaggcggccgataccatcggctatcccgtgatgatccgatctgcctatgccctcggcggacttggctctggaatctgtcccaaccgggagacactgatggaccttagtacgaaggccttcgcgatgaccaatcagatccttgtagaaaaatccgtcactggatggaaagaaattgagtacgaggtggtccgggatgccgatgataactgtgtgaccgtctgcaatatggaaaacgtcgatgcgatgggcgtgcataccggagattccgtggtggttgcaccagcacagacactgagcaatgccgagtttcagatgcttaggcgcacttctatcaacgtcgtccgacacctgggaattgtcggggaatgcaatattcagtttgcacttcatcctacgagcatggagtattgcatcatcgaagtgaacgcccgcttgagcaggagttctgcgttagcctcaaaagccactgggtaccccctggcattcatcgccgcaaaaatcgcattgggcatccccctgcccgaaattaaaaacgtggtctccggaaagacaagcgcctgcttcgagccttccctcgattatatggtgacaaagattcccaggtgggatctcgaccggtttcatggcacttcatctcgcattggctccagcatgaagtccgtgggcgaagtcatggctatcggtcggacctttgaggaatcctttcagaaagccctgaggatgtgccatcctagcattgaggggttcacacccagactacctatgaataaagagtggccatccaaccttgatctgcgaaaggagctaagtgaaccatctagcacacggatctacgccattgccaaggccatcgatgacaatatgtccttggatgagatcgagaagcttacctacatagacaaatggttcctctacaaaatgcgggatattctgaatatggaaaaaactctgaaggggcttaatagcgagtccatgacagaggaaaccctgaagagagccaaggagatcggattcagcgacaaacagattagcaagtgcctcggactgacggaggcccaaaccagggagctgcgactcaagaagaacatccatccatgggtgaagcaaatcgacacacttgctgccgagtatcccagcgtgaccaactatttatacgtgacctataatggccaggaacacgatgtgaattttgacgaccacgggatgatggttcttgggtgtggcccctatcatatagggtcctcggttgaatttgactggtgcgccgtgagctctattcggaccctcaggcagctgggaaaaaagacagttgttgtgaactgcaaccccgagaccgtgtccaccgacttcgatgagtgtgacaagctttacttcgaagagctgtcattggaaaggattctcgacatttatcaccaagaagcttgcggggggtgtattatctccgtgggggggcagatccctaataacctggccgtgccgttatataagaatggcgtgaagattatggggacctctccgttgcagatcgacagggccgaagacaggtccatcttttcggctgtcctcgacgagctgaaggtggcgcaggctccttggaaagccgtaaacaccctcaacgaagcgctggaattcgctaaatccgtggactacccttgcctcctgcgaccttcttacgttcttagtggctcagcgatgaacgtagtgttcagcgaggatgagatgaagaagttcctcgaagaggcaacgcgtgtgtcccaagagcatccggttgtgttaaccaagtttgtggagggggccagggaagtggagatggacgctgtcggcaaggacggtagagtgatctcccatgccatcagtgagcatgtggaagacgccggggtgcatagcggcgacgcaaccctcatgctgccaacccagacgattagccagggggcaattgaaaaagtgaaggacgcaacacggaagatcgcgaaggcgtttgcaatcagtggtccgtttaatgtccagtttcttgtcaaaggaaatgatgtgctggtcattgagtgcaatcttcgggcgagtaggtcgttccccttcgtgtccaaaactctcggagtcgacttcatcgacgtcgcgacaaaggtgatgattggggaaaatgtcgacgagaaacatcttcctaccctggatcatccaatcattcctgcagattatgtcgcaatcaaggctcctatgttcagctggccgcgtctgagggatgcggaccctatactgagatgtgagatggcgtctaccggtgaggtggcctgtttcggcgaaggcatccacaccgccttcctgaaagccatgctgtctacgggattcaaaattccacagaaagggatccttattggcatccagcaaagctttcgccccaggttcctgggtgtggccgaacagctgcacaacgaaggtttcaagctgtttgctacagaggccacgagcgattggcttaatgctaataacgtgcctgctacacctgtggcctggcctagtcaggagggacagaatccatccctgtcatccattcgcaaactaatacgcgacggcagcattgatctggtgataaacctccccaacaataatactaagttcgtccacgacaactatgtaatcagacgaacagcagtggattcgggcatacctctgcttactaatttccaggtgactaagctgtttgcagaggccgtgcagaaaagtaggaaggtggactctaaaagcctgttccattaccggcaatactcagccgggaaggctgct

SEQ ID NO: 43582 - DNA, 4500 bp, Artificial Sequence
  derived and/or modified sequence
atgactaggatattaactgcgtttaaagtggtcaggacactaaaaacagggtttgggtttactaacgttactgcccaccagaaatggaaatttagtcgacccgggatccgattactttccgtgaaagctcagactgcccatattgtgctggaagatggaactaaaatgaaagggtattctttcgggcacccctccagtgttgccggggaagtggtattcaacactggacttggaggatatcccgaagccataacagaccctgcctacaaaggacagatccttacgatggccaatccaattatcggaaacgggggggcaccagatactactgccctcgatgaattggggctcagtaaatatctggagagtaatggaatcaaggtttctgggctgctggtgctggattattctaaagattataaccattggctcgctacaaagagtcttggacagtggctccaggaagaaaaagtgcccgcaatatatggagttgatactcggatgctcactaaaataatacgggataaaggaactatgctggggaaaatcgagtttgaaggacagccagtggattttgtggatcctaacaaacaaaatttgatcgccgaggtatcaacaaaggacgtgaaagtctacggaaaggggaatcctacaaaagtcgtagccgttgattgtgggatcaaaaataacgttataaggctcctagtcaaacgaggagctgaggtgcatttagtaccatggaaccatgattttacaaaaatggagtacgatggaatcctcatagcaggggggcccggaaatccagcattagccgaacctctcatacagaacgtgcggaaaatcctagagagtgatcggaaagaaccattatttgggatatccactggaaatttaataacaggattagccgccggagccaaaacttataaaatgagtatggcaaacagagggcaaaatcagcccgtgttaaacatcactaataaacaggctttcatcactgcacagaatcacgggtatgcactcgataatactcttccagccggatggaagcctctgtttgttaacgtgaacgatcagacgaatgaaggaataatgcatgaatctaaaccattctttgcagttcagtttcaccccgaagttactcctggacccatagatacagaatatctctttgactctttcttttcattgatcaaaaagggaaaggcaacaacaatcacaagtgttctgcccaaaccagcccttgtcgcatctagagtggaagtgtctaaagtccttatcctcgggtccggagggctgtccatcggacaggcgggggaattcgactattcgggatctcaggccgtgaaagcgatgaaagaagaaaacgtgaaaactgttttaatgaatcccaatatagcttcagtgcagacaaacgaagtgggactcaaacaggctgatacagtgtatttccttcccattactccacagtttgtgacagaagtcatcaaagccgaacagcccgatggactgatattagggatgggggggcagacagcgctaaattgcggggtcgagctcttcaaacgcggagtgctgaaggaatatggggtgaaagtactggggacatcagtagagtcaatcatggctactgaagacaggcagctgttttctgacaaacttaacgagatcaacgaaaaaatagctccttctttcgctgtagaatcaatcgaagacgccctaaaagcagcagacactatcggatatccagtcatgatcagatctgcctacgccctgggaggactcggatctggaatctgccctaatcgggaaactttgatggatctgagtacaaaagccttcgccatgacaaaccagatcctagtagaaaaaagtgtgacagggtggaaagagatagaatacgaagtagtccgggacgctgacgacaattgtgtgacagtatgtaacatggagaatgttgatgcaatgggggtgcacactggggattctgtggtagttgcccccgcccagactctctctaacgccgagttccagatgttacgtaggacaagtatcaacgtagtccgccacctcgggatagtgggggaatgcaatatacagtttgccctccatcctacaagtatggaatattgtataatcgaggtaaacgcaaggctgagtagatcttcagccctcgcatctaaagccactggatatcctttggcatttatcgccgccaaaatcgccctcgggatacctctccccgaaataaaaaatgtagtctcaggaaaaacatccgcctgtttcgaaccctccctcgattacatggtgacaaaaatccctcggtgggacctggatcggttccatgggacgtcttcccggattgggtcttcaatgaaaagtgtcggggaagtgatggctatcggacgcacattcgaagaatctttccagaaagcactacgcatgtgccatccctctatcgagggatttacaccccgtcttccaatgaataaagaatggccctcaaatctagatctaaggaaggaactatctgaaccatcttccactcgcatctatgctatagctaaagccatcgacgataatatgtccctcgacgaaatagaaaaattgacatatatcgacaaatggttcctgtataagatgcgggatatattaaacatggaaaaaacattaaaggggcttaattcagaaagtatgactgaagaaactctaaaacgcgctaaagaaataggattctctgataagcagatatctaaatgtctcgggcttacagaagcacaaacacgcgaactaagactcaagaaaaatatccacccctgggtcaagcagatcgatactctcgctgcagaatatccatctgtgacaaactatctttatgttacatacaacgggcaggaacacgacgtaaactttgatgatcacggaatgatggtgctggggtgtgggccataccatattggatcatccgtggaattcgattggtgcgccgttagttctattcgaactctccgacagcttgggaagaagacagttgtggtgaattgcaatcccgaaactgtgtctacggatttcgatgaatgcgataaactctattttgaagagctttctctggaacgaatactcgatatatatcaccaagaggcttgtggagggtgcataatctctgtcggggggcagatccccaataatctcgcagtgcctttgtacaaaaatggagttaaaatcatgggaacttctccccttcaaatagatcgagctgaggaccggtctatattttcagccgtattagatgaactcaaggtcgcccaggctccctggaaagctgtcaacactctgaacgaggccctagagtttgcaaaatccgtcgattatccttgtctgcttagaccaagttatgtactttctggatcagccatgaacgtggtgttttcagaagatgaaatgaaaaagtttctcgaagaagctactcgggtctctcaggaacatcctgtagtactcacaaaatttgtcgaaggggcacgggaagtagagatggatgctgtcggaaaggatggacgagtcatctcacatgcaatctcagaacatgttgaagatgcaggagtccattcgggagatgcaactctcatgctgccaactcagacaatatcccaaggagcaatcgaaaaagttaaagatgccacacgtaagatcgccaaagcttttgctatctctgggccttttaatgtgcagttccttgtgaaagggaatgatgtcttggtgattgaatgtaatttgagagcctcgcggtccttcccctttgtttccaaaactctaggagtggactttattgatgtggccactaaagtcatgataggagaaaacgtggatgaaaaacacctccctacacttgatcacccaatcattcccgccgattatgtggctataaaagcaccaatgtttagttggccaaggctgagggacgctgatcccatactccgttgtgaaatggcatctacaggagaagtagcgtgttttggggaagggatacacacagcattcctcaaagccatgctgagtactggatttaaaataccacagaaaggaatcctcatcgggatacaacagtcttttcgccctaggttcttaggagttgccgagcagctacataatgaggggtttaaactgttcgccactgaagcaacatccgattggctaaacgcaaacaacgtaccagcaacacctgtcgcctggccatcccaggaagggcaaaacccctccctatcaagtattcgcaaactgattagggatgggtctatcgatctcgtgataaatctgcccaataataatacaaaattcgtacatgataactatgtaatcaggcggactgccgtggattctggaataccacttctgacaaacttccaggtgacaaaactcttcgctgaagctgtccagaaatcaagaaaagtcgattctaaatctctatttcattatcgccagtactccgctgggaaagcggca

SEQ ID NO: 43583 - DNA, 4500 bp, Artificial Sequence
  derived and/or modified sequence
atgacacgcattctgacagccttcaaggtcgttcgcacattgaagaccggattcggatttaccaacgtgactgcgcatcagaagtggaagttttcacggcccggaattcggctgctcagcgtcaaggctcaaacagctcatattgtgctggaggacggtactaaaatgaagggctattcctttgggcatccaagcagcgtcgcgggcgaagtagttttcaacactggactgggtggctatcctgaagccatcaccgatcccgcctataagggacagatactcactatggccaacccaatcatcggcaacgggggggctccagacacgacagcactggatgaactgggactgtctaagtacctggaaagtaatggcatcaaagttagtggcttgttagtgttagattacagcaaagactataaccactggctggccacaaagagtttgggtcagtggctccaagaggagaaagtgcctgcaatttacggcgtggatacacggatgctaactaagattattcgcgacaagggaaccatgctgggtaagattgaattcgaaggccagcctgttgattttgtggaccccaacaaacaaaatctgattgctgaagtatccactaaggacgtgaaggtctacggcaaaggcaaccctactaaagtggtcgccgtagattgtggcatcaagaacaatgtgatcaggcttttggtgaagaggggggctgaggtgcacttagtgccctggaatcatgattttactaaaatggagtacgacggaatcctgattgctggcggacctggtaatcccgctctcgctgaaccgttgattcagaacgtgaggaagatcctcgagtcagaccgtaaggaacccttgtttgggatcagtaccggaaatttgatcaccgggctagctgcgggcgccaagacttacaagatgtctatggccaataggggacagaaccagcccgtgttgaacataaccaacaagcaggccttcatcacagctcaaaatcacgggtatgcattggataacactctcccagcgggatggaaacctctatttgtcaatgtgaatgatcaaacaaatgagggaataatgcacgaatctaaaccattcttcgccgtccagttccacccagaagtgaccccggggccaatcgacaccgaatacctgttcgatagctttttctcactgatcaaaaaaggaaaggccaccacaatcactagcgtcttaccaaagcctgccctagtcgcttcaagagtcgaagtgtcaaaagtgctgatactaggaagtggagggctgtcaatcggccaggccggcgagtttgattattctggctcccaggccgtgaaagccatgaaggaagaaaatgtgaaaactgtgcttatgaatccgaacattgcttctgtacagacaaatgaagtgggactgaaacaggctgataccgtttacttcctccccatcacacctcaattcgtcacggaagtcattaaggccgaacagcctgatggcctgatcctgggaatgggaggacaaactgcactgaattgcggggtggaactgtttaaacggggggtactcaaggagtatggcgtgaaagtgcttgggacatccgttgagtcgatcatggcaacagaggaccgacagttgttttctgacaagctgaacgaaattaacgaaaaaattgccccaagctttgcagttgagagtatagaggatgccctgaaggcggcagacacaatcggataccccgtcatgatccggagtgcttacgctctcggaggacttggaagcggaatctgtccgaaccgcgagaccctgatggatctgagtactaaagcattcgcaatgactaatcagatcctggtagagaagtctgttacaggttggaaagaaattgaatatgaagtcgtgcgggatgcggatgataactgcgtaaccgtgtgcaatatggagaacgttgacgcaatgggagttcacactggggactcagtcgtggtagcgcccgcacaaacactcagcaatgctgagttccagatgttgcgccgtacctctatcaatgtggtgcgacacttgggaatagtgggagaatgcaacatccagtttgcgctgcaccctacttccatggaatattgtattatcgaggttaatgcacggctatccagatccagcgcgctggctagcaaggcgaccggatacccactcgctttcattgcagctaagatcgccctcgggattccgctgccagaaataaagaacgtggtgtcggggaagacaagcgcgtgttttgaaccttccctggactacatggtcaccaaaattccccgatgggaccttgatagattccatggtacatcttcacgtatcgggtcatccatgaagtccgtcggagaggtcatggctattgggaggactttcgaggaaagctttcagaaggcacttcggatgtgtcatccatccattgaagggttcacccctcggctgccgatgaataaggagtggccttccaatctggatctccgtaaagaactgtcagagccaagctctactcgtatctacgctatagctaaggccatcgacgataacatgtccctagatgagatcgagaaactaacgtatatcgataaatggtttctgtataaaatgcgggatatattgaatatggaaaagaccctgaaagggttaaacagtgagagcatgacagaagagacattgaaacgcgcaaaggaaatcgggttttctgataagcagattagcaagtgcttaggcctgaccgaggctcagactcgggaactccggctgaagaaaaatatccacccttgggttaaacagatcgacactctggctgcggaatatccatccgtgactaactatctgtacgtcacgtataacggtcaggaacacgacgtgaatttcgacgaccacggtatgatggtgctgggatgcgggccataccacatcgggtccagtgtcgagttcgactggtgcgctgtgtcaagcattcggacactgaggcagctcggcaaaaaaaccgtcgtagtcaattgcaatcccgagactgtcagtactgatttcgacgagtgcgataaattgtactttgaggagctatctctggagagaatcttagatatctaccatcaggaggcttgcggcggctgtattatttcagttggcggccaaattccaaataatttggctgtgccactatacaagaatggagtaaaaatcatggggaccagtccactccaaatcgatagagccgaagacaggagcatcttttctgccgtgttggacgagttaaaggtcgctcaggctccgtggaaggcggtgaataccctgaatgaagccctggagtttgccaaatctgtcgattacccctgcctactgagaccatcttacgtgctgtccggtagcgccatgaacgtggtgttcagcgaagatgaaatgaagaagtttctggaagaggccacccgtgtgagccaggagcatcccgttgtactgaccaagttcgtggaaggtgcacgcgaggtggagatggacgctgtggggaaggatggccgcgtgatctcgcatgccatctctgaacacgtggaggacgcaggggtgcacagtggtgacgccacattaatgctccccacccagactatttcccagggggcgatcgagaaagtgaaggatgccactcgtaaaattgccaaggcgtttgcaatttctgggcctttcaacgtgcagttcctcgtgaagggcaacgatgtcctcgtaatagaatgtaatctgcgggccagccgctctttcccatttgtgagcaagaccttgggggttgacttcatcgacgttgcaaccaaggtcatgatcggggagaatgttgacgaaaaacacctgccaactctagaccaccccataatccctgcggactatgtcgctattaaggcccccatgttctcctggcccaggctccgtgacgccgaccctattttacgctgcgagatggccagcacgggcgaagtcgcatgctttggcgaaggaatccacactgcgttcctcaaagccatgctgagcaccggctttaagatccctcaaaaaggcatccttatcggtatccagcagagcttcagacccagattcttgggtgtagccgagcagctccataatgaagggttcaaactttttgcgacagaggccacctccgactggcttaacgcgaacaatgtgccggcaacgccagttgcttggccttcacaggaggggcagaacccttctctgtccagtattcgaaagttgatcagggatggatctatcgacctggttatcaacctccccaataataacaccaaatttgtgcatgataattatgtgattcggaggactgctgttgactccgggattcctctgctcactaatttccaggtgaccaagctatttgccgaagccgtccagaagtccagaaaggtcgattcgaagagtctcttccactaccggcagtatagcgccgggaaggcagct

SEQ ID NO: 43584 - DNA, 4500 bp, Artificial Sequence
  derived and/or modified sequence
atgacaaggattctcacagcgtttaaagtcgttagaactctcaagaccggattcggtttcactaatgtgactgctcaccaaaagtggaaattctctcgcccaggaattaggcttctgtctgtgaaagcccaaactgcgcacatcgtcctcgaggacggaaccaagatgaaaggctactctttcggtcatccttcttccgtggctggtgaagtggtgttcaatacaggtctgggaggctaccctgaagctattactgatccagcttacaagggtcagatactcaccatggctaacccaattattggtaatggaggagcccctgataccactgccttggatgagctgggtctgagtaagtacctggaatccaatggaatcaaggtgagtggtttgctggtgttggactacagcaaggactacaatcattggctggcaactaagtcacttggtcagtggctgcaggaagaaaaggttccagccatttatggagttgacactagaatgttgaccaagataatcagagacaagggaactatgctgggaaagatcgagttcgagggacaacctgtggattttgtggacccaaacaagcaaaacctcatcgctgaagtctccaccaaagatgtgaaagtttatggaaagggcaaccctaccaaagtggtggcggtcgattgcggtattaagaataacgtcataagactcctggttaagagaggcgctgaggtgcatttggttccgtggaaccacgacttcaccaagatggaatatgacggaatcctcatcgcaggcggtccgggcaacccggctctcgctgaaccacttatccaaaacgtgcgcaagattttggagtcagataggaaggaacctctgttcggaatttcaactggcaacttgatcacgggcctggccgctggagctaagacatacaagatgagcatggcaaatcgcggtcagaaccaacctgtcctgaacatcactaacaagcaggcgtttatcaccgcccagaaccacggctacgctctggacaacacactgcctgctggctggaagccattgtttgtcaacgtaaacgaccagaccaacgagggtattatgcacgaatctaaaccattttttgccgtacagtttcatccggaggtcacgccaggacccatcgacaccgaatatttgttcgactctttcttctccttgattaagaaaggaaaagctaccaccatcacttcagtccttcctaagcctgctctggtggcttccagagtcgaagtgtccaaagtgcttattctgggtagcggtggtctgtctataggacaagctggtgagttcgactactctggcagtcaggctgtgaaagcgatgaaagaagagaacgtgaagaccgttctgatgaatcctaatatcgcctctgtccagaccaacgaggtcggtcttaagcaagcggataccgtttattttctgcccatcaccccccaattcgtgacagaggtgatcaaagcagagcagcctgatggcctgatccttggcatgggcggacaaacggccctcaactgtggagtagagttgtttaagagaggcgtactcaaggagtatggtgttaaggtattgggaacctcagtagagagcataatggccacggaggacaggcaactcttcagcgacaagctgaacgagattaatgaaaagattgctcccagtttcgctgtggaatctatcgaagacgctttgaaagcagccgatactattggttatcctgttatgattcgctctgcctacgctcttggcggtttgggttccggtatctgtcccaacagggaaaccctgatggacttgtcaaccaaggctttcgcgatgacaaaccaaatactcgtggagaagagcgtgaccggttggaaagagattgaatacgaggtggtaagagacgcagacgacaattgtgtcaccgtctgcaacatggagaacgttgacgctatgggtgtgcatactggcgacagcgtcgtggttgctcctgcccagacattgtctaatgcagagtttcagatgctgagaagaacgagcattaacgtggtacgccatctgggcattgtcggtgaatgcaatatacagttcgctctgcatcctacttccatggagtactgtatcatcgaagtcaacgccagactgagcaggtcatctgctctggcttctaaggcgacgggctacccgctcgcttttatcgcggctaagatagctttgggtattcccttgccagagatcaagaatgtcgtgtcaggaaagacttctgcttgcttcgagccaagcctggattacatggttactaagatccctagatgggacctcgatcgctttcatggaaccagctctcgcatcggatcctctatgaaaagtgtgggcgaagtgatggccatcggaagaacattcgaagagtcatttcagaaagcgctcagaatgtgccacccctccattgagggcttcacgcctaggctcccgatgaacaaagagtggccaagcaacttggatctcagaaaggaactctccgagccgtcatctaccagaatttacgctatcgccaaagctatcgatgataacatgtctctcgacgaaatagagaaactgacctatatcgacaaatggttcctgtataagatgagagacattctgaacatggagaagacactgaaaggtttgaactccgaatccatgaccgaggagaccctgaagagggcaaaagaaattggattctcagataagcagatctcaaaatgcctgggacttacagaagcacaaactagagaactccgcttgaagaagaatatccatccctgggtaaaacagatcgacactcttgcggctgagtacccgagcgtgaccaactacctgtatgtcacatataatggccaagagcatgatgtcaacttcgacgaccacggaatgatggtgctgggctgcggcccgtaccacataggatccagtgttgagttcgattggtgcgctgtgtcatcaatacgcaccctgagacagctgggaaaaaagacggtcgtggtgaactgtaatccagagactgtgtcaactgatttcgacgagtgcgataagctctacttcgaggaactgtcactggagaggattttggatatctatcaccaggaagcctgtggcggatgtatcattagtgtaggaggccagatcccgaacaatctcgctgttccgctctacaaaaacggtgtgaagataatgggtactagccctcttcaaatagaccgcgcagaggatagatctattttctctgccgttctggacgagttgaaggtggcccaggccccgtggaaagcggtgaacactctgaatgaggccctcgagtttgccaaaagcgtcgactacccttgcttgctgagaccatcctatgttctttctggctctgcaatgaacgtagtcttctccgaggacgagatgaagaagttcttggaggaggccacaagggtttcacaagaacacccagttgtcctcaccaaattcgtagagggcgcacgcgaggtggagatggatgctgtgggcaaggatggccgcgttatttctcatgccatctccgaacatgtcgaggacgctggcgtgcactcaggcgatgctactctgatgctgcccacgcaaactatttcacagggtgcgatcgagaaagtcaaggatgcgacccgcaaaattgccaaggcattcgctatcagcggacctttcaacgtacagttcctggtgaagggaaatgatgtacttgttatcgagtgcaatctcagggcctcccgctcatttccttttgtgtccaagaccttgggtgttgacttcatcgatgtcgcgacgaaagtgatgatcggtgaaaatgtggacgagaagcatttgcctaccctcgaccatcctattattccggctgattacgttgccatcaaagcccccatgttcagttggcccagacttagagatgccgatcccattcttaggtgtgaaatggcttcaacaggtgaggtcgcctgtttcggagagggaattcacactgctttccttaaggcgatgctttccacaggatttaagatcccccagaagggaattctgatcggcattcagcaatctttcaggccgaggttcctcggcgtagctgaacagctccacaacgagggctttaagctgtttgccaccgaagcgactagcgactggctgaacgcaaacaacgtaccggccacgcctgtggcttggcccagccaggaaggccaaaacccgtccttgtcatccattcgcaagctgattcgcgacggatctatcgatcttgtgattaatctgcccaataacaacacaaagttcgtgcatgacaactacgtgatcagaagaaccgccgtagacagcggtattcccttgctgaccaatttccaggttacaaaattgtttgcggaggctgtgcaaaagagcagaaaggtggactccaaatccctgtttcattataggcagtactctgcaggcaaggccgca

SEQ ID NO: 43585 - DNA, 4500 bp, Artificial Sequence
  derived and/or modified sequence
atgacccgtattctgacagcttttaaagttgtgcgaacgctgaagacaggttttgggttcaccaacgtcaccgcccatcaaaagtggaaattctcacgcccaggaatacgtctgttgtcggtcaaggcccagacagctcacattgtcctggaggacggcaccaagatgaagggctacagcttcggccacccgtcaagtgtggccggagaggtcgtgttcaatacgggcctaggcgggtatccggaggccatcacggatcccgcgtacaagggtcagattctaaccatggccaatccaattattggtaatggaggggcgcctgacacgaccgcgttggacgaactcggactgagcaagtacctagagtcaaacggaatcaaagtgtccggactgctcgtcctcgattactcgaaggattacaatcactggctggctacgaagtcgctcggccagtggctgcaggaggagaaggttcccgccatatacggcgttgatacccggatgctaacgaagatcatccgcgacaaaggcaccatgctaggcaagatcgaatttgaaggacagcctgtggatttcgtggatcccaataaacagaaccttatagctgaggtttccacgaaggacgtgaaggtctatggtaaaggcaatcctaccaaggtggtggccgtggactgtggcatcaaaaacaacgtgatccgtctgctggtgaagcgtggagctgaagtgcacctggtcccctggaaccatgatttcacaaagatggaatacgacggtatcctaattgctggaggccccggcaaccccgccctcgcagagccactgatccagaacgtgcgtaagatcttagaatcggatcggaaagagccactcttcggaatttccaccggcaacctaattacaggactggccgcaggcgcaaaaacctataaaatgtcgatggccaaccgcggacagaaccagcccgtgctgaacataacaaacaaacaagccttcatcacagctcaaaatcacggctatgctctggataacacactgccggcgggctggaaaccgctgtttgtcaatgttaacgatcaaaccaacgaggggataatgcacgagtcaaagcctttcttcgccgtgcagtttcatcccgaggtcaccccgggacccattgatactgaatatctgttcgattcgttcttttcactgatcaagaagggcaaagccaccaccattacctccgtgttacccaaacccgcattggtggcgagtagggtcgaggtgagtaaagtcttgatcctaggctcgggcggacttagcatcggccaggccggtgagttcgactactcggggtcccaggctgttaaggccatgaaagaggagaacgtaaagaccgtattgatgaatccgaatatcgcttcggtacaaacgaacgaggtggggctgaagcaggcagatacagtatactttctcccaattacgcctcagttcgtgacggaggtcataaaggcagaacagccggatggcctgattttaggtatgggaggccaaacggccctgaactgcggcgtggaactctttaagcgcggagtcttgaaagagtacggagtgaaggtcctgggaacatcggtcgagtcgatcatggctacagaggatcgccaactgttcagcgacaagttgaatgaaataaacgagaagatcgccccaagctttgctgtggaatccattgaggatgccctgaaggcggctgacaccataggctacccagtcatgatcaggtctgcatatgcgctgggtggactggggtcgggaatttgcccaaaccgggagactttgatggacctgtcgaccaaagccttcgccatgactaaccagattctggtagaaaagtccgttaccggctggaaggagattgagtatgaagtcgtgcgcgacgcggatgataattgtgtcaccgtctgcaacatggagaatgtggatgcgatgggagtgcacacaggcgacagcgtggtcgtcgcacctgcacagaccctctccaatgccgagtttcagatgctgcgccgcacgagcattaatgtcgtaagacatcttggaatcgttggcgaatgcaatatacagttcgctttgcatccgacctcgatggagtactgtattattgaagtcaacgcacgcctgtcgcgcagtagcgcgcttgcctcaaaggccacaggttacccgctagcatttattgccgcgaagatagcgctaggaatcccccttccggaaattaagaatgttgtctcgggtaaaacatcggcatgcttcgagcccagtttagactatatggtgacaaagattccacgctgggacttggaccgctttcacggtacctcctcccgcattggaagctcgatgaagtccgtgggtgaggtaatggccattggtcggacatttgaggagtcgttccaaaaggcactgcgcatgtgccatccgagcattgagggctttaccccgcgtctccccatgaataaggaatggcctagcaatctggatctcagaaaagagttgtccgagcctagcagcacccgtatctatgcaatcgcgaaagccatagatgataacatgtcgctcgacgagatagaaaaactgacctacatcgacaagtggttcctgtataagatgcgtgacattctgaatatggaaaagactcttaagggactgaactccgagagcatgacagaggaaactttgaagcgcgctaaggagatcgggttctctgataagcagatctccaagtgcttaggattgactgaagcccagacccgggagttgcgcctgaagaagaacattcacccttgggtaaagcagatcgacaccctagccgcagagtacccatccgtaacaaactacctttatgtgacgtacaacggacaggagcacgacgtaaacttcgacgatcacggcatgatggtcttgggatgcggaccgtaccatatcggctcctccgttgagttcgattggtgcgctgttagttcgattcgtactctgcgccagctaggcaaaaaaacggttgtcgttaactgcaacccagagacagtgagcactgacttcgacgagtgtgataagctgtacttcgaggaactgtccctggaacgcattctggatatataccaccaggaagcctgcggcggctgcatcatctccgttggaggacagatccctaacaacctggcagtcccgctctacaagaacggtgtgaagatcatgggcacttcgccgctgcagattgatcgagctgaagaccgttccattttttccgctgtcctggatgagctgaaggtggcacaggctccctggaaggccgtgaatacgcttaacgaagccttggaatttgccaagagcgtagactatccctgtctgttgaggcctagctatgtgctgtcgggcagtgctatgaacgtggttttttcggaggatgaaatgaaaaagttcctggaagaagctacacgtgtgtcgcaggagcacccggtggtactgacgaagtttgttgaaggcgccagggaggtcgagatggacgccgttggcaaagacggccgtgtgattagccatgccattagtgaacacgtggaggatgctggcgttcacagcggtgatgccacgctgatgcttcctacacaaactatttcccaaggggcgatagagaaagtcaaagatgccactcggaagattgccaaggcattcgcaataagcggtccattcaatgtacaattcctggtcaagggcaacgatgtgctggtgatcgagtgcaatttgcgagcctcccgcagttttcccttcgtgagcaaaaccttgggcgttgatttcatagacgtggcgaccaaagttatgataggagagaacgtagacgagaagcatcttcccactctcgaccacccgataatcccggctgattacgtcgccatcaaggcccctatgttctcttggccgaggttgcgagacgccgatcctattcttcgctgcgagatggctagcaccggtgaggtagcctgtttcggcgagggaatacacacagccttcctgaaggctatgctgtccaccggctttaagataccgcaaaagggtattttgatcggtattcaacagtcattccgtccgcgtttcctgggcgttgctgagcagctccacaacgaaggattcaagctgttcgcaactgaggctaccagcgactggctgaatgcgaacaatgtgcccgccaccccagtggcttggccgagtcaggaggggcagaacccatctctgtccagcattcgcaagcttatccgagacggttcaatcgatttggttattaatctgcccaacaacaatacaaagttcgtgcacgacaactacgtcattcgacggaccgcggtcgatagcggtattccgctcctcaccaactttcaggttacgaagctgttcgcagaggctgtgcaaaagtcgaggaaggttgattctaagtcgctgttccattacagacagtactcggctggaaaagccgcc

SEQ ID NO: 43586 - DNA, 4500 bp, Artificial Sequence
  derived and/or modified sequence
atgaccaggattttgaccgcattcaaggtggtccgcacattaaagacaggattcggcttcacgaacgtgacagcgcaccagaaatggaagttctcacgacccggcattcggttgttatcagtcaaagcgcagactgctcatatagtccttgaagacggcaccaaaatgaagggctattctttcggccacccatccagcgtcgccggtgaagtggtgttcaacacaggcttgggaggctatcccgaagctataactgaccccgcctataagggccagattttaactatggccaatcctatcatcggtaatggcggcgcccctgacaccacagcattggatgaattggggctgtcaaagtacttggagtcaaatggtataaaagtgtctgggcttttagtgctcgattacagcaaggactataatcactggctcgcaacaaagtcactgggccagtggctccaggaggagaaggtgcccgccatttatggtgttgataccaggatgcttaccaagatcatcagagacaagggcacaatgttgggaaaaatcgaatttgagggccagcccgtcgacttcgtggatccaaacaaacagaaccttatcgcagaggtgtctaccaaggacgttaaggtgtacggcaaaggaaaccccaccaaagtcgtggcagttgactgtggcatcaaaaataacgtaatcaggctgctagtcaaaaggggcgccgaagtgcatctcgtcccctggaaccacgatttcacaaagatggagtatgatgggatcctcattgccggcggtccaggcaacccagccctggcagagccactgatccaaaacgtgcggaagatcctcgaaagcgaccggaaggaaccactgttcggcattagtacaggcaacttgatcaccggacttgccgctggcgcgaaaacgtataaaatgtcaatggctaatagaggtcagaatcagcctgtcctgaacatcacaaacaaacaggctttcattaccgcccagaatcatggatacgccctcgataatacgttgcctgctggatggaaaccgctgtttgtcaacgtcaacgaccagacgaacgagggaatcatgcatgaaagcaagccttttttcgccgtccagtttcatcccgaggtgactccaggtcctatcgacaccgaatatctatttgactctttcttctctctgatcaaaaaaggcaaagcaaccaccattactagcgtgcttcccaagccagccctagtagcatcccgcgtagaggtgtcaaaggtgttgatactgggctcagggggcctttcgatcggccaagccggcgaatttgattactcgggatctcaagcggtgaaggcgatgaaggaagaaaacgtgaagacggtcctgatgaacccgaacattgctagtgtacagaccaacgaagttgggctcaaacaagctgatacggtgtattttctgccaataacaccacaatttgtgaccgaggtgattaaggctgagcagcccgacggcctcatcctggggatgggggggcaaacagctttgaattgtggggttgagctgttcaagaggggggtacttaaggaatacggtgtcaaggtcctaggcactagtgttgaatccataatggccaccgaagatagacagctgttcagcgacaagctgaacgaaattaatgagaaaatcgccccctctttcgccgtagagtcgatcgaggacgccctgaaggccgcggatacgattggttatcctgtcatgatccgcagtgcctacgcgctgggagggctagggagcggcatctgcccgaatagggaaacccttatggatctgagcaccaaggcttttgctatgaccaaccagatcctggtggaaaagtctgtgaccgggtggaaggagatcgaatacgaggtcgtacgcgacgctgacgacaattgtgtgaccgtgtgcaatatggaaaatgtggatgcaatgggggtccacaccggtgattctgttgtcgtcgctcccgctcagacactgagcaacgctgagttccaaatgctgcggaggacctctattaacgtagtaaggcatctgggcattgtgggggagtgcaacattcagtttgctctccatccgacttcaatggaatattgtattatcgaagtcaatgctagactgagccgcagcagcgctctcgcttctaaggctactggctaccctctggccttcatagcagcaaaaatcgccctcggcatccctcttccagagataaagaatgtggtgagcgggaagaccagcgcatgcttcgagcccagcctagattatatggttacaaagatcccgcggtgggacctcgatcggttccatgggacttctagcaggatcggttcaagtatgaaaagcgtgggggaagtcatggccatcggacggacatttgaagaatcctttcagaaggcacttcgcatgtgccacccatccatcgaaggcttcacaccgaggctccccatgaataaggaatggccatctaatctcgacctaagaaaagagttaagtgagccatctagcacaagaatttatgcaatagctaaggcaatagacgataatatgtccctagacgaaatagaaaagctgacgtacatagataaatggttcctatataaaatgcgggacattcttaatatggagaagactttaaaaggcctgaattccgaatcaatgactgaggagacattgaaacgggccaaggagatcggcttttccgataagcagatctctaaatgtctgggacttaccgaggcccaaaccagggagctccggttaaagaaaaacatccatccctgggtaaagcagattgacaccctggctgcggagtacccaagcgttacaaattacctttatgtgacgtataatggccaggagcatgatgtgaacttcgacgaccacgggatgatggtccttggatgcggcccatatcatatcggatctagtgtggagttcgactggtgcgccgtgtcctctatacgcactctgcgccaactgggcaaaaagaccgtagtcgtgaattgcaacccagagaccgtttccacagatttcgatgagtgcgataaactctactttgaagagctgtccctggaacggatacttgatatttaccaccaggaagcatgtggcggttgcatcatatccgttggggggcaaatcccgaataacctcgcggtacccctgtacaagaatggcgtgaagatcatgggcacctcccctcttcagatcgaccgagcagaagacaggtccattttctctgccgttctcgacgaactcaaagtggcccaggcgccgtggaaggcagtgaatacgttaaacgaagctctcgaatttgctaagtccgttgattacccatgtctgctccggccttcgtatgtgttgtctgggtcggcaatgaacgtggtgttctccgaggacgagatgaagaagttccttgaagaagccacaagagtgtcacaggagcacccggtggtcctgacaaagtttgtggaaggcgctcgggaggtggagatggacgctgttgggaaagatggccgggtcatctcacatgccatcagcgagcatgtggaggatgctggggtgcactctggagacgcgaccttgatgcttccaacccagacaatctctcagggagccatagagaaggtgaaagatgcaacccgaaaaatcgctaaggccttcgcaatttctgggccctttaacgttcagttcctagtaaagggaaatgacgttttggtcatcgagtgtaacttgagggcctctcgcagctttccattcgtttcaaaaaccttaggggtggactttatagacgtggcaaccaaggtgatgatcggggagaacgtcgatgagaagcacctgcctacactggaccaccccattattcccgcagactacgtggctataaaggcccctatgttttcctggcctcggctacgggacgctgaccccattctgaggtgcgagatggcatctactggagaggtggcgtgtttcggagaggggatccatactgcctttctgaaggcaatgctgtcaacaggctttaagataccacagaaggggattctcatagggatacagcagagtttccggcccagattccttggggtagcggaacaactgcacaacgagggcttcaaacttttcgctacagaagctactagcgattggcttaacgcgaacaacgtgcctgccactcccgtggcgtggccctctcaggaagggcagaacccttctctctcttccatcagaaaactcataagagacgggtccatcgacctcgtgatcaacctcccgaataacaacacgaagtttgtccacgataactatgtaatcaggaggaccgcagtggactcaggtattcctttgctcaccaacttccaggttaccaagttatttgccgaggccgtgcagaagtcccgcaaggtggatagcaagtccctatttcattacaggcagtacagtgctggaaaagcggca

SEQ ID NO: 43587 - DNA, 4500 bp, Artificial Sequence
  derived and/or modified sequence
atgacccgcatactgacggcattcaaagttgtccggaccctgaaaacgggcttcgggtttactaacgtaacagcgcaccaaaaatggaagttttccagaccaggaatacggctattaagcgtcaaggcccaaactgcacatatagttctggaggatggcactaaaatgaagggttacagttttggccatccatcttccgtcgctggagaggtggtctttaacaccggcctgggaggctacccggaggctattaccgaccccgcgtacaaaggacagattctgactatggcaaatcctataattggcaacgggggcgctcctgacactactgccctggacgaactgggcctgtcaaaatatctagaatcgaatggtataaaagtctcaggtctgttagtgctcgattatagtaaagactacaatcactggctggcaacaaagtccctcggtcaatggttacaggaagaaaaggtgcctgccatctatggcgtggatacacgcatgcttaccaagataatcagggataaaggaacaatgctggggaaaatcgaatttgaagggcagcccgttgattttgttgatccaaacaaacagaacctgatcgccgaggtgagcactaaggacgtaaaggtctacggaaaggggaatccaacgaaagtggtcgctgttgactgtgggataaagaacaacgtgatccgcctgctggttaagaggggggctgaggtccacctagtgccttggaatcatgatttcacaaaaatggaatacgacggcattctgatcgccggtggacccggcaatcctgccttggccgaaccactgatacagaatgtgcgcaaaatcctagaatctgacaggaaggaacctctgttcggtatcagcacggggaacctcattacgggtctggccgcaggagcaaagacctacaagatgtcgatggcaaacagagggcaaaaccagcccgtgctgaatattacaaacaaacaggccttcatcactgctcagaatcatgggtatgcgctggacaataccctgccagccggttggaagccactgttcgtcaacgttaatgatcagacaaatgaaggtattatgcatgagtccaaacctttcttcgctgtacaattccatcccgaagtgactccagggccgatcgatactgagtacctgtttgactcttttttctccctgattaagaagggtaaggctaccacaataacttctgtccttcccaagcctgcactggtcgcaagtcgcgtggaggtatctaaggtcctaatcctggggagcgggggactgtccatagggcaagccggcgagtttgattactctgggtcgcaagcagtgaaggcgatgaaggaggagaacgtgaagaccgtgcttatgaaccctaatatcgcatctgtacagactaacgaggtgggactgaaacaggcagacaccgtttatttcttacccattacaccccagtttgtcacggaggtaataaaggctgaacaacctgatgggcttatcttaggcatgggcggtcaaacagctctgaactgtggcgtggagctattcaagcggggcgtactcaaagaatatggcgtgaaagtgctgggcacgtctgtagagtctataatggcgacagaggacagacaactgttcagcgacaagcttaacgagataaacgagaagatcgcaccctctttcgcggtggaaagcattgaggatgcgctgaaagccgccgacactatcggatacccagtgatgattagatcagcctacgcactgggaggccttggctctgggatttgcccgaacagagaaaccctgatggacctgagcacaaaggccttcgccatgaccaaccagatcctggtggaaaaaagcgtgacaggctggaaggagattgaatatgaggtagtgagagatgcagacgacaattgtgtgaccgtgtgcaatatggagaacgtggacgctatgggagtccatacgggagactctgtggtggttgctccagcccagaccttgagcaacgcagagttccagatgctcagacgtactagtattaacgtggttcgtcatctgggaatcgtgggcgagtgcaacattcagttcgccctacaccctaccagcatggagtactgcattatcgaggtgaatgcgcgcttgagccgctcgtccgcactggcctcaaaagctactggctatcccctcgccttcatcgccgcgaaaatcgcacttggcatccctcttccagaaatcaagaatgtggtgagcggaaagacaagcgcctgcttcgaaccttccctggactatatggtaaccaagatacctcgctgggatctcgaccgcttccacggcacaagctcccggattggttcatcgatgaagagcgtgggagaggtaatggccataggaaggacattcgaggagtcattccagaaggctctcagaatgtgccacccatcaatcgaaggatttaccccacgactgccgatgaataaagaatggccatcaaatttggacttgagaaaagaactttccgagccttcatcaaccagaatatacgcgattgcaaaggccatcgacgataacatgtccctggatgagatcgagaagctcacttacatcgacaagtggtttctgtataaaatgagagacatccttaacatggaaaaaaccctgaaggggcttaactcagaatccatgacagaggaaacattgaagcgtgccaaggaaatcggatttagcgataaacagatctccaagtgtctgggtctgactgaggctcagacccgagaactgcgcctgaagaagaacattcatccatgggtcaaacagatcgacaccctagccgccgaatatcccagtgtgactaattacctgtatgtgacttataatgggcaggaacatgacgtgaactttgatgaccacggcatgatggttctcggatgtggaccttatcacattgggtccagcgtcgagttcgactggtgcgctgtctcttcgattaggaccttgaggcagctgggcaagaagacagttgtggtgaattgtaacccggaaacagttagcacagacttcgacgagtgtgacaagctgtacttcgaggaactgagcttggaacgtattctggatatttatcaccaggaagcctgtggaggttgcattatcagcgtcggcggccaaatccctaacaatctggccgtcccactttataaaaacggcgtgaagataatggggacctctcccctgcaaatcgatcgcgccgaagataggtccattttttctgccgtgctagatgagctgaaggtggcccaggctccctggaaagctgtcaacaccctgaatgaggccctggagttcgccaagtcagtcgattacccctgtctcctaagaccctcttacgtgttatccgggtctgcgatgaatgtggtgttctctgaagacgaaatgaagaaattcctggaggaagccacgcgtgtaagtcaggaacatccagttgtcctgaccaaatttgttgagggcgctcgggaagtagagatggacgcagtcgggaaggacggtagggtgataagccatgcgataagcgagcacgtcgaggacgctggcgtccatagcggggacgctacgcttatgttacccactcagacgatcagccagggtgcaatcgaaaaggtcaaggacgctactcggaaaattgccaaagctttcgccatctccggtccgttcaacgtgcagttcctagtgaaaggaaacgacgtgctggtaatagaatgcaacctccgagcctccaggtcatttcctttcgtgtccaagacccttggagtcgacttcatcgacgtggctaccaaggttatgattggcgaaaatgtagatgagaaacatttacctactctcgaccacccaatcatcccagccgactacgttgctatcaaagcgcccatgttctcatggccccgattgagagatgccgaccctatcctacgctgcgaaatggcgagcactggagaggtggcatgcttcggggagggcattcacacggcattcctgaaagcaatgctatcgacaggctttaaaatcccccagaagggcattttgattgggattcaacaaagcttcaggccaagattcctcggcgtggccgagcagctgcataacgagggctttaagctgttcgcaactgaagcgaccagcgattggctgaacgcaaataacgtgcctgcgacccctgtagcctggccaagccaggagggtcagaacccttcgctgtcatcgatccgcaagctgataagggatggctctattgacctggtgataaacctgcccaataacaacacaaagttcgtgcatgacaattacgtcataagaaggactgctgtcgattcaggcatacctttactcacaaattttcaggttacgaagctgttcgctgaggccgtgcagaagagcagaaaggtagattcgaagtctctgtttcactatagacaatacagcgcaggtaaagcagcg

SEQ ID NO: 43588 - DNA, 4500 bp, Artificial Sequence
  derived and/or modified sequence
atgacacggatactaacagctttcaaagtggttcggaccctcaagacaggcttcggctttactaatgtcacagctcatcagaaatggaagttcagtcgcccaggaattagactgctgtctgttaaggctcaaacagcccacatcgtgctggaggacggcacaaagatgaaaggctatagcttcgggcatccaagttccgtcgcaggcgaggtggtctttaacacaggcctgggcggctaccctgaagccatcacagaccctgcctacaaggggcagatactgacaatggctaatccaataatcggcaacggtggggcccctgacaccaccgcccttgatgaattagggctcagcaagtatctggagtctaatggcataaaggtgtccggcctgctggtgctggactactctaaagattacaaccactggctggcaacaaaatcactggggcaatggctgcaggaggagaaagttccagcaatctacggcgtggacactaggatgctgactaagataattcgcgacaagggaacaatgctgggcaagatcgaatttgaagggcagccagtggacttcgtggaccctaacaagcagaacctgatcgcagaggtgtcaaccaaggacgtgaaggtgtacggaaagggtaacccaactaaggtggttgctgttgactgcggcatcaaaaataatgtgattagactgttagtcaagcggggcgccgaggtgcatttagtgccatggaaccacgattttactaagatggaatatgacggaatcctgatcgcaggaggcccaggcaacccagcccttgctgaacctttaattcaaaacgtccggaagatcctggagagtgaccgtaaggagcctcttttcggcatatctacaggaaacctgatcaccggccttgccgctggcgcaaaaacctacaagatgtcaatggcaaatcgcggtcagaaccagcctgtgctgaacattacaaataagcaggctttcattactgcccagaatcacggctacgctctggataatacactgccagccggctggaagcctctgttcgtaaatgtaaacgaccagaccaacgaagggataatgcatgagtcaaaaccctttttcgccgtccagttccacccagaggtgacacccggccctattgatactgaatacctgtttgactccttcttctctctgataaagaaaggcaaggctaccaccatcacaagcgtgcttcctaagcccgctctggtggctagcagggtcgaagtaagcaaggtgctcatcctgggcagtggtggcctgagcattggccaggcaggggaattcgattatagcggctctcaggctgtgaaagccatgaaagaagagaatgtcaaaaccgtactgatgaatcccaacatagccagcgtgcagacaaatgaggttggtctgaaacaagccgacaccgtgtacttcctccccatcacaccccagttcgtgacagaagtgataaaggctgaacagcctgacgggctgatactcggcatgggaggtcagacagcactgaactgtggggtcgagctgttcaagcggggggtcctaaaggagtacggcgtgaaggtcctggggaccagcgtcgagagcattatggccactgaagaccgccagctctttagcgacaaactgaacgagatcaacgagaaaatcgcacctagtttcgctgtagagagcattgaggatgccctgaaagcagctgatactatcggctatccagttatgataagatctgcctacgctctgggcggattaggctccggaatctgtccaaatcgggaaaccctgatggacctctctaccaaggcattcgcaatgacaaaccagatcctagtggaaaagagcgtcactggttggaaagagatagagtacgaagttgtgagggacgctgatgacaactgcgtgaccgtctgcaatatggagaatgtggacgccatgggagtacacacaggggacagcgtcgttgtcgcccctgctcagaccctgtccaacgctgaatttcagatgctgaggcgcacctctataaatgtcgttcgccacctgggcatcgtaggcgaatgcaatatccagtttgccctgcaccccacttccatggagtactgcattatcgaggtgaatgctcgactctcacggtccagcgcactggcatctaaagccaccgggtaccccctcgcttttatcgctgccaagatcgccctcggcatcccattacccgaaattaaaaatgtagtgtcaggtaagacttcagcctgcttcgagccttcccttgactatatggttaccaaaattccacgctgggacctggaccggtttcatggaacctcttcccgcataggttcctctatgaagtctgtaggggaggtgatggctattggtcgaaccttcgaagagagtttccagaaagccttaagaatgtgtcacccatccatcgaggggtttacacccaggctcccaatgaacaaggagtggcccagtaacctggacctaagaaaagagcttagcgaaccaagttccaccaggatttatgccatagccaaagctatcgacgacaacatgagtttagatgagatagaaaagctgacttatatagacaagtggttcctgtataaaatgcgggatatactgaatatggaaaaaacactgaaggggctgaactccgagtctatgaccgaagagacattaaagagggcaaaagagattggctttagcgacaagcaaattagcaagtgtttaggccttaccgaggcccagacaagagaactgagactcaaaaagaacattcacccctgggtcaagcaaatcgataccctggcagccgagtacccaagcgttaccaattatctgtatgtcacctataacggacaggaacacgatgtgaattttgatgaccatggaatgatggtgctgggctgcggaccctatcacataggaagttctgtggagtttgactggtgcgccgtgtcatccatccgtactctacggcagctaggcaagaaaaccgtcgttgtaaactgcaaccctgagaccgttagcaccgacttcgacgaatgcgataaactgtacttcgaggagctgagcctagagaggatactggacatatatcatcaggaggcttgtggagggtgcatcatctcagttggcggtcaaattcctaacaatctggccgtgcctctttacaaaaacggagtgaagatcatgggtacatcaccactacaaattgatagagcagaggatcggtctatcttttctgcagtgctggatgaactgaaggtggcccaggccccatggaaggcagttaacactctgaatgaggctttagagttcgccaagagcgtcgattatccctgcctgctgaggccaagctatgtgttaagcggttctgcaatgaacgtggtgttttctgaggatgagatgaagaaattcctggaagaggctaccagggtgagtcaggagcatcctgtcgttctgacaaaatttgtggaaggggcacgggaagtggaaatggacgccgtgggcaaggatggtcgcgtcatttcacacgccatctccgaacatgttgaggacgctggggttcactcaggtgatgccaccctcatgctccccactcagacaattagccagggcgctatagagaaagttaaagacgccaccaggaagatcgccaaagccttcgccatatccggcccatttaacgtgcaattcctggtgaaaggaaacgatgtgctggtgattgagtgtaatctccgagcctcccgttctttcccttttgtgagtaaaactctgggcgtcgacttcatcgatgtggcaactaaggtgatgattggtgagaacgttgatgagaagcatctgcccacactggatcaccccattatacccgccgattatgtggccattaaggccccaatgttttcttggccacggctgcgagacgctgaccccatcctgcgttgtgagatggcatccaccggggaagtggcttgcttcggagaggggatccacacagcctttctgaaggcaatgctgtctaccggcttcaagataccccagaagggaattctcattggcatacaacagtcttttcggcctcggtttttaggggtggcagaacagctgcataatgaggggttcaagctgttcgctaccgaagccacttctgactggctcaacgcaaacaacgtacctgctacacccgtggcctggccctcccaagagggccaaaaccctagcctaagtagcattcgaaagttgatacgtgatgggtctatagacctggtgattaacctgccaaacaataacacaaagttcgtccatgataactacgtgatacgaaggactgctgttgatagtggcataccactcctgaccaatttccaggtgaccaagctgttcgcagaggccgtgcaaaagtccagaaaggtggactcaaagagtctcttccactaccgacagtattctgccggtaaggccgct

SEQ ID NO: 43589 - DNA, 4500 bp, Artificial Sequence
  derived and/or modified sequence
atgacgcggattctgacagctttcaaagtcgtgcgcaccctcaagaccggattcgggtttaccaatgtaactgcccatcagaaatggaaattcagcagaccgggcatccggctcctatctgttaaggcacaaaccgctcatattgttcttgaggatgggaccaaaatgaagggctattcgtttgggcacccctcctccgtagcgggggaggtcgtctttaacaccgggctgggcggatatcctgaggccataaccgaccccgcatacaaagggcagattctgaccatggcaaaccctataatcggtaatggcggtgcaccggatactactgctctggatgagctcggtctcagtaaatatctggagtccaacggcatcaaagttagtgggctgctggtacttgattactcaaaggattacaatcattggctcgctacaaagtccctggggcaatggctgcaagaggagaaggtccccgctatttacggcgtcgatacgcggatgctcactaaaatcataagggacaagggcacaatgctgggcaagattgaattcgaggggcagcccgtcgacttcgtggatcctaataaacagaacttgatagctgaagtctctactaaggatgtaaaagtgtacggtaaaggtaatcccacaaaggtggtggccgtcgactgtgggattaaaaacaatgtgattagactgttggttaaacgaggcgccgaagtgcacctggtgccctggaatcacgactttactaaaatggagtacgatggaatccttattgccggcggtcctgggaatccagcactggccgagccactcattcagaatgtccgcaaaattctcgaaagtgataggaaggagcctctgtttggcatctcaacgggtaacctgatcacaggacttgctgccggtgccaaaacctacaagatgagcatggctaatcgcgggcagaaccagcctgttttgaatattactaacaagcaggcttttatcacagctcagaaccacggctatgctctggacaatacattgccagctgggtggaagccactgtttgttaacgtgaatgaccagactaacgagggcatcatgcatgagagtaagccgtttttcgctgttcagttccacccagaggtaacaccggggcctatcgatacagagtatctcttcgactccttttttagtttgataaagaaagggaaagccactaccataacctctgtccttcccaagccagcactagtggccagccgggtggaagtatccaaagtcttgattctgggctccggtgggttgtctatcggccaggctggagagttcgattactccggttcccaagcagtcaaggctatgaaggaggaaaacgtgaagacagtgctcatgaaccctaatattgctagtgtgcagacgaacgaggtggggttaaagcaggccgatacagtgtattttctgccaatcaccccccagttcgttacggaagtgatcaaggcggagcagccagacggacttatactggggatgggggggcagacagcactcaactgcggggtcgagctgttcaagcggggcgttttgaaagagtatggagttaaggtgctaggcaccagtgtggaaagcattatggccactgaggacaggcagctgttctccgataaactgaacgaaattaacgagaagattgcccctagctttgcagtcgaaagcatcgaggatgcactgaaggccgcagacaccataggatatccagtgatgatccgctctgcttacgccctgggcggcctaggctcaggaatttgccctaaccgtgagactctgatggacctgagcacaaaagccttcgctatgaccaatcagatccttgttgagaaaagcgtcaccgggtggaaggaaattgaatatgaggtggtaagggatgctgatgacaactgtgtgactgtttgcaacatggagaacgtagatgcgatgggagttcatactggtgactccgttgtagtagcacctgctcagaccctttcaaatgcggaattccagatgctcaggcgtacttcaattaacgtggtgaggcatctcggcattgtgggcgagtgcaatatccagttcgctctccatcccacgtcaatggagtactgcatcatcgaagtcaacgcaaggttgagtcgatcttctgcgctggccagcaaagccactggatatccgctcgctttcatcgcagcgaagatcgcactggggattccactgcctgagataaaaaatgtggtgtccggaaagacgtcggcctgttttgaaccctccctggattatatggttaccaaaatcccccgctgggatctggaccgtttccacggcacctcttcgagaattggaagttccatgaagtccgtgggcgaggttatggctataggccgaactttcgaagaatcctttcagaaggccctgaggatgtgccaccctagtattgagggcttcacacctcggctacctatgaataaggagtggccgtctaatcttgatttaaggaaagaactgtccgaacccagctcaacccgtatttacgccatcgccaaagccatcgacgacaatatgagcctggatgagatagaaaagctgacttacatcgataagtggtttctatataaaatgagggacatattgaacatggaaaaaacgctgaaaggtctgaactcagagagcatgaccgaggagaccctgaagagggccaaggagattggcttcagcgataaacaaatcagcaagtgcttgggtctgactgaagcccagacgcgggagttaaggcttaaaaaaaacatccatccatgggttaagcagatagacacgttagctgcggagtacccctccgtaacaaattatctgtacgtgacatataatggccaagaacatgatgtcaattttgatgatcacggcatgatggtcctcggttgcggtccctatcatatcggttccagtgtggaatttgactggtgcgccgtgtcctctatacggacgttaaggcagttgggaaagaaaactgtcgtcgtcaactgcaaccccgaaactgtgagcaccgacttcgacgagtgtgacaagctttacttcgaggagctatctctggagcgaatactggatatatatcaccaggaggcatgcgggggctgcattatctccgtcgggggacagatcccaaacaacttggctgtgcccttgtataaaaacggcgtgaagatcatggggacatcccccctgcagatcgatcgggccgaagacagaagcatcttctccgcagttctggacgaactgaaggtggcccaagccccatggaaggccgttaataccctcaacgaagcccttgagttcgcgaaaagtgtggactacccttgcttactgcggcctagctatgttctgagtggcagtgccatgaatgtcgtgttctccgaagatgagatgaaaaaattcctggaggaagcaaccagagtgagccaagagcatcccgtggtactcacgaagttcgtggagggggcccgcgaagtggaaatggacgctgtggggaaagatggccgggtgatcagccatgccatatccgagcatgttgaagatgctggagtgcactcaggagacgccaccctgatgctgcccacgcagacgatatcccagggcgccattgagaaagtaaaggatgccacccgcaagatcgccaaagccttcgctatctctgggcctttcaatgtgcaatttctggtgaaggggaatgacgtcctggttattgagtgcaatttaagagcctctaggtcatttccctttgtgagcaaaaccctcggcgtggactttatcgatgttgctacgaaggttatgataggagagaacgtggatgagaagcatctgcccactctcgaccatcccattataccagcagattatgttgccatcaaagcccctatgttttcctggccccgcttgcgcgatgcagacccaatactgcgatgcgagatggcaagcactggcgaggtggcttgtttcggcgagggcattcacacagctttcttgaaggctatgctgtctacggggttcaagataccacagaaaggcattctgatcgggattcagcagagttttcgcccacgcttcctcggagttgccgaacagctccacaatgagggctttaagctatttgccaccgaggctaccagtgattggctgaatgctaacaatgtgccagcgacgccagttgcgtggcccagccaggaggggcagaatccctccttgtcctccattagaaaactgattcgcgacggtagcatcgatctggtaattaatctccctaataataataccaagttcgttcatgacaattacgtcatacgaaggaccgccgtggattccggtattcctttgctgacaaactttcaggtcaccaaactgttcgccgaggcggtgcagaaatctcgcaaagtggatagcaagagcctctttcactatcggcaatactccgccgggaaggcggct

SEQ ID NO: 43590 - DNA, 4500 bp, Artificial Sequence
  derived and/or modified sequence
atgacgcgcatcctgaccgcattcaaggtcgtcaggactcttaaaacagggttcgggttcacgaacgtgactgcacatcagaagtggaagttttcgcggcctggaatccggctgctgagtgtgaaggcccagacggctcacattgtactggaggacggcacgaagatgaaagggtatagttttggacatcctagcagcgtggccggggaggtagtgtttaacaccggattgggcggatacccggaggccatcactgatccagcatacaaaggccagattcttactatggcaaaccccatcattggtaatggcggcgccccagacactaccgctctggacgaactgggattgtctaaatacttggaatccaatgggatcaaagtctccggcctgctcgttttggattactcaaaggactataatcactggctcgctaccaaatctttgggacagtggttgcaggaggagaaggtgcccgcaatctatggcgtggatacacgcatgctgacaaagatcattcgcgacaagggtaccatgcttggcaagattgagttcgaaggtcagcccgttgactttgtcgaccccaataagcagaatttgatcgctgaggtgagcactaaggacgtgaaggtgtacggcaaaggcaatcctacaaaggtggtggctgtcgattgcggaatcaaaaataatgtgattaggctcctggtcaaaagaggagccgaggtgcaccttgtaccttggaaccatgattttaccaagatggagtacgatggcatcctaattgcaggcggcccaggtaacccggctctggcagagcccctaatccagaatgttcgtaagatactggaaagcgatcgcaaagagccgctgttcggaatttcgaccggaaatctcatcacgggcctggccgccggggcaaaaacgtataagatgagcatggccaacaggggacagaaccaacctgttctgaatatcacaaacaaacaggccttcataacagctcagaatcatgggtatgcccttgacaacacactccctgctggttggaagcctctcttcgtgaacgtaaatgaccaaacaaatgaggggatcatgcacgagtcgaagcccttctttgctgtgcaattccaccccgaggtgactccaggaccaatcgatacggaatacttgtttgatagtttttttagccttatcaagaaaggcaaggcaacaactattacttccgtgttgccaaagcctgccctcgtggccagccgggtggaagttagcaaagtattgatccttgggagcggtggcctgagtataggccaagctggggaattcgattactccggctctcaggcagtgaaagccatgaaagaggagaacgtgaagacggtactcatgaatccgaatatcgcgtctgttcagaccaacgaggtgggcctgaagcaggcggatactgtgtactttctccccatcacaccccagttcgtcaccgaggtgattaaagccgagcagccagacggtctgatcctggggatgggtggccagactgcattaaactgcggagtcgaattgttcaagcggggtgtactgaaggaatatggggtgaaagttctggggacctccgtagaatccattatggccacagaagaccgccaactcttttctgataagcttaacgaaattaacgaaaagattgctccctcatttgcggttgagtctattgaggatgcccttaaagctgccgatactataggctaccctgtgatgatccgaagtgcctacgcacttggggggctgggctcgggaatttgccctaacagagaaaccctcatggatttgtccactaaggcatttgccatgacgaatcagattcttgtcgaaaagagcgttaccggctggaaggaaatagagtacgaggtggtgcgcgatgcagatgataactgcgtaacagtgtgtaacatggaaaatgtggatgctatgggggtgcatacaggtgactccgtggtcgtcgcacccgctcagacgctgtcgaatgccgagttccagatgctgcgaagaaccagtataaatgtggtgagacatttgggtatcgtgggtgagtgcaacatacagttcgccttacatcccacctccatggagtattgcatcatcgaagtgaatgcacgcctgagtcgctcatccgctctggcctccaaagccacagggtaccctctggcctttattgctgctaagatcgctctggggatcccattgccggagatcaagaatgtcgtgtctgggaaaacaagtgcctgctttgaacccagtctggactatatggtaactaaaattccgcggtgggatctggatcgcttccatggcacctcaagccggatcggttcctccatgaagagcgttggcgaggtgatggccattggccggacgtttgaggaatcctttcagaaagcgttgaggatgtgtcacccttccatagaggggtttacaccacggctgccaatgaacaaggaatggccttccaacctcgatctgaggaaagagctgtctgaaccgagcagtacacgaatttatgccatagctaaagctatcgatgataacatgtctttggatgaaatagagaaactgacatatattgataagtggtttctgtataaaatgagagatattctgaacatggagaaaactctcaaaggcctgaattcagagagtatgaccgaggagacactgaaacgggccaaggaaatcggcttcagcgataagcagatttcaaagtgtctgggattaaccgaggctcagacccgagagctgagacttaagaagaatattcacccgtgggtaaaacagattgataccctcgccgccgagtacccctctgtgaccaattacctctacgtgacctataatggccaagaacatgacgtgaacttcgatgatcacggcatgatggttctgggatgcggaccgtatcatattggatcctcagtcgaattcgattggtgcgcggtaagttcaatcaggacactgagacagctcggtaagaaaacggtggttgtcaactgcaaccccgagactgtgtccacggattttgacgagtgcgacaaactctactttgaagagttgtccctggagaggattctggacatttaccaccaggaagcctgcggtggatgtatcatctctgtgggtggacagattcccaataatttagccgtgcctctctacaagaacggcgtaaagatcatggggacgtcgcctctgcagattgaccgggctgaggatcggtctatcttcagcgccgtgctggatgagctgaaggtggcccaagctccatggaaggccgtgaacaccctgaacgaggcattagaattcgctaaaagcgtagactacccctgccttttaagaccttcctacgtcctcagtggaagcgctatgaacgttgtattttctgaggacgagatgaagaagtttctagaggaggctacccgcgtgtcccaggaacatccagtcgtcctcaccaaattcgtcgagggggccagggaggtggagatggatgctgtcgggaaggacggaagggtgatcagccacgccatcagcgaacatgtggaggacgccggcgtacacagtggagacgctactttgatgctgcctactcagacaatcagccagggcgctatcgagaaggtgaaagatgcgacaagaaagatcgccaaggccttcgcaatatccggcccattcaatgtacagtttctcgtgaaaggcaacgatgtgctggtgattgaatgcaacctgagagcatcccgcagttttcctttcgtgagcaagacacttggagtggacttcatagacgtagctacaaaagtgatgattggagaaaacgtagacgagaaacacctgccgacattagaccaccccatcattccagcagattatgtggctatcaaggcgccaatgtttagttggccccggttgagagacgctgaccccatcctgcgctgcgagatggcttccacgggcgaagtggcatgctttggcgaagggatccacactgcatttttgaaagcaatgctgtcaaccggatttaagattcctcagaaggggatactgatcggcattcagcagagctttcgtccccggttcttgggtgtcgcagaacagctccacaacgagggttttaagctcttcgcaaccgaggctacatcggactggctgaacgctaataatgtgcctgcaacacctgtagcatggcccagccaggaaggccagaatccaagcctgagtagtatcaggaaactcatccgggacggatcgatcgatctggtgataaatcttccaaacaataacacgaagttcgtccacgacaactacgtgattcgaaggactgctgtagacagcggtatccctctcttaactaacttccaggtgaccaaactgtttgctgaagctgtgcaaaaatccagaaaagttgactcgaagtctctgttccattatagacagtatagtgcagggaaggctgcc

SEQ ID NO: 43591 - DNA, 4503 bp, Artificial Sequence
  derived and/or modified sequence
atgacccggatattgactgcgtttaaagtcgtgagaaccctgaaaaccggctttggatttaccaacgtgaccgctcaccagaaatggaagttttcacggccggggattcggctgctgtctgtcaaagctcagacggcccacatcgtgcttgaagacggcacaaaaatgaaaggatactctttcggacatccgtcttcagtagccggggaggtggtattcaacacagggctgggcgggtaccctgaagcaataactgaccctgcttataagggccagattctcactatggctaaccccattatcggcaacgggggcgccccagacacaaccgctctcgacgagttagggctgtcaaaatatttagagtccaatggaatcaaggtgtccggcctcttagtgctggactacagcaaagattataaccactggttagcaaccaaatccttgggtcaatggctgcaggaggaaaaagtcccagccatctatggggtcgataccagaatgctaactaaaatcatacgcgataaagggactatgctaggcaagattgagtttgagggccaaccggtcgatttcgtcgatcctaataagcaaaatttaatagctgaagtgtctacaaaagacgtgaaggtctatggaaagggcaaccccacaaaggtggtggccgtagactgcggtattaagaacaacgtcataagactgctcgtaaagcggggcgcagaggtgcacttggtcccctggaatcacgatttcactaagatggagtacgatggaatcctgatcgccggggggcctggaaaccctgcacttgcggaacctctcatacagaacgtacggaaaattctggagtccgacagaaaggagcccttgtttggcatctccacaggtaacttgatcacaggacttgcagccggagccaagacttataaaatgtccatggctaacaggggacagaaccagcccgtgctcaatattaccaataaacaggcttttatcacagctcaaaaccatggctatgcactggataataccttacccgctgggtggaagccactctttgtcaacgtcaacgaccagaccaatgagggcataatgcatgagagcaagccgttttttgcagtgcagtttcatccagaggtcacacccggaccaattgataccgaatacctgtttgactcgttttttagtctaattaaaaaagggaaagctactacaattacatccgtgctgcccaaacccgcactggttgcctctagagtcgaggtgagtaaggtgctcatcctcgggagcggcggactcagcatcggtcaggcaggcgaattcgactattctggttcccaagccgtgaaggctatgaaggaagagaacgtgaagaccgtactgatgaaccccaatatagcctcagtacaaacaaacgaggtcggcctcaagcaggccgataccgtgtacttcctccccatcactccacagtttgttactgaagtcattaaagctgagcaacccgacggccttattcttggcatgggtgggcagactgccttgaattgcggcgtggagcttttcaagcgaggcgtcctgaaagagtatggagtcaaagtcctgggcacatcagttgaaagtatcatggctaccgaggaccggcagctcttctctgacaagcttaatgagatcaacgagaagatagccccttcattcgcagtggaatctattgaggatgcccttaaagctgccgacactatcggctacccagttatgataaggagcgcgtacgcactcggcgggttagggagcggtatctgcccaaacagagaaaccctgatggatttaagtaccaaggcttttgcgatgacgaaccagatcctggtcgaaaaatccgtcaccggctggaaagaaattgagtacgaggtggtcagagatgcagacgacaattgtgtgactgtgtgcaatatggaaaatgtggatgctatgggcgttcatacaggcgactccgtcgtggtggcccctgcccaaacacttagcaatgctgagttccagatgctgcggcggactagtataaatgtcgtgaggcacttaggaattgtcggcgagtgtaatatccaattcgccctgcatcccacatccatggaatactgcattatcgaagttaatgcccggctgtctcggtcaagcgccctcgcaagcaaggccacaggttatccattggcgttcattgcagctaagattgcacttgggatccccctgcctgagatcaagaatgtagtttcgggtaaaaccagcgcgtgcttcgagccttccctggattacatggtgaccaagataccaaggtgggacctggatcgtttccatgggacgtctagccgaatcggctcgagcatgaagtcggtaggagaggtgatggccattggtcggactttcgaagagagctttcagaaagcccttagaatgtgccatccttctattgaaggctttactccacggctgcccatgaacaaagagtggccttcaaatctggacctgcggaaggagctgtccgaaccaagttccacccgaatctacgcaattgcaaaagccatagacgacaatatgagtttagacgaaatcgagaaactcacatatattgacaagtggtttctgtacaaaatgcgggacatcctaaatatggaaaaaaccctgaaaggactgaattcagagagtatgacagaggagacactgaagagggctaaggagattgggttctccgataaacagatttccaaatgcctcgggttaacggaagcgcagacgcgggaactgagattgaagaagaacatccacccctgggtaaagcaaattgatacattggctgctgagtaccctagcgttactaattacctgtatgtcacatataatggccaagaacatgatgtgaactttgatgatcacgggatgatggtattagggtgcggtccatatcatattggctcctctgtcgagttcgactggtgcgcagtaagctccattagaaccctcaggcaacttggcaagaaaacagtggtcgtgaattgtaaccctgagactgtttctaccgacttcgatgagtgcgacaagctgtatttcgaagagctgtctctcgaaagaattctcgatatctatcaccaggaggcctgcgggggatgcatcatttcagtgggcgggcagatcccaaataacctggcagtcccactgtataaaaacggggttaaaatcatgggaactagtcctctgcagattgaccgtgcagaagatcgttctatcttcagcgcagtcctggatgagctgaaggtagcgcaggccccatggaaggccgtgaacaccttaaatgaagctctggagtttgccaaatctgttgactatccatgtctgttgcggccatcctatgtgctgagcggatcagccatgaatgtggttttttctgaagatgagatgaaaaaattcctcgaggaggccacacgagtgagtcaggaacatcccgtggttcttacaaaatttgttgagggtgccagagaggtcgagatggacgcagtgggcaaggacggccgggtgatctctcacgcgatcagcgagcacgtcgaggacgccggggtccattccggagatgctacactcatgctgccgacccagaccatctcgcagggagcaatagaaaaggtgaaggacgcaacccgtaaaatagctaaagcgttcgcaatcagcgggccgtttaacgtccagttcctggtgaaggggaatgatgtgcttgttatcgaatgtaacctccgcgcctcaaggtcttttccttttgtatccaagaccctcggtgttgatttcattgatgtggcgacaaaagtgatgattggagaaaatgtagatgagaaacacctcccgactctggaccatcccataatcccagctgactatgtggcgatcaaagcccccatgttctcgtggccgagactgagggatgcagacccaattcttagatgcgagatggcatccacaggcgaggttgcatgtttcggcgaaggtatccatacagcctttctgaaggcaatgctgtccactggattcaagatacctcagaagggaatcctgattggcatccagcagagttttcggcctaggtttctgggcgttgccgaacagttgcataacgaagggtttaagttatttgcaaccgaggcgactagcgattggctaaatgcgaacaacgtgcccgcaactcccgtcgcctggccgagtcaagagggacagaatccttccctctcatccataaggaaactgatccgggacggcagcattgaccttgtgatcaatttgccaaataacaacaccaaatttgtgcacgacaactacgtgatccgcaggactgccgtggactcaggaatcccactccttaccaactttcaggtaaccaaactgttcgccgaggcggttcaaaaatcgagaaaggtggactctaagtctctgttccattacagacagtactccgccgggaaagcggcttag

SEQ ID NO: 43592 - DNA, 4503 bp, Artificial Sequence
  derived and/or modified sequence
atgacccgcatcctgacagccttcaaggtggtgaggaccctgaagacaggcttcggcttcaccaacgtgacagcccaccagaagtggaagttcagccggcccggcatccggctgctgtctgtgaaggcccagacagcccacatcgtgctggaggatggcaccaagatgaagggctacagctttggccaccccagctctgtggccggggaggtggtgttcaacacaggcctgggcggctacccagaggccatcacagatcctgcctacaagggccagatcctgaccatggccaaccccatcattggaaatggaggagccccagacaccacagccctggatgagctgggcctgagcaagtacctggagagcaatggcatcaaggtgtctggcctgctggtgctggactacagcaaggactacaaccactggctggccaccaagagcctgggccagtggctgcaggaggagaaggtgcctgccatctacggcgtggacaccaggatgctgaccaagatcatccgggacaagggcaccatgctgggcaagattgaatttgagggccagcctgtggactttgtggaccccaacaagcagaacctgattgctgaggtgtccaccaaggatgtgaaggtgtatggcaagggcaaccccaccaaggtggtggccgtggactgtggcatcaagaacaacgtcatccggctgctggtgaagagaggagctgaggtgcacctggtgccctggaaccacgacttcaccaagatggagtatgatggcatcctgattgctgggggccctggcaacccagccctggccgagcccctcatccagaatgtgaggaagatcctggagagtgacaggaaggagcccctgtttggcatcagcactggaaacctgatcaccggcctggccgccggggccaagacctacaagatgtccatggccaacagaggccagaaccagcctgtgctgaacatcaccaacaagcaggccttcatcacagcccagaaccacggctacgccctggacaacaccctgcctgctggctggaagcccctgtttgtgaatgtgaatgaccagaccaatgaaggcatcatgcatgagagcaagcccttctttgctgtgcagttccaccctgaggtgaccccaggccccatcgacacagagtacctgtttgacagcttcttcagcctcatcaagaagggcaaggccaccaccatcacctctgtgctgcccaagccagccctggtggccagccgggtggaggtgtccaaggtgctgatcctgggcagcggcggcctgagcatcggccaggccggggagtttgactacagcggcagccaggccgtgaaggccatgaaggaggagaatgtgaagacagtgctgatgaaccccaacatcgcctctgtgcagaccaatgaggtgggcctgaagcaggccgacacagtgtacttcctgcccatcaccccccagtttgtgacagaggtgatcaaggccgagcagccagatggcctcatcctgggcatgggcggccagacagccctgaactgtggggtggagctgttcaagaggggcgtgctgaaggagtatggagtgaaggtgctgggcacctctgtggagagcatcatggccacagaagatcggcagctgttcagtgacaagctgaatgagatcaatgagaagatcgcccccagctttgctgtggagagcattgaagatgccctgaaggctgctgacaccatcggctaccctgtgatgatccgcagcgcctatgccctgggcggcctgggcagcggcatctgccccaaccgggagaccctgatggacctgagcaccaaggcctttgccatgaccaaccagatcctggtggagaagtctgtgacaggctggaaggagattgaatatgaggtggtgagagatgctgatgacaactgtgtgacagtgtgcaacatggagaatgtggatgccatgggcgtgcacactggagacagcgtggtggtggccccagcccagaccctgagcaatgctgagttccagatgctgcggaggaccagcatcaacgtggtgcgccacctgggcatcgtgggggagtgcaacatccagtttgccctgcaccccacctccatggagtactgcatcatcgaggtgaatgcccggctgagccgcagcagcgccctggccagcaaggccaccggctaccccctggccttcatcgccgccaagatcgccctgggcatccccctgcctgagatcaagaatgtggtgtctgggaagaccagcgcctgctttgagcccagcctggactacatggtgaccaagatcccccgctgggacctggaccgcttccacggcaccagcagccgcatcggcagctccatgaagtctgtgggggaggtgatggccatcggccgcacctttgaggagagcttccagaaggccctgaggatgtgccaccccagcattgagggcttcaccccccggctgcccatgaacaaggagtggcccagcaacctggacctgaggaaggagctgtctgagcccagcagcacccgcatctatgccatcgccaaggccattgatgacaacatgagcctggatgaaattgagaagctgacctacatcgacaagtggttcctgtacaagatgagggacatcctgaacatggagaagaccctgaagggcctgaacagcgagagcatgacagaggagaccctgaagagggccaaggagatcggcttcagtgacaagcagatcagcaagtgcctgggcctgacagaggcccagacccgggagctgcggctgaagaagaacatccacccctgggtgaagcagattgacaccctggccgctgagtaccccagcgtgaccaactacctgtatgtgacctacaacggccaggagcatgatgtgaactttgatgaccacggcatgatggtgctgggctgcggcccctaccacatcggcagctctgtggagtttgactggtgtgctgtgagcagcatccgcaccctgcggcagctgggcaagaagacagtggtggtgaactgcaaccctgagaccgtgtccacagactttgatgaatgtgacaagctgtactttgaggagctgagcctggagcgcatcctggacatctaccaccaggaggcctgtggcggctgcatcatctctgtgggcggccagatccccaacaacctggccgtgcccctgtacaagaatggagtgaagatcatgggcaccagccccctgcagattgacagagcagaagatagaagcatcttctctgctgtgctggatgagctgaaggtggcccaggccccctggaaggctgtgaacaccctgaatgaggccctggagtttgccaagtctgtggactacccctgcctgctgcggcccagctatgtgctgagcggcagcgccatgaatgtggtgttttctgaagatgagatgaagaagttcctggaggaggccaccagggtgtcccaggagcaccctgtggtgctgaccaagtttgtggagggcgcccgggaggtggagatggatgctgtgggcaaggatggccgggtcatcagccacgccatcagcgagcacgtggaggatgctggggtgcacagcggagatgccaccctgatgctgcccacccagaccatcagccagggcgccatcgagaaggtgaaggatgccaccaggaagatcgccaaggcctttgccatcagcggccccttcaacgtgcagttcctggtgaagggaaatgatgtgctggtgattgagtgcaacctgcgggccagccgctccttcccctttgtgtccaagaccctgggcgtggacttcattgatgtggccaccaaggtgatgattggagaaaatgtggatgagaagcacctgcccaccctggaccaccccatcatcccagctgactatgtggccatcaaggcccccatgttctcctggccccggctgagagatgctgaccccatcctgcgctgtgagatggccagcactggagaggtggcctgcttcggggagggcatccacacagccttcctgaaggccatgctgagcacaggcttcaagatcccccagaagggcatcctgattggcatccagcagagcttccggccccgcttcctgggcgtggccgagcagctgcacaatgaaggcttcaagctgtttgccacagaggccaccagtgactggctgaatgccaacaacgtgcctgccacccctgtggcctggcccagccaggagggccagaaccccagcctgagcagcatcaggaagctgatcagagatggcagcattgacctggtgatcaacctgcccaacaacaacaccaagtttgtgcatgacaactacgtgatcagaagaacagctgtggacagcggcatccccctgctgaccaacttccaggtgaccaagctgtttgctgaggccgtgcagaagagcaggaaggtggacagcaagagcctcttccactaccggcagtacagcgctgggaaggccgcctag

SEQ ID NO: 43593 - DNA, 4503 bp, Artificial Sequence
  derived and/or modified sequence
atgacccggatcctgaccgccttcaaggtggtgcggaccctgaagactgggtttggatttacaaacgttactgcacatcagaagtggaagttttcccggccaggtatccgcctgctctcagttaaggcacaaaccgcacatattgtgttggaggatggcaccaaaatgaaagggtattcttttggtcacccaagctccgtcgctggggaagtggtcttcaataccggacttgggggataccctgaggcaatcactgaccctgcctataaaggacagatcttaaccatggccaatccaattataggtaatggcggggccccagatactactgcgctggacgaactgggcctgtcaaaatatctggaatcgaatggtatcaaggtgtctgggctgctggtacttgactatagtaaagattataatcactggttagccaccaaaagcctggggcagtggcttcaggaggagaaggttccggcgatttatggcgtggacacacggatgttaactaagatcattcgagacaagggcacaatgctaggaaaaatagagtttgagggccaaccagtggatttcgtggaccccaataagcaaaatctgatcgctgaagtgtcaaccaaggacgtcaaagtatacgggaaagggaacccgacgaaagttgtcgctgtggactgtgggatcaaaaacaatgtgatccgtctacttgtaaagcggggtgcagaggtgcatctggtgccttggaaccacgatttcaccaagatggagtatgatggaatcctgattgccgggggacctggaaacccagcactcgctgaaccgcttatccagaacgttagaaaaatactcgaaagcgacaggaaggagcctctcttcggaatcagcaccggcaacttaatcacaggcctggccgccggtgcgaaaacatataaaatgtccatggctaatcgaggccaaaatcaacctgtcttgaatattactaataaacaagccttcatcacggcacagaatcatggctacgctcttgacaataccctgcccgcgggatggaaaccactgtttgtcaatgtaaatgaccagaccaacgaaggaatcatgcatgagtccaagcccttcttcgccgtgcagttccatcctgaggtcactcccgggccaattgataccgagtatctttttgacagctttttcagccttatcaagaaggggaaagctactacaatcaccagcgtgttacccaagcccgccctggtggcaagcagggtggaggtatctaaagtgctgatcctcgggtctgggggcctctctatcggccaggcaggtgagtttgactactcagggtcccaggccgtgaaagccatgaaggaggaaaatgtcaaaacggtgctgatgaaccctaacatcgcctcagtacagacaaatgaggtcgggctaaaacaagctgataccgtgtacttcctgccaatcactccccagtttgtcacagaagtgataaaagccgaacaacccgatggtctcatcctgggaatgggcggacagactgcacttaattgcggtgtagaactattcaagcgaggggtgctcaaggagtatggggttaaggtgctgggtacgagtgtggagtcgattatggctacagaagacagacagctgtttagtgataaactaaacgaaatcaacgagaagatcgctccttcgttcgcagttgaaagcatagaggacgcgcttaaagcagcggatacaattgggtacccagtgatgattaggagtgcttatgctctcggtgggctgggaagcgggatctgtcccaatcgggaaaccctcatggacctgagcacaaaggcattcgccatgactaaccaaatcttggtggaaaagtccgtcaccggctggaaagagatcgaatacgaagtcgtccgcgacgccgatgacaactgtgtgaccgtgtgtaatatggagaacgtggatgctatgggggtgcatacaggagatagcgttgtggtcgcacccgcacaaacactttcgaatgccgaatttcagatgctgagacgcacctcaatcaacgtcgtcaggcacctgggcatcgtgggggagtgcaatatccagtttgctttgcacccaacaagcatggagtactgtataatcgaggtcaatgcccgcctttccagatctagtgcgttagctagcaaggccaccgggtaccctttggcctttatagctgctaaaattgcactgggtattccactgccggagataaagaacgtcgtcagcggaaagacatcggcctgtttcgagccgtccctggactatatggtgactaagataccaagatgggacctggacaggttccacggaacttctagccgtattgggtcatctatgaaatcagtgggcgaggtgatggccattggtaggacattcgaggagagcttccagaaggctctgcgcatgtgccatccaagcattgaagggtttacaccccggctgccaatgaacaaggagtggccatctaatttagatctgagaaaggaactgtcggagccgagcagcacaagaatttacgccatcgctaaggctattgacgacaacatgtcccttgatgagattgaaaaactgacatacatcgacaagtggtttctatataaaatgcgggacatccttaatatggagaagacccttaagggcctcaattcggagtcgatgaccgaagagaccttgaagcgggcgaaagagattggctttagtgataagcagatttcaaaatgccttggactgaccgaggcgcagactcgcgaactgcgactgaaaaagaacatccacccctgggtgaaacagatcgataccctggcagcagagtatccttccgtcaccaactatctgtacgtgacttataacggtcaggagcacgacgtcaacttcgacgaccacggcatgatggtccttgggtgcgggccctaccacattggatccagtgtcgagtttgattggtgtgcagtcagctctatcaggacgttacggcagctgggcaaaaaaacagtggttgtcaattgtaaccccgaaactgtctctaccgacttcgatgaatgtgataaactgtacttcgaggaattgtcccttgagcgcattcttgatatttaccaccaagaggcctgcggcggctgcataatctcagttggcggacagattccaaataacctggcggtcccgctttacaagaatggtgtgaagattatgggcacgagccctttgcagatcgacagagcagaagataggagcatctttagtgccgttttggatgagttgaaagtagctcaagcaccttggaaagctgtaaataccctgaatgaggcgttggaatttgcaaagtccgtggactacccatgtttgctgcgcccatcgtacgtactgagtggctcagctatgaacgtcgtcttttctgaagatgagatgaagaagtttctggaagaagcaaccagggtgagccaggagcatccagtggtccttacaaaatttgtggaaggcgctagagaggttgagatggacgcagtaggtaaggacggtcgggttatcagccacgctatcagcgaacatgtagaagatgccggtgtgcacagcggagatgccacactgatgttaccgacccagactatctctcagggtgctattgaaaaggtgaaagatgcaacgcgaaagatcgcaaaagcattcgccataagtggcccattcaacgtacaatttttagtgaagggcaatgacgtgttagtaattgagtgcaacctgcgagcttctagatcttttccttttgtcagcaagacccttggcgttgatttcatagatgttgctaccaaggtgatgatcggcgaaaatgtcgacgagaaacacttaccaacgctggatcacccaatcatacctgcagattacgtggcgattaaggctcccatgttttcatggccccgactgagagacgcagaccccatcctgagatgcgagatggcgagcaccggtgaagtagcctgttttggcgaagggattcacacagcctttctgaaagccatgctttctacaggatttaaaattcctcagaagggtatcttaatcggcattcaacagagttttagacctcgtttccttggtgttgcggaacagctccacaatgagggcttcaaactcttcgctacagaggccacttcagactggctgaatgccaacaacgttcctgcaacaccagtggcgtggcctagccaagagggacaaaacccatccctcagctctatacggaaattgattcgcgacgggtcaattgacctggtcattaacctgccaaataacaacaccaaattcgtccacgataattacgtcatcaggcgcactgccgtggattccggcatcccgctgctcaccaattttcaggtcactaagctgtttgctgaggccgtccaaaagagccgcaaggtcgattctaaatccctgtttcattacagacaatattctgctggtaaagctgcctag

SEQ ID NO: 43594 - DNA, 4503 bp, Artificial Sequence
  derived and/or modified sequence
atgactcgtatcctgactgcctttaaagttgtgcgaaccttgaaaacaggtttcgggttcacaaatgtcaccgcccatcaaaagtggaagttctctcgccctgggatcaggctgctgagcgtgaaggcccagactgcacacatagttctggaggacgggactaaaatgaagggctactcatttggccatccaagttctgtggccggagaagtggtctttaatacagggctgggcggatatcctgaggcgatcactgaccctgcctataaggggcagatcctcactatggctaacccaatcatcgggaacgggggtgctccagatacgacagcactggacgagctcggcctgagcaaatacctggagtccaacggcattaaggtgtccggcctgttagtgctcgattacagcaaagactacaaccactggctagccactaaaagtttgggtcagtggctgcaggaagagaaagtaccagcaatttacggggtcgatactcgtatgttgactaaaatcatacgggacaagggcacaatgctcggaaagattgagttcgaaggacaaccggtggactttgttgatcccaacaagcaaaacctgatcgctgaggtgtccacaaaagacgtcaaagtctacggcaagggcaatccaactaaagtggtggccgtggactgtggaatcaagaacaacgtgatccggttgcttgtgaaacgcggagcagaggtgcatctagtgccttggaaccatgacttcaccaaaatggagtacgatggaattttaatcgcaggagggcctggaaaccccgcattagctgagcctctaatacagaacgtgaggaagatactcgagagcgatcggaaagaaccactctttggtatatccacagggaacttgataactggcctcgctgctggcgcaaaaacgtataagatgtccatggctaacaggggtcagaatcagcccgtgctgaatattactaacaagcaagcatttatcaccgcacagaaccacggttatgccctggataacactctgcctgccggttggaaacccctgttcgtcaacgtgaatgatcagaccaatgagggaatcatgcacgagtctaaacctttctttgcggtgcaattccaccccgaggtgaccccaggtccaatcgacactgaatatctgttcgattccttcttctccctgataaaaaaagggaaggctaccaccataacctccgtcttgcccaaacccgctctggtggcctctagagtagaggtgtccaaggtgctcattctggggagcggtggcctgtccatcgggcaggctggagagttcgattactctggtagccaggctgtgaaggccatgaaagaagaaaacgtcaagactgtgctcatgaaccccaatatagcatcggtccagacgaatgaggtaggtctgaagcaagcagacaccgtgtacttcctgccaatcacacctcagtttgtcaccgaggttattaaagctgagcagccagatgggctgatattgggcatgggcggtcagaccgctctgaactgtggggttgagctgttcaagcgcggtgtcctaaaggagtatggagtaaaggtgctcggtactagcgttgagagtatcatggcaacggaagatcgccagctcttcagcgataaactgaatgaaattaatgagaagattgcccctagttttgctgtggagtccatcgaagatgccctaaaagccgcagacactatcggatatcctgtgatgataagatcagcatacgccctcggagggctagggagtgggatttgccccaaccgagaaacactgatggatctgtccacaaaagcattcgcaatgaccaaccagattttggtcgaaaagagcgtgaccggttggaaggaaattgaatacgaggtagttagggatgccgacgacaactgcgttactgtctgcaacatggaaaatgttgatgccatgggggttcatacaggcgactctgtggtggtggcgccagcccagaccttgtcaaacgctgagtttcaaatgctccggcgtacaagtattaacgtagtccggcatctgggcatagtgggggaatgcaatattcaattcgctttgcaccccacttctatggaatactgtatcattgaggtgaacgccagattgagtagaagttccgctttagcttccaaggccactggttaccccctcgcatttattgcagccaagatagccttaggaatccctctccccgaaattaagaatgtggtgagcggaaaaacttccgcgtgcttcgaaccctccctcgattacatggttacaaagataccccgatgggatctggatcgatttcacggcacctctagtcgcataggatcctccatgaaatccgttggtgaggtgatggctatcgggagaacttttgaggagtcattccagaaggccttgcgcatgtgtcacccaagtatcgaagggtttactcctaggctaccgatgaacaaggagtggccgtcaaacttagatcttcggaaagagctgtcggagccaagttctacacgaatttacgcaatagccaaggctatcgatgacaatatgtctctcgatgagatagaaaagctcacatacattgataagtggttcctttataagatgcgggacatcctgaacatggagaaaacacttaaaggcttgaacagtgagtcaatgacagaggaaaccctcaagagagcgaaggaaattggtttttcagacaaacaaatcagcaaatgcctgggccttacagaggcccagaccagggaacttaggctgaaaaagaacattcatccgtgggttaaacagatagataccctcgcagccgaatatccctcggttacaaactacctgtacgtgacttacaacggacaggaacacgatgttaacttcgacgatcacggaatgatggtcctcgggtgtggcccttaccacattggcagttcagtggagtttgactggtgcgccgtttctagtatcaggactctgcgacaactgggaaagaagaccgtggtggtgaattgcaatcccgaaaccgtgagcacagatttcgacgagtgtgacaaactttacttcgaggagctgtccctcgagagaattctcgatatctaccatcaagaggcctgtgggggttgcatcatatcagtgggcggacaaattccgaataacctggccgtcccattgtacaaaaacggcgtgaaaattatgggaacttcaccattacagattgatcgagccgaggaccgcagtattttctctgccgtgctggacgaactgaaggtggcccaagccccttggaaagcagtgaatacactgaatgaggcactcgagttcgcaaaaagcgtagattatccatgcctcctgcgccctagctacgtgctgtcaggatccgctatgaatgtggtgtttagcgaagacgagatgaaaaagttcctggaagaggccactagagtgagtcaggaacatccagtggtgcttacaaagtttgtggaaggagcacgcgaggttgaaatggacgccgttggcaaggacgggcgagtaatctctcacgcaatctctgagcacgtggaggacgctggcgttcattctggcgacgctaccctgatgctgccgacacagactatcagccagggtgctatcgaaaaagtgaaagatgccacgcggaagattgcgaaggcctttgccatcagtggtccgttcaatgttcagttcctcgtgaaaggaaacgatgtgctggtgattgaatgtaacctccgcgcatcgcggtcgtttccttttgtatccaagaccctgggagtagactttattgacgtggccacgaaggtcatgataggggagaacgtggatgaaaaacacctgccaactctggatcacccaataatacccgctgattacgtggccataaaggcccctatgttcagctggcctcgtctgagggatgctgatcctattcttcgatgtgagatggcctccaccggagaggtagcttgcttcggggagggcattcacaccgccttccttaaggcaatgctctccactggctttaagattcctcagaaaggaatcctcatcggaattcagcagtcattccggcctagattcttgggggtggcggaacagctgcacaatgagggcttcaagcttttcgccactgaggcaacctctgattggctgaatgccaacaatgtgccggctacacccgtcgcatggccttctcaggagggccagaacccctccttgtcatcaattagaaaattgatcagggacggcagcatagatctggtcatcaacctccccaacaataataccaaattcgtacacgataattacgtcattagacggacggcagtggatagcggaatcccactcctgacaaactttcaggtcacgaagttgtttgcagaagccgtccagaaatcaaggaaagtggactctaaatctctgttccactataggcagtatagcgccggaaaggccgcatag

SEQ ID NO: 43595 - DNA, 4503 bp, Artificial Sequence
  derived and/or modified sequence
atgaccagaatcctgaccgccttcaaggtggtgagaaccctgaagaccggcttcggcttcaccaacgtgaccgcccaccagaagtggaagttcagcagacccggcatcagactgctgagcgtgaaggcccagaccgcccacatcgtgctggaggacggcaccaagatgaagggctacagcttcggccaccccagcagcgtggccggcgaggtggtgttcaacaccggcctgggcggctaccccgaggccatcaccgaccccgcctacaagggccagatcctgaccatggccaaccccatcatcggcaacggcggcgcccccgacaccaccgccctggacgagctgggcctgagcaagtacctggagagcaacggcatcaaggtgagcggcctgctggtgctggactacagcaaggactacaaccactggctggccaccaagagcctgggccagtggctgcaggaggagaaggtgcccgccatctacggcgtggacaccagaatgctgaccaagatcatcagagacaagggcaccatgctgggcaagatcgagttcgagggccagcccgtggacttcgtggaccccaacaagcagaacctgatcgccgaggtgagcaccaaggacgtgaaggtgtacggcaagggcaaccccaccaaggtggtggccgtggactgcggcatcaagaacaacgtgatcagactgctggtgaagagaggcgccgaggtgcacctggtgccctggaaccacgacttcaccaagatggagtacgacggcatcctgatcgccggcggccccggcaaccccgccctggccgagcccctgatccagaacgtgagaaagatcctggagagcgacagaaaggagcccctgttcggcatcagcaccggcaacctgatcaccggcctggccgccggcgccaagacctacaagatgagcatggccaacagaggccagaaccagcccgtgctgaacatcaccaacaagcaggccttcatcaccgcccagaaccacggctacgccctggacaacaccctgcccgccggctggaagcccctgttcgtgaacgtgaacgaccagaccaacgagggcatcatgcacgagagcaagcccttcttcgccgtgcagttccaccccgaggtgacccccggccccatcgacaccgagtacctgttcgacagcttcttcagcctgatcaagaagggcaaggccaccaccatcaccagcgtgctgcccaagcccgccctggtggccagcagagtggaggtgagcaaggtgctgatcctgggcagcggcggcctgagcatcggccaggccggcgagttcgactacagcggcagccaggccgtgaaggccatgaaggaggagaacgtgaagaccgtgctgatgaaccccaacatcgccagcgtgcagaccaacgaggtgggcctgaagcaggccgacaccgtgtacttcctgcccatcaccccccagttcgtgaccgaggtgatcaaggccgagcagcccgacggcctgatcctgggcatgggcggccagaccgccctgaactgcggcgtggagctgttcaagagaggcgtgctgaaggagtacggcgtgaaggtgctgggcaccagcgtggagagcatcatggccaccgaggacagacagctgttcagcgacaagctgaacgagatcaacgagaagatcgcccccagcttcgccgtggagagcatcgaggacgccctgaaggccgccgacaccatcggctaccccgtgatgatcagaagcgcctacgccctgggcggcctgggcagcggcatctgccccaacagagagaccctgatggacctgagcaccaaggccttcgccatgaccaaccagatcctggtggagaagagcgtgaccggctggaaggagatcgagtacgaggtggtgagagacgccgacgacaactgcgtgaccgtgtgcaacatggagaacgtggacgccatgggcgtgcacaccggcgacagcgtggtggtggcccccgcccagaccctgagcaacgccgagttccagatgctgagaagaaccagcatcaacgtggtgagacacctgggcatcgtgggcgagtgcaacatccagttcgccctgcaccccaccagcatggagtactgcatcatcgaggtgaacgccagactgagcagaagcagcgccctggccagcaaggccaccggctaccccctggccttcatcgccgccaagatcgccctgggcatccccctgcccgagatcaagaacgtggtgagcggcaagaccagcgcctgcttcgagcccagcctggactacatggtgaccaagatccccagatgggacctggacagattccacggcaccagcagcagaatcggcagcagcatgaagagcgtgggcgaggtgatggccatcggcagaaccttcgaggagagcttccagaaggccctgagaatgtgccaccccagcatcgagggcttcacccccagactgcccatgaacaaggagtggcccagcaacctggacctgagaaaggagctgagcgagcccagcagcaccagaatctacgccatcgccaaggccatcgacgacaacatgagcctggacgagatcgagaagctgacctacatcgacaagtggttcctgtacaagatgagagacatcctgaacatggagaagaccctgaagggcctgaacagcgagagcatgaccgaggagaccctgaagagagccaaggagatcggcttcagcgacaagcagatcagcaagtgcctgggcctgaccgaggcccagaccagagagctgagactgaagaagaacatccacccctgggtgaagcagatcgacaccctggccgccgagtaccccagcgtgaccaactacctgtacgtgacctacaacggccaggagcacgacgtgaacttcgacgaccacggcatgatggtgctgggctgcggcccctaccacatcggcagcagcgtggagttcgactggtgcgccgtgagcagcatcagaaccctgagacagctgggcaagaagaccgtggtggtgaactgcaaccccgagaccgtgagcaccgacttcgacgagtgcgacaagctgtacttcgaggagctgagcctggagagaatcctggacatctaccaccaggaggcctgcggcggctgcatcatcagcgtgggcggccagatccccaacaacctggccgtgcccctgtacaagaacggcgtgaagatcatgggcaccagccccctgcagatcgacagagccgaggacagaagcatcttcagcgccgtgctggacgagctgaaggtggcccaggccccctggaaggccgtgaacaccctgaacgaggccctggagttcgccaagagcgtggactacccctgcctgctgagacccagctacgtgctgagcggcagcgccatgaacgtggtgttcagcgaggacgagatgaagaagttcctggaggaggccaccagagtgagccaggagcaccccgtggtgctgaccaagttcgtggagggcgccagagaggtggagatggacgccgtgggcaaggacggcagagtgatcagccacgccatcagcgagcacgtggaggacgccggcgtgcacagcggcgacgccaccctgatgctgcccacccagaccatcagccagggcgccatcgagaaggtgaaggacgccaccagaaagatcgccaaggccttcgccatcagcggccccttcaacgtgcagttcctggtgaagggcaacgacgtgctggtgatcgagtgcaacctgagagccagcagaagcttccccttcgtgagcaagaccctgggcgtggacttcatcgacgtggccaccaaggtgatgatcggcgagaacgtggacgagaagcacctgcccaccctggaccaccccatcatccccgccgactacgtggccatcaaggcccccatgttcagctggcccagactgagagacgccgaccccatcctgagatgcgagatggccagcaccggcgaggtggcctgcttcggcgagggcatccacaccgccttcctgaaggccatgctgagcaccggcttcaagatcccccagaagggcatcctgatcggcatccagcagagcttcagacccagattcctgggcgtggccgagcagctgcacaacgagggcttcaagctgttcgccaccgaggccaccagcgactggctgaacgccaacaacgtgcccgccacccccgtggcctggcccagccaggagggccagaaccccagcctgagcagcatcagaaagctgatcagagacggcagcatcgacctggtgatcaacctgcccaacaacaacaccaagttcgtgcacgacaactacgtgatcagaagaaccgccgtggacagcggcatccccctgctgaccaacttccaggtgaccaagctgttcgccgaggccgtgcagaagagcagaaaggtggacagcaagagcctgttccactacagacagtacagcgccggcaaggccgcctag

SEQ ID NO: 43596 - protein, 1049 aa, Artificial Sequence
  derived and/or modified sequence
MKEENVKTVLMNPNIASVQTNEVGLKQADTVYFLPITPQFVTEVIKAEQPDGLILGMGGQTALNCGVELFKRGVLKEYGVKVLGTSVESIMATEDRQLFSDKLNEINEKIAPSFAVESIEDALKAADTIGYPVMIRSAYALGGLGSGICPNRETLMDLSTKAFAMTNQILVEKSVTGWKEIEYEVVRDADDNCVTVCNMENVDAMGVHTGDSVVVAPAQTLSNAEFQMLRRTSINVVRHLGIVGECNIQFALHPTSMEYCIIEVNARLSRSSALASKATGYPLAFIAAKIALGIPLPEIKNVVSGKTSACFEPSLDYMVTKIPRWDLDRFHGTSSRIGSSMKSVGEVMAIGRTFEESFQKALRMCHPSIEGFTPRLPMNKEWPSNLDLRKELSEPSSTRIYAIAKAIDDNMSLDEIEKLTYIDKWFLYKMRDILNMEKTLKGLNSESMTEETLKRAKEIGFSDKQISKCLGLTEAQTRELRLKKNIHPWVKQIDTLAAEYPSVTNYLYVTYNGQEHDVNFDDHGMMVLGCGPYHIGSSVEFDWCAVSSIRTLRQLGKKTVVVNCNPETVSTDFDECDKLYFEELSLERILDIYHQEACGGCIISVGGQIPNNLAVPLYKNGVKIMGTSPLQIDRAEDRSIFSAVLDELKVAQAPWKAVNTLNEALEFAKSVDYPCLLRPSYVLSGSAMNVVFSEDEMKKFLEEATRVSQEHPVVLTKFVEGAREVEMDAVGKDGRVISHAISEHVEDAGVHSGDATLMLPTQTISQGAIEKVKDATRKIAKAFAISGPFNVQFLVKGNDVLVIECNLRASRSFPFVSKTLGVDFIDVATKVMIGENVDEKHLPTLDHPIIPADYVAIKAPMFSWPRLRDADPILRCEMASTGEVACFGEGIHTAFLKAMLSTGFKIPQKGILIGIQQSFRPRFLGVAEQLHNEGFKLFATEATSDWLNANNVPATPVAWPSQEGQNPSLSSIRKLIRDGSIDLVINLPNNNTKFVHDNYVIRRTAVDSGIPLLTNFQVTKLFAEAVQKSRKVDSKSLFHYRQYSAGKAA

SEQ ID NO: 43597 - DNA, 3147 bp, Artificial Sequence
  derived and/or modified sequence
atgaaggaggagaacgtgaagaccgtgctgatgaaccccaacatcgccagcgtgcagaccaacgaggtgggcctgaagcaggccgacaccgtgtacttcctgcccatcaccccccagttcgtgaccgaggtgatcaaggccgagcagcccgacggcctgatcctgggcatgggcggccagaccgccctgaactgcggcgtggagctgttcaagcgcggcgtgctgaaggagtacggcgtgaaggtgctgggcaccagcgtggagagcatcatggccaccgaggaccgccagctgttcagcgacaagctgaacgagatcaacgagaagatcgcccccagcttcgccgtggagagcatcgaggacgccctgaaggccgccgacaccatcggctaccccgtgatgatccgcagcgcctacgccctgggcggcctgggcagcggcatctgccccaaccgcgagaccctgatggacctgagcaccaaggccttcgccatgaccaaccagatcctggtggagaagagcgtgaccggctggaaggagatcgagtacgaggtggtgcgcgacgccgacgacaactgcgtgaccgtgtgcaacatggagaacgtggacgccatgggcgtgcacaccggcgacagcgtggtggtggcccccgcccagaccctgagcaacgccgagttccagatgctgcgccgcaccagcatcaacgtggtgcgccacctgggcatcgtgggcgagtgcaacatccagttcgccctgcaccccaccagcatggagtactgcatcatcgaggtgaacgcccgcctgagccgcagcagcgccctggccagcaaggccaccggctaccccctggccttcatcgccgccaagatcgccctgggcatccccctgcccgagatcaagaacgtggtgagcggcaagaccagcgcctgcttcgagcccagcctggactacatggtgaccaagatcccccgctgggacctggaccgcttccacggcaccagcagccgcatcggcagcagcatgaagagcgtgggcgaggtgatggccatcggccgcaccttcgaggagagcttccagaaggccctgcgcatgtgccaccccagcatcgagggcttcaccccccgcctgcccatgaacaaggagtggcccagcaacctggacctgcgcaaggagctgagcgagcccagcagcacccgcatctacgccatcgccaaggccatcgacgacaacatgagcctggacgagatcgagaagctgacctacatcgacaagtggttcctgtacaagatgcgcgacatcctgaacatggagaagaccctgaagggcctgaacagcgagagcatgaccgaggagaccctgaagcgcgccaaggagatcggcttcagcgacaagcagatcagcaagtgcctgggcctgaccgaggcccagacccgcgagctgcgcctgaagaagaacatccacccctgggtgaagcagatcgacaccctggccgccgagtaccccagcgtgaccaactacctgtacgtgacctacaacggccaggagcacgacgtgaacttcgacgaccacggcatgatggtgctgggctgcggcccctaccacatcggcagcagcgtggagttcgactggtgcgccgtgagcagcatccgcaccctgcgccagctgggcaagaagaccgtggtggtgaactgcaaccccgagaccgtgagcaccgacttcgacgagtgcgacaagctgtacttcgaggagctgagcctggagcgcatcctggacatctaccaccaggaggcctgcggcggctgcatcatcagcgtgggcggccagatccccaacaacctggccgtgcccctgtacaagaacggcgtgaagatcatgggcaccagccccctgcagatcgaccgcgccgaggaccgcagcatcttcagcgccgtgctggacgagctgaaggtggcccaggccccctggaaggccgtgaacaccctgaacgaggccctggagttcgccaagagcgtggactacccctgcctgctgcgccccagctacgtgctgagcggcagcgccatgaacgtggtgttcagcgaggacgagatgaagaagttcctggaggaggccacccgcgtgagccaggagcaccccgtggtgctgaccaagttcgtggagggcgcccgcgaggtggagatggacgccgtgggcaaggacggccgcgtgatcagccacgccatcagcgagcacgtggaggacgccggcgtgcacagcggcgacgccaccctgatgctgcccacccagaccatcagccagggcgccatcgagaaggtgaaggacgccacccgcaagatcgccaaggccttcgccatcagcggccccttcaacgtgcagttcctggtgaagggcaacgacgtgctggtgatcgagtgcaacctgcgcgccagccgcagcttccccttcgtgagcaagaccctgggcgtggacttcatcgacgtggccaccaaggtgatgatcggcgagaacgtggacgagaagcacctgcccaccctggaccaccccatcatccccgccgactacgtggccatcaaggcccccatgttcagctggccccgcctgcgcgacgccgaccccatcctgcgctgcgagatggccagcaccggcgaggtggcctgcttcggcgagggcatccacaccgccttcctgaaggccatgctgagcaccggcttcaagatcccccagaagggcatcctgatcggcatccagcagagcttccgcccccgcttcctgggcgtggccgagcagctgcacaacgagggcttcaagctgttcgccaccgaggccaccagcgactggctgaacgccaacaacgtgcccgccacccccgtggcctggcccagccaggagggccagaaccccagcctgagcagcatccgcaagctgatccgcgacggcagcatcgacctggtgatcaacctgcccaacaacaacaccaagttcgtgcacgacaactacgtgatccgccgcaccgccgtggacagcggcatccccctgctgaccaacttccaggtgaccaagctgttcgccgaggccgtgcagaagagccgcaaggtggacagcaagagcctgttccactaccgccagtacagcgccggcaaggccgcc

SEQ ID NO: 43598 - DNA, 3150 bp, Artificial Sequence
  derived and/or modified sequence
atgaaggaggagaacgtgaagaccgtgctgatgaaccccaacatcgccagcgtgcagaccaacgaggtgggcctgaagcaggccgacaccgtgtacttcctgcccatcaccccccagttcgtgaccgaggtgatcaaggccgagcagcccgacggcctgatcctgggcatgggcggccagaccgccctgaactgcggcgtggagctgttcaagagaggcgtgctgaaggagtacggcgtgaaggtgctgggcaccagcgtggagagcatcatggccaccgaggacagacagctgttcagcgacaagctgaacgagatcaacgagaagatcgcccccagcttcgccgtggagagcatcgaggacgccctgaaggccgccgacaccatcggctaccccgtgatgatcagaagcgcctacgccctgggcggcctgggcagcggcatctgccccaacagagagaccctgatggacctgagcaccaaggccttcgccatgaccaaccagatcctggtggagaagagcgtgaccggctggaaggagatcgagtacgaggtggtgagagacgccgacgacaactgcgtgaccgtgtgcaacatggagaacgtggacgccatgggcgtgcacaccggcgacagcgtggtggtggcccccgcccagaccctgagcaacgccgagttccagatgctgagaagaaccagcatcaacgtggtgagacacctgggcatcgtgggcgagtgcaacatccagttcgccctgcaccccaccagcatggagtactgcatcatcgaggtgaacgccagactgagcagaagcagcgccctggccagcaaggccaccggctaccccctggccttcatcgccgccaagatcgccctgggcatccccctgcccgagatcaagaacgtggtgagcggcaagaccagcgcctgcttcgagcccagcctggactacatggtgaccaagatccccagatgggacctggacagattccacggcaccagcagcagaatcggcagcagcatgaagagcgtgggcgaggtgatggccatcggcagaaccttcgaggagagcttccagaaggccctgagaatgtgccaccccagcatcgagggcttcacccccagactgcccatgaacaaggagtggcccagcaacctggacctgagaaaggagctgagcgagcccagcagcaccagaatctacgccatcgccaaggccatcgacgacaacatgagcctggacgagatcgagaagctgacctacatcgacaagtggttcctgtacaagatgagagacatcctgaacatggagaagaccctgaagggcctgaacagcgagagcatgaccgaggagaccctgaagagagccaaggagatcggcttcagcgacaagcagatcagcaagtgcctgggcctgaccgaggcccagaccagagagctgagactgaagaagaacatccacccctgggtgaagcagatcgacaccctggccgccgagtaccccagcgtgaccaactacctgtacgtgacctacaacggccaggagcacgacgtgaacttcgacgaccacggcatgatggtgctgggctgcggcccctaccacatcggcagcagcgtggagttcgactggtgcgccgtgagcagcatcagaaccctgagacagctgggcaagaagaccgtggtggtgaactgcaaccccgagaccgtgagcaccgacttcgacgagtgcgacaagctgtacttcgaggagctgagcctggagagaatcctggacatctaccaccaggaggcctgcggcggctgcatcatcagcgtgggcggccagatccccaacaacctggccgtgcccctgtacaagaacggcgtgaagatcatgggcaccagccccctgcagatcgacagagccgaggacagaagcatcttcagcgccgtgctggacgagctgaaggtggcccaggccccctggaaggccgtgaacaccctgaacgaggccctggagttcgccaagagcgtggactacccctgcctgctgagacccagctacgtgctgagcggcagcgccatgaacgtggtgttcagcgaggacgagatgaagaagttcctggaggaggccaccagagtgagccaggagcaccccgtggtgctgaccaagttcgtggagggcgccagagaggtggagatggacgccgtgggcaaggacggcagagtgatcagccacgccatcagcgagcacgtggaggacgccggcgtgcacagcggcgacgccaccctgatgctgcccacccagaccatcagccagggcgccatcgagaaggtgaaggacgccaccagaaagatcgccaaggccttcgccatcagcggccccttcaacgtgcagttcctggtgaagggcaacgacgtgctggtgatcgagtgcaacctgagagccagcagaagcttccccttcgtgagcaagaccctgggcgtggacttcatcgacgtggccaccaaggtgatgatcggcgagaacgtggacgagaagcacctgcccaccctggaccaccccatcatccccgccgactacgtggccatcaaggcccccatgttcagctggcccagactgagagacgccgaccccatcctgagatgcgagatggccagcaccggcgaggtggcctgcttcggcgagggcatccacaccgccttcctgaaggccatgctgagcaccggcttcaagatcccccagaagggcatcctgatcggcatccagcagagcttcagacccagattcctgggcgtggccgagcagctgcacaacgagggcttcaagctgttcgccaccgaggccaccagcgactggctgaacgccaacaacgtgcccgccacccccgtggcctggcccagccaggagggccagaaccccagcctgagcagcatcagaaagctgatcagagacggcagcatcgacctggtgatcaacctgcccaacaacaacaccaagttcgtgcacgacaactacgtgatcagaagaaccgccgtggacagcggcatccccctgctgaccaacttccaggtgaccaagctgttcgccgaggccgtgcagaagagcagaaaggtggacagcaagagcctgttccactacagacagtacagcgccggcaaggccgcctag

SEQ ID NO: 43599 - DNA, 3150 bp, Artificial Sequence
  derived and/or modified sequence
atgaaagaggagaatgtcaagacggtcctgatgaatcccaacattgcttccgtccaaacaaatgaagtgggccttaaacaggccgatacagtctattttctgcctatcacccctcagtttgtcaccgaggtgatcaaagcagaacagccggacgggttgatcttaggcatgggcggccagaccgcgctcaactgcggggtggagctgtttaagagaggggtcctcaaagagtacggggtgaaggtgttggggacatctgttgagtcaattatggctacagaggacagacagctgttctccgacaagctgaacgagattaatgagaagattgcaccgtcttttgccgtcgagtcgattgaggacgcattgaaggccgcggacacaattgggtatccagttatgattcgatccgcctatgccctgggtggactggggtctgggatttgtcccaatcgcgagacactgatggacctgagcaccaaagccttcgctatgaccaaccaaatacttgtggaaaagagtgttaccgggtggaaagagatcgagtatgaagtcgtccgcgacgcagatgacaattgcgtgactgtgtgtaacatggaaaacgtggacgccatgggcgtccacacgggcgactctgttgtcgtcgctcctgctcagaccctcagtaatgccgagttccagatgctgaggcggacctccataaacgtggtgaggcacctggggatcgtcggcgaatgcaatatccagttcgctcttcaccccacctcgatggagtactgcatcatcgaagttaatgcccgcctgagtcggtcatccgctctggcgagcaaagcaactggataccctctagctttcatagcggcaaaaatcgcactagggatacccctgcccgagatcaagaatgtggtttcagggaaaactagcgcctgttttgagcctagtctggactatatggtgacgaagatcccccgctgggatttagatcggttccatggtacatcatccagaattggaagtagtatgaagagcgttggcgaggtaatggctattggccggaccttcgaagaatcctttcagaaggccctacgaatgtgtcacccaagtatcgagggctttactcccagactgcctatgaataaggagtggccttccaacctggacttgcggaaggaactctccgaaccatcttctaccaggatttacgcaatagccaaggcaatagacgacaatatgtcactcgatgagatcgaaaagttgacctatatagataaatggtttctttataagatgcgggacattttgaacatggagaagacactcaagggtctaaattctgaatctatgaccgaggagaccctgaagcgcgccaaggagatcggcttcagcgacaagcaaatctctaaatgtcttggacttactgaggcacaaacccgggagctgaggctgaaaaagaatatacacccctgggttaagcagattgatacacttgccgctgagtaccccagcgtcaccaactatctgtatgtgacttacaacggtcaggagcatgacgtaaatttcgatgaccacggcatgatggtgttgggctgcggaccctaccacattgggagctccgtggagttcgattggtgtgcagtctcatccattaggactcttcgtcagctcgggaaaaagacagtcgtggtaaattgtaaccccgagacagtcagtaccgatttcgacgagtgcgataagttgtactttgaggagctgtcactggagagaatcctagatatctaccatcaggaagcctgcggggggtgtatcatctccgtcggcggccaaatccctaataacttggcagtccccctgtacaaaaacggggtgaaaatcatgggaacttcccccctgcaaatcgacagagccgaggaccggagcatcttttcggctgtgttggacgagctgaaagtggcgcaggccccctggaaagccgtgaacacactaaacgaagcacttgaatttgcaaagagtgttgattatccttgcttgcttcgcccctcttatgttcttagcggatcggccatgaacgtggtgttcagtgaagacgagatgaaaaaatttctggaggaggcgactcgggtctctcaggaacatcctgtcgtcctgactaagttcgtggagggagccagggaggtcgagatggatgccgttggcaaggacggccgagtgattagtcacgccatatccgagcacgtagaggacgcgggcgttcactccggcgacgctaccctgatgctgcccacacagaccatcagccagggtgccatcgagaaagtgaaagatgcaaccaggaagatcgccaaagcattcgctatcagcgggccattcaacgtccagtttttggtcaagggaaacgacgtgcttgtcatcgagtgtaacctgcgagctagccggtcatttccgtttgtgtcaaagacactaggggttgatttcattgacgttgccaccaaggttatgataggggagaatgtggacgagaaacatttgccaacacttgatcacccaatcatcccagccgattacgtggcaattaaggcacccatgttctcatggcctagattgagagatgctgaccctatactgcgatgcgagatggcctccacaggtgaggtggcttgctttggagaagggattcatacagcctttcttaaagccatgttaagcacggggtttaagattccacagaagggcattctcatagggattcagcagtcattccgcccgcgcttccttggggtggcggagcaattacataacgaaggctttaagctcttcgcgaccgaggcgacaagcgattggctgaacgccaacaacgttcctgctaccccagtggcatggccatctcaggagggacaaaatccttctctgtcttcgatccgcaaactgatccgcgatgggtccatcgatttggtgattaatctgccaaacaacaacaccaaattcgtgcatgataactacgtaataagaaggacagccgtagactcaggcataccgcttctgacaaactttcaggttacgaaactttttgctgaggcggtgcagaagtcccggaaggtggattccaagtctctgttccattatcgccaatattctgctggaaaggcagcatag

SEQ ID NO: 43600 - DNA, 3150 bp, Artificial Sequence
  derived and/or modified sequence
atgaaggaggagaatgtgaagacagtgctgatgaaccccaacatcgcctctgtgcagaccaatgaggtgggcctgaagcaggccgacacagtgtacttcctgcccatcaccccccagtttgtgacagaggtgatcaaggccgagcagccagatggcctcatcctgggcatgggcggccagacagccctgaactgtggggtggagctgttcaagaggggcgtgctgaaggagtatggagtgaaggtgctgggcacctctgtggagagcatcatggccacagaggaccggcagctgttcagtgacaagctgaatgagatcaatgagaagatcgcccccagctttgctgtggagagcattgaagatgccctgaaggctgctgacaccatcggctaccctgtgatgatccgcagcgcctatgccctgggcggcctgggcagcggcatctgccccaaccgggagaccctgatggacctgagcaccaaggcctttgccatgaccaaccagatcctggtggagaagtctgtgacaggctggaaggagattgaatatgaggtggtgagagatgctgatgacaactgtgtgacagtgtgcaacatggagaatgtggatgccatgggcgtgcacactggagacagcgtggtggtggccccagcccagaccctgagcaatgctgagttccagatgctgcggaggaccagcatcaacgtggtgcgccacctgggcatcgtgggggagtgcaacatccagtttgccctgcaccccacctccatggagtactgcatcatcgaggtgaatgcccggctgagccgcagcagcgccctggccagcaaggccaccggctaccccctggccttcatcgccgccaagatcgccctgggcatccccctgcctgagatcaagaatgtggtgtctgggaagaccagcgcctgctttgagcccagcctggactacatggtgaccaagatcccccgctgggacctggaccgcttccacggcaccagcagcagaattggcagctccatgaagtctgtgggggaggtgatggccatcggccgcacctttgaggagagcttccagaaggccctgaggatgtgccaccccagcattgagggcttcaccccccggctgcccatgaacaaggagtggcccagcaacctggacctgaggaaggagctgtctgagcccagcagcacccgcatctatgccatcgccaaggccattgatgacaacatgagcctggatgaaattgagaagctgacctacatcgacaagtggttcctgtacaagatgagggacatcctgaacatggagaagaccctgaagggcctgaacagcgagagcatgacagaggagaccctgaagagggccaaggagatcggcttcagtgacaagcagatcagcaagtgcctgggcctgacagaggcccagacccgggagctgcggctgaagaagaacatccacccctgggtgaagcagattgacaccctggccgctgagtaccccagcgtgaccaactacctgtatgtgacctacaacggccaggagcatgatgtgaactttgatgaccacggcatgatggtgctgggctgcggcccctaccacatcggcagctctgtggagtttgactggtgtgctgtgagcagcatccgcaccctgcggcagctgggcaagaagacagtggtggtgaactgcaaccctgagaccgtgtccacagactttgatgaatgtgacaagctgtactttgaggagctgagcctggagcgcatcctggacatctaccaccaggaggcctgtggcggctgcatcatctctgtgggcggccagatccccaacaacctggccgtgcccctgtacaagaatggagtgaagatcatgggcaccagccccctgcagattgacagagctgaggacaggagcatcttctctgctgtgctggatgagctgaaggtggcccaggccccctggaaggctgtgaacaccctgaatgaggccctggagtttgccaagtctgtggactacccctgcctgctgcggcccagctatgtgctgagcggcagcgccatgaatgtggtgttttctgaagatgagatgaagaagttcctggaggaggccaccagggtgtcccaggagcaccctgtggtgctgaccaagtttgtggagggcgcccgggaggtggagatggatgctgtgggcaaggatggccgggtcatcagccacgccatcagcgagcacgtggaggatgctggggtgcacagcggagatgccaccctgatgctgcccacccagaccatcagccagggcgccatcgagaaggtgaaggatgccaccaggaagatcgccaaggcctttgccatcagcggccccttcaacgtgcagttcctggtgaagggaaatgatgtgctggtgattgagtgcaacctgcgggccagccgctccttcccctttgtgtccaagaccctgggcgtggacttcattgatgtggccaccaaggtgatgattggagaaaatgtggatgagaagcacctgcccaccctggaccaccccatcatcccagctgactatgtggccatcaaggcccccatgttctcctggccccggctgagagatgctgaccccatcctgcgctgtgagatggccagcactggagaggtggcctgctttggagagggcatccacacagccttcctgaaggccatgctgagcacaggcttcaagatcccccagaagggcatcctgattggcatccagcagagcttccggccccgcttcctgggcgtggccgagcagctgcacaatgaaggcttcaagctgtttgccacagaggccaccagtgactggctgaatgccaacaacgtgcctgccacccctgtggcctggcccagccaggagggccagaaccccagcctgagcagcatcaggaagctgatcagagatggcagcattgacctggtgatcaacctgcccaacaacaacaccaagtttgtgcatgacaactacgtgatccggaggacagctgtggacagcggcatccccctgctgaccaacttccaggtgaccaagctgtttgctgaggccgtgcagaagagcaggaaggtggacagcaagagcctcttccactaccggcagtacagcgctgggaaggccgcctag

SEQ ID NO: 43601 - DNA, 3150 bp, Artificial Sequence
  derived and/or modified sequence
atgaaggaggagaacgtgaagaccgtgctgatgaaccccaacatcgcctctgtacagactaacgaggtagggctgaagcaggccgatacggtttactttcttcctatcactcctcagttcgtgaccgaggtcatcaaggccgagcagccagacggtctaatcttaggcatgggcggtcagacagcgctgaactgtggcgtcgagctgtttaaacggggggttctcaaagaatatggagtgaaagtgctcggcacatctgtggagagcataatggcaacagaagatcgccagctgttcagcgacaagctgaatgagataaacgagaagatcgctccatcatttgccgtagaaagtatcgaagacgcattgaaagcagcagacacaattgggtaccccgtgatgatccgctctgcctatgcgctaggcggcctcggatcgggtatttgcccaaatcgggagactcttatggatctatccacaaaagcattcgcaatgacaaaccagatactggtcgaaaaatccgttactggatggaaggagatcgagtacgaggtagttcgtgacgcagatgataattgtgtgacggtctgcaatatggaaaatgtggacgcgatgggagtccatacaggggactcagtcgtcgtcgcccctgcgcaaacactgtctaatgcggagttccagatgctgcgccgcacctccataaatgtagttaggcacctgggcatcgtgggcgagtgtaatatccagtttgcccttcacccaaccagcatggaatattgcattatagaggtgaacgccagattgtcccggagtagtgcccttgcaagtaaggccacgggttatccccttgcatttatcgctgctaaaattgcattaggaattccattgccagagataaagaacgtcgtgtctggaaaaacctcagcctgttttgagcctagcctcgattacatggtgactaaaatcccacgttgggacttggacagattccatggaacatcatcgaggattgggagctctatgaagtccgtcggagaagttatggctatcggcagaacctttgaggaatccttccagaaagctctgcgcatgtgtcatccatccattgagggattcaccccgagactgccaatgaataaggagtggccaagcaacctagacctgcgtaaagagctgtccgagccgagctctactcgcatctatgccatagcaaaagccattgatgataacatgagcttggatgagattgagaagttgacatacattgataagtggtttctctacaagatgagagatattttgaatatggaaaagactctgaagggactcaattccgagtctatgacagaggagactcttaaaagagctaaagagataggcttttcggataagcagatctctaagtgcttgggtctcacagaggcacaaactagagagctgagactgaaaaagaatatccacccctgggtcaaacagattgacacattggcggcggaatatccgagtgtcacaaactacttgtatgtaacttacaacggacaggaacacgacgtgaacttcgacgaccatgggatgatggttttggggtgtggaccctaccacattggttcaagcgtcgaattcgattggtgtgccgtgtcctcgatcagaacacttcgtcaactggggaaaaagacggtggtggtcaactgtaaccccgagacagtctctaccgactttgatgagtgcgacaaactgtattttgaggaattatcccttgaacgcattctggatatctaccatcaggaagcttgtggcggttgcatcattagcgtaggtgggcaaatcccaaataatctggctgtgcctctgtacaagaacggggtgaaaatcatggggaccagtccactgcaaatcgacagagcagaggacaggagcatatttagcgcagtactagacgagttgaaggtggctcaggccccctggaaggcagtcaacactctgaatgaagccctggagtttgctaagtctgtcgattacccgtgcctcctcaggcctagctacgttctctccggttctgccatgaatgtcgtgttcagtgaagacgaaatgaagaaattcctcgaggaagcaacacgcgtttctcaggagcatccagtggtcctgacaaaattcgtggagggggccagggaggttgaaatggacgccgtcggaaaagacggtcgcgtgatctcccacgctatatccgagcacgttgaggacgcaggtgtgcattctggcgacgctaccctcatgctgcctacccagaccatttcacagggtgctattgagaaggtgaaagacgccactaggaagatcgccaaggcatttgcaataagcggcccctttaatgtgcaattcctagtcaaaggcaacgacgtgctggtgatcgaatgtaacctcagagcttccagatccttcccatttgtctcaaagaccttgggagtcgactttatcgacgtggctacgaaagtaatgatcggagaaaatgttgacgagaagcacctgccaactttggatcaccccattattcccgcagactacgtggccattaaggcgccaatgtttagctggccacgcttaagggacgcagaccccatcctgagatgcgaaatggcttcaactggagaggtggcctgtttcggagagggcattcacactgcctttcttaaggccatgctcagtaccggatttaagatccctcagaaaggaattcttatagggatccaacaatcattccggccaaggttcctgggagtcgccgaacaattgcacaatgagggctttaagttattcgcaactgaagctacatccgactggctaaatgctaataatgtaccagccacaccagtggcctggccaagccaggagggtcaaaaccccagtctgtcaagtatccggaagctaattagagatggttcaattgatcttgtaattaacttaccaaacaacaataccaagtttgtgcacgacaactatgtgattcgccgcaccgccgtagatagtggcatccctctcttaactaattttcaggtgactaaattgttcgccgaggctgttcagaaatctaggaaagtcgactctaaaagcctctttcactatcgtcagtattcagcagggaaggctgcgtag

SEQ ID NO: 43602 - DNA, 3150 bp, Artificial Sequence
  derived and/or modified sequence
atgaaggaggagaatgtaaaaacagtgctgatgaaccccaacatcgcgagcgtccagacaaatgaggtgggattgaaacaggctgacaccgtgtactttctgccgataaccccccagtttgtgacagaggttatcaaggccgagcagcctgacgggctgattctgggtatgggtgggcagacagccttgaattgtggagtcgagctgtttaagcgcggagtcctcaaagagtacggggtgaaagtactaggtacttctgtcgaaagcataatggccacggaagaccggcagctgtttagtgataagctgaacgagatcaacgagaagatcgctcccagtttcgctgtcgagtccattgaggacgcgctaaaagcagcggacactatcggttaccccgtcatgatacgatcagcatatgctttgggcggactcgggtcaggcatttgtcccaatagggagacactcatggacctcagtaccaaggcgttcgctatgaccaatcaaattctggttgaaaagagtgtgacgggatggaaggaaattgaatatgaggtcgtcagggacgccgacgacaactgcgtgaccgtgtgcaatatggaaaacgtggacgctatgggagtacacacaggagactccgtcgtggtagcacctgcccagaccctttcgaatgctgagtttcagatgctgcgtaggactagcatcaatgtggttagacatttaggaatcgtgggagaatgtaatattcagtttgcgctgcacccgacatccatggagtattgtattatcgaggtcaatgcccgtcttagccgcagtagcgctttggcaagcaaagccacaggttacccactcgctttcatagcagccaaaatcgctctgggaatacccctgcctgagattaaaaatgtcgtgagcgggaagacctctgcctgctttgagccctccctggattacatggtcaccaagataccacggtgggatttggacaggttccacggtacttcctctaggattggatccagtatgaaaagtgttggcgaagttatggcaatcgggagaacctttgaagagagctttcagaaagcgttaaggatgtgtcacccaagtatcgagggtttcacccccagacttcccatgaacaaggaatggcccagtaacctggacctaagaaaagaactgagcgagccatcaagcacgcgcatttatgccatagcgaaagccatagacgacaacatgtctttggacgagattgagaaactgacatatattgacaagtggttcctgtacaaaatgcgtgacatattaaacatggagaaaaccttaaaggggcttaactccgaatctatgactgaagaaactttaaaaagggcgaaagaaatcggtttttctgacaagcagatctcgaagtgccttggcctcaccgaggcacaaactcgagaacttcggctgaagaagaatatccatccatgggtcaagcagatcgatacgcttgctgccgaatacccctccgtcacaaactacttgtacgtcacctacaatggccaggagcatgatgtgaatttcgacgaccatggaatgatggttctaggctgtggcccataccacatcggaagcagtgttgagtttgactggtgcgcagtgtcttccatccggacactgagacagctcgggaaaaaaactgtggtggtcaattgcaaccccgaaactgtctccactgattttgacgaatgcgacaagctgtactttgaagaactgagtctggaacggatcctggatatttatcatcaggaagcatgtggagggtgcattatctcagtgggcggacagattcctaacaatttggcagtgccactgtataaaaatggcgtgaagatcatgggtacatcccctctgcaaatcgaccgcgctgaggatagaagtattttttcggcagtcttagacgaattgaaggtggctcaagccccatggaaagctgtgaataccctgaatgaggctctagagtttgctaagagcgtcgattatccatgtctcctgcgaccttcatacgtactgagcggatcagctatgaatgtcgtattcagcgaagatgaaatgaaaaagttcctggaagaggccactcgcgtgtctcaggagcaccctgtcgtgctgacaaagttcgtggagggagccagagaagtggagatggatgcagtcggcaaggatggccgtgtgataagtcacgcgataagtgagcacgtcgaagacgcgggtgttcattctggagacgctacccttatgcttcctacacagaccatatcccagggagcaatagagaaggtcaaagacgccactcgcaaaattgccaaggcctttgcgatctcaggaccgtttaatgtccagtttctcgtcaaggggaatgacgtgttagtgatagagtgcaatctccgagcctcccgatcattcccctttgtctctaagacccttggagtggattttatagacgtggccacaaaggtgatgatcggcgagaacgtggacgaaaaacatctgccaactcttgaccatcccatcattccggctgactacgtggctataaaagctccaatgttctcgtggcctaggctgagggatgccgatccgattctcagatgcgaaatggcatccacaggcgaagtggcctgctttggcgaaggaatacatacggcattcctgaaagcaatgctgagtacaggtttcaaaatccctcagaagggaatcctcataggcatccaacagagtttccgcccaaggttcttgggcgtagcagagcagttacataacgaggggtttaagctctttgctaccgaggctacatccgattggctcaatgctaacaatgtgcctgcgacaccagtggcctggccctcccaagagggccagaacccttccctgagttctatcagaaagcttatcagagacggcagcatagaccttgtcattaacctgcctaataacaatacaaaatttgtgcacgacaattatgtcatccgcagaacagcggtggattctggcatcccattgctcaccaacttccaagtgactaagctttttgcagaagccgtgcagaagtctcgcaaggtggattccaaaagccttttccattaccggcagtactcggccggaaaggcggcttag

SEQ ID NO: 43603 - protein, 603 aa, Artificial Sequence
  derived and/or modified sequence
MAVARKIRTLLTVNILVFVGIVLFSVYCRLQGRSQELVRIVSGDRRVRSRHAKVGTLGDREAILQRLDHLEEVVYNQLNGLAKPIGLVEGPGGLGQGGLAATLRDDGQEAEGKYEEYGYNAQLSDRISLDRSIPDYRPRKCRQMSYAQDLPQVSVVFIFVNEALSVILRSVHSVVNHTPSQLLKEVILVDDNSDNVELKFNLDQYVNKRYPGLVKIVRNSRREGLIRARLQGWKAATAPVVGFFDAHVEFNTGWAEPALSRIREDRRRIVLPAIDNIKYSTFEVQQYANAAHGYNWGLWCMYIIPPQDWLDRGDESAPIRTPAMIGCSFVVDREYFGDIGLLDPGMEVYGGENVELGMRVWQCGGSMEVLPCSRVAHIERTRKPYNNDIDYYAKRNALRAAEVWMDDFKSHVYMAWNIPMSNPGVDFGDVSERLALRQRLKCRSFKWYLENVYPEMRVYNNTLTYGEVRNSKASAYCLDQGAEDGDRAILYPCHGMSSQLVRYSADGLLQLGPLGSTAFLPDSKCLVDDGTGRMPTLKKCEDVARPTQRLWDFTQSGPIVSRATGRCLEVEMSKDANFGLRLVVQRCSGQKWMIRNWIKHARH

SEQ ID NO: 43604 - protein, 237 aa, Artificial Sequence
  derived and/or modified sequence
MEVLPCSRVAHIERTRKPYNNDIDYYAKRNALRAAEVWMDDFKSHVYMAWNIPMSNPGVDFGDVSERLALRQRLKCRSFKWYLENVYPEMRVYNNTLTYGEVRNSKASAYCLDQGAEDGDRAILYPCHGMSSQLVRYSADGLLQLGPLGSTAFLPDSKCLVDDGTGRMPTLKKCEDVARPTQRLWDFTQSGPIVSRATGRCLEVEMSKDANFGLRLVVQRCSGQKWMIRNWIKHARH

SEQ ID NO: 43605 - protein, 354 aa, Artificial Sequence
  derived and/or modified sequence
MIGCSFVVDREYFGDIGLLDPGMEVYGGENVELGMRETEGFQQDKVNYKQNKRGRKTRQRVKRSRSEAHRAQPSPGATHGAHSRAPGPRTEPTAEPWGHARPTAALPATGVWQCGGSMEVLPCSRVAHIERTRKPYNNDIDYYAKRNALRAAEVWMDDFKSHVYMAWNIPMSNPGVDFGDVSERLALRQRLKCRSFKWYLENVYPEMRVYNNTLTYGEVRNSKASAYCLDQGAEDGDRAILYPCHGMSSQLVRYSADGLLQLGPLGSTAFLPDSKCLVDDGTGRMPTLKKCEDVARPTQRLWDFTQSGPIVSRATGRCLEVEMSKDANFGLRLVVQRCSGQKWMIRNWIKHARH

SEQ ID NO: 43606 - protein, 97 aa, Artificial Sequence
  derived and/or modified sequence
MEVLPCSRVAHIERTRKPYNNDIDYYAKRNALRAAEVWMDDFKSHVYMAWNIPMSNPGVDFGDVSERLALRQRLKCRSFKWYLENVYPEMRVYNNTL

SEQ ID NO: 43607 - protein, 54 aa, Artificial Sequence
  derived and/or modified sequence
MEVLPCSRVAHIERTRKPYNNDIDYYAKRNALRAAEVWMDDFKSHVYMAWNIPM

SEQ ID NO: 43608 - DNA, 1812 bp, Artificial Sequence
  derived and/or modified sequence
atggccgtggccagaaagatcagaaccctgctgaccgtgaacatcctggtgttcgtgggcatcgtgctgttcagcgtgtactgcagactgcagggcagaagccaggagctggtgagaatcgtgagcggcgacagaagagtgagaagcagacacgccaaggtgggcaccctgggcgacagagaggccatcctgcagagactggaccacctggaggaggtggtgtacaaccagctgaacggcctggccaagcccatcggcctggtggagggccccggcggcctgggccagggcggcctggccgccaccctgagagacgacggccaggaggccgagggcaagtacgaggagtacggctacaacgcccagctgagcgacagaatcagcctggacagaagcatccccgactacagacccagaaagtgcagacagatgagctacgcccaggacctgccccaggtgagcgtggtgttcatcttcgtgaacgaggccctgagcgtgatcctgagaagcgtgcacagcgtggtgaaccacacccccagccagctgctgaaggaggtgatcctggtggacgacaacagcgacaacgtggagctgaagttcaacctggaccagtacgtgaacaagagataccccggcctggtgaagatcgtgagaaacagcagaagagagggcctgatcagagccagactgcagggctggaaggccgccaccgcccccgtggtgggcttcttcgacgcccacgtggagttcaacaccggctgggccgagcccgccctgagcagaatcagagaggacagaagaagaatcgtgctgcccgccatcgacaacatcaagtacagcaccttcgaggtgcagcagtacgccaacgccgcccacggctacaactggggcctgtggtgcatgtacatcatccccccccaggactggctggacagaggcgacgagagcgcccccatcagaacccccgccatgatcggctgcagcttcgtggtggacagagagtacttcggcgacatcggcctgctggaccccggcatggaggtgtacggcggcgagaacgtggagctgggcatgagagtgtggcagtgcggcggcagcatggaggtgctgccctgcagcagagtggcccacatcgagagaaccagaaagccctacaacaacgacatcgactactacgccaagagaaacgccctgagagccgccgaggtgtggatggacgacttcaagagccacgtgtacatggcctggaacatccccatgagcaaccccggcgtggacttcggcgacgtgagcgagagactggccctgagacagagactgaagtgcagaagcttcaagtggtacctggagaacgtgtaccccgagatgagagtgtacaacaacaccctgacctacggcgaggtgagaaacagcaaggccagcgcctactgcctggaccagggcgccgaggacggcgacagagccatcctgtacccctgccacggcatgagcagccagctggtgagatacagcgccgacggcctgctgcagctgggccccctgggcagcaccgccttcctgcccgacagcaagtgcctggtggacgacggcaccggcagaatgcccaccctgaagaagtgcgaggacgtggccagacccacccagagactgtgggacttcacccagagcggccccatcgtgagcagagccaccggcagatgcctggaggtggagatgagcaaggacgccaacttcggcctgagactggtggtgcagagatgcagcggccagaagtggatgatcagaaactggatcaagcacgccagacactag

SEQ ID NO: 43609 - DNA, 1065 bp, Artificial Sequence
  derived and/or modified sequence
atgatcggctgcagcttcgtggtggacagagagtacttcggcgacatcggcctgctggaccccggcatggaggtgtacggcggcgagaacgtggagctgggcatgagagagaccgagggcttccagcaggacaaggtgaactacaagcagaacaagagaggcagaaagaccagacagagagtgaagagaagcagaagcgaggcccacagagcccagcccagccccggcgccacccacggcgcccacagcagagcccccggccccagaaccgagcccaccgccgagccctggggccacgccagacccaccgccgccctgcccgccaccggcgtgtggcagtgcggcggcagcatggaggtgctgccctgcagcagagtggcccacatcgagagaaccagaaagccctacaacaacgacatcgactactacgccaagagaaacgccctgagagccgccgaggtgtggatggacgacttcaagagccacgtgtacatggcctggaacatccccatgagcaaccccggcgtggacttcggcgacgtgagcgagagactggccctgagacagagactgaagtgcagaagcttcaagtggtacctggagaacgtgtaccccgagatgagagtgtacaacaacaccctgacctacggcgaggtgagaaacagcaaggccagcgcctactgcctggaccagggcgccgaggacggcgacagagccatcctgtacccctgccacggcatgagcagccagctggtgagatacagcgccgacggcctgctgcagctgggccccctgggcagcaccgccttcctgcccgacagcaagtgcctggtggacgacggcaccggcagaatgcccaccctgaagaagtgcgaggacgtggccagacccacccagagactgtgggacttcacccagagcggccccatcgtgagcagagccaccggcagatgcctggaggtggagatgagcaaggacgccaacttcggcctgagactggtggtgcagagatgcagcggccagaagtggatgatcagaaactggatcaagcacgccagacactag

SEQ ID NO: 43610 - DNA, 1812 bp, Artificial Sequence
  derived and/or modified sequence
atggcagtggctcgcaagatccgaacacttctgacggtcaatatactggtctttgttggtatagtcctcttcagtgtgtactgccgcctacaagggagatcccaggagctcgttcgtattgtctccggagatcgccgggtccgcagcagacacgcaaaggttggtacactgggtgatagggaggcaattctgcagagactggatcacttggaagaggtggtctataaccagctcaatggactcgctaaaccaattggactggtagagggccccggtggtttagggcaaggtgggctcgcagccaccctgagagatgatggacaggaggcagagggtaagtacgaggaatatggctacaatgcacagttgtcagatcgcatcagtctcgatagaagtattccagattataggcctcggaaatgccgacagatgagttatgcgcaggacctacctcaggtgagtgtcgtgttcatcttcgtcaacgaggctttgagcgtcatcttgagatccgtgcattccgtcgtgaatcataccccatctcagctcctgaaggaagtcatattagtggatgacaattctgataatgttgagttgaagtttaatctggaccagtacgttaataagcgatatccaggactggtaaaaattgtccgaaatagtcggagagagggattaatcagagctagactgcagggatggaaggccgccacagccccggttgtgggctttttcgacgcccacgttgaattcaatactggctgggctgagccagcattgagtcgcatccgggaggaccgtcggaggatcgtcctccccgccatagataacatcaaatactccacttttgaggtccaacaatacgctaatgcggcgcatggttataactggggcttatggtgtatgtacattatcccgcctcaggactggctggatagaggtgatgaatctgcgccaattcggacccctgctatgattggctgcagctttgtcgtcgaccgtgaatactttggcgatattgggttgctggaccccggcatggaagtttatgggggcgagaatgttgaactcggcatgagagtttggcagtgcggagggtcaatggaggtgttgccctgctctagagttgcgcacatcgagcgcacgcgcaaaccttataataatgatattgattactacgctaagaggaacgcactcagggccgccgaggtctggatggatgattttaaatcccatgtttatatggcctggaatatacctatgtccaatcccggtgtggacttcggcgacgtttctgagagattagcattaagacagcggttgaagtgtagaagcttcaagtggtatctggagaatgtgtatcctgaaatgcgggtgtacaacaacacactgacttacggcgaggtgcggaactctaaagcatctgcctactgcctggaccagggagcggaagatggagacagggcaatcctatatccttgtcatgggatgtcttcccagctggtcagatactctgctgatggactgttgcagctcggacctctgggatctactgccttcctgcccgacagcaaatgtctggtggacgacggtacagggcgtatgcccacgttaaaaaagtgcgaggacgtcgcacgcccaacccaaaggctctgggatttcactcagtccggtcctattgtgtctagagctaccgggcggtgtctggaagtcgagatgagtaaggacgcgaattttgggttgcgactggttgttcagagatgtagtggacaaaaatggatgatccggaactggattaaacacgcaaggcactag

SEQ ID NO: 43611 - DNA, 1065 bp, Artificial Sequence
  derived and/or modified sequence
atgatcgggtgctctttcgtggtggatagagaatatttcggcgatatagggctgttggaccctggtatggaggtctacgggggggagaatgtcgaactaggaatgagggagacagaagggttccagcaggataaggtgaactacaagcagaataagcggggtagaaaaactcgccaacgcgtgaagcgctccaggagcgaggcccatcgcgcccagccctccccaggggctacccatggcgcccattctcgtgcccctgggcctagaacagaacccacggccgaaccttggggacatgctaggcctacagccgcgttacctgccactggcgtctggcagtgcggcggctcaatggaggtactaccatgttcccgcgtggcgcatatcgagcgtacacgtaaaccttacaacaatgacattgactactacgctaagcgcaacgcactgcgtgccgcggaagtatggatggatgatttcaagtcccacgtttatatggcatggaacatcccaatgagcaacccgggagtcgactttggcgacgttagtgagcggctggccttgcgacagcggctaaaatgccgttcctttaaatggtatctggagaatgtgtatccagagatgagagtatataacaacacacttacgtatggggaggtccgcaattcaaaagctagtgcttactgtttagaccagggagcagaagatggggatagggccatcctgtatccatgtcacggcatgtcaagtcaactggtgcggtacagtgccgatggtctgctgcagctcggacccctagggtccactgctttccttcccgattctaagtgtttggtggacgacgggacgggcaggatgccaaccctcaaaaagtgcgaggacgtggccagacccacccagagactctgggattttacgcagtctgggcccattgtgagcagggccaccggccgctgtctggaagtcgagatgagcaaggatgcgaacttcggactgcgcctggtcgtccagaggtgttcaggacagaaatggatgatacggaactggattaagcacgccagacactag

SEQ ID NO: 43612 - DNA, 1812 bp, Artificial Sequence
  derived and/or modified sequence
atggctgtcgcacgcaagattaggacattactgacagttaatattttggttttcgtgggcatcgtgctcttctcagtgtactgcaggctacaggggcgctcgcaggaacttgtgcggatagtctctggcgatcgccgggtgcgttcaaggcacgctaaagttggaacactaggagaccgcgaagccatactacaaaggctggaccacctcgaggaggtggtgtataaccagctcaacggactggcgaaaccaatcggattggttgaaggccctggaggcctgggccagggtggtctggcagctaccttacgcgacgacggacaggaagccgagggaaagtacgaggagtacggctataacgcccaactgtcagaccgcataagcctggaccgctctattccagactataggccacgaaagtgcagacagatgagctacgctcaagacctgccgcaagtgtccgtagtcttcatctttgtgaatgaggcgctgagcgtgatactcagatcagtgcattccgtggtgaatcacacacccagccagcttctcaaggaggtcattctggtagatgataattctgacaatgtggagttgaagttcaatttggaccaatacgtcaacaaaagatatccgggcctggtcaaaatcgttcgaaatagccgcagggaggggctgattcgcgccagacttcaagggtggaaggcagcaactgctcccgtggtgggctttttcgacgcccacgtagaatttaacacaggatgggcggagccagccctcagtcgcattagggaggataggcgtaggattgtgctgcccgccattgataacattaagtacagcacctttgaggtccagcagtatgccaacgctgcacacggatacaactgggggctgtggtgcatgtatatcatcccccctcaagattggctggataggggtgacgaatctgccccaatcagaaccccagccatgattggctgtagctttgtagttgaccgcgagtactttggcgatattgggctcctggaccccgggatggaagtttacggcggagagaatgtggaactgggaatgagagtgtggcaatgcggagggtccatggaggttctaccctgctccagggtggctcacatagaaagaaccaggaagccttacaataacgacatcgactactacgcgaagcggaacgccctgagagcagcagaagtgtggatggatgacttcaaaagccacgtgtatatggcgtggaacatccccatgtccaaccccggggttgacttcggcgacgtttctgagaggctcgcgctcaggcagagactgaagtgtagatctttcaagtggtatcttgagaacgtctacccagaaatgagagtgtataataataccctgacatatggggaggtccggaactccaaggcatccgcttattgtcttgatcagggagctgaagatggggacagagccatcctgtacccctgccacggtatgtctagccagctggtccggtacagtgccgacggcctgttacaactcggtcctctgggcagtaccgcgttcctcccagattctaagtgtcttgtggacgacggtacgggccggatgccaactctgaagaagtgcgaggatgtggctagacctacccagcgtctatgggatttcacgcagtccggccctatagtgagcagagccaccggccgatgtttggaagtggagatgtcgaaggacgctaacttcggtctgagactggtggtgcagcgctgcagcggccagaagtggatgataaggaactggatcaagcatgcgagacactag

SEQ ID NO: 43613 - DNA, 1812 bp, Artificial Sequence
  derived and/or modified sequence
atggctgtggccaggaagatccgcaccctgctgactgtgaacatcctggtgtttgtgggcatcgtgctcttctctgtgtactgccgcctgcagggccgcagccaggagctggtgcgcatcgtgtctggggacagaagagtgcgcagcagacatgccaaggtgggcaccctgggggaccgggaggccatcctgcagaggctggaccacctggaggaggtggtgtacaaccagctgaatggcctggccaagcccatcggcctggtggagggccctgggggcctgggccagggcggcctggccgccaccctgagagatgatggccaggaggccgagggcaagtatgaggagtatggctacaatgcccagctgagtgaccgcatcagcctggacaggagcatcccagactaccggcccaggaagtgccggcagatgtcctatgcccaggacctgccccaggtgtctgtggtgttcatctttgtgaatgaggccctgagcgtcatcctgcggtctgtgcacagcgtggtgaaccacacccccagccagctgctgaaggaggtgatcctggtggatgacaacagcgacaacgtggagctgaagttcaacctggaccagtatgtgaacaagcgctacccaggcctggtgaagatcgtgaggaacagcagaagagagggcctcatccgggcccggctgcagggctggaaggccgccacagcccctgtggtgggcttctttgatgcccacgtggagttcaacacaggctgggccgagcccgccctgagccgcatccgggaggacagaagaagaattgtgctgcctgccatcgacaacatcaagtacagcacctttgaggtgcagcagtatgccaatgctgcccacggctacaactggggcctgtggtgcatgtacatcatccccccccaggactggctggacagaggagatgagagcgcccccatccgcaccccagccatgattggctgcagctttgtggtggaccgggagtactttggagacatcggcctgctggaccccggcatggaggtgtatggaggagaaaatgtggagctgggcatgagggtgtggcagtgtggcggctccatggaggtgctgccctgcagccgggtggcccacatcgagaggaccaggaagccctacaacaatgacatcgactactatgccaagagaaatgccctgcgggctgctgaggtgtggatggatgacttcaagagccacgtgtacatggcctggaacatccccatgagcaaccctggggtggactttggagatgtgtctgagcggctggccctgcggcagaggctgaagtgccgctccttcaagtggtacctggagaatgtgtacccagagatgagggtgtacaacaacaccctgacctatggagaggtgaggaacagcaaggccagcgcctactgcctggaccagggcgcagaagatggagaccgggccatcctgtacccctgccacggcatgagcagccagctggtgcgctacagcgcagatggcctgctgcagctgggccccctgggcagcacagccttcctgcctgacagcaagtgcctggtggatgatggcactggaaggatgcccaccctgaagaagtgtgaagatgtggcccggcccacccagaggctgtgggacttcacccagagcggccccatcgtgtcccgggccaccggccgctgcctggaggtggagatgagcaaggatgccaactttggcctgcggctggtggtgcagcgctgcagcggccagaagtggatgatccggaactggatcaagcacgcccggcactag

SEQ ID NO: 43614 - DNA, 1065 bp, Artificial Sequence
  derived and/or modified sequence
atgattggctgcagctttgtggtggaccgggagtactttggagacatcggcctgctggaccccggcatggaggtgtatggaggagaaaatgtggagctgggcatgagggagacagagggcttccagcaggacaaggtgaactacaagcagaacaagaggggcaggaagacccggcagagggtgaagaggagccgctctgaggcccaccgggcccagcccagccctggggccacccatggagcccacagccgggcccctggccccaggacagagcccacagctgagccctggggccacgcccggcccacagctgccctgcctgccactggagtgtggcagtgtggcggctccatggaggtgctgccctgcagccgggtggcccacattgaaagaaccaggaagccctacaacaatgacatcgactactatgccaagagaaatgccctgcgggctgctgaggtgtggatggatgacttcaagagccacgtgtacatggcctggaacatccccatgagcaaccctggggtggactttggagatgtgtctgagcggctggccctgcggcagaggctgaagtgccgctccttcaagtggtacctggagaatgtgtacccagagatgagggtgtacaacaacaccctgacctacggggaggtgaggaacagcaaggccagcgcctactgcctggaccagggcgcagaagatggagaccgggccatcctgtacccctgccacggcatgagcagccagctggtgcgctacagcgcagatggcctgctgcagctgggccccctgggcagcacagccttcctgcctgacagcaagtgcctggtggatgatggcaccggccgcatgcccaccctgaagaagtgtgaagatgtggcccggcccacccagaggctgtgggacttcacccagagcggccccatcgtgtcccgggccaccggccgctgcctggaggtggagatgagcaaggatgccaactttggcctgcggctggtggtgcagcgctgcagcggccagaagtggatgatccggaactggatcaagcacgcccggcactag

SEQ ID NO: 43615 - DNA, 1812 bp, Artificial Sequence
  derived and/or modified sequence
atggccgtggcccggaagatccggaccctgctgaccgtgaacatcctggtcttcgtaggcattgtcctcttctcagtttactgtcgactgcaggggcgatcccaggagttggtcaggattgtctcgggggataggagagtgcggagcagacatgccaaggtcggcaccctgggagatcgagaggctattctgcaaagactggaccacttggaagaggtggtgtataaccagctcaacggcttagctaagccaataggactggtggaaggtcctggcgggctgggccaggggggtcttgcagctacacttagggatgatgggcaggaggccgaaggtaagtatgaggaatacggctacaacgcccagctctctgacagaatctcattggacagatcaatcccggattaccggccgcgcaagtgtcgacaaatgtcatatgcccaggacttaccccaggtctctgttgtttttatctttgtgaacgaagcgctcagtgtcatcctccgatcagtgcattctgttgtgaaccacactccttcacagctgcttaaagaagtgatcctagtagacgataattccgacaacgtggaactgaagtttaacctggaccagtacgttaacaaacgttatccaggtctggtgaagattgttaggaactctaggagggaggggctcatccgcgctcgcttgcaggggtggaaagcagccactgctcctgttgttgggttttttgacgctcacgtggaattcaataccggatgggccgagcctgcgctcagtcgtattagggaggaccggagaaggattgtgctccctgcaattgacaatattaaatacagtaccttcgaggtccaacagtatgcaaacgcagcacatggctataattggggactttggtgtatgtatattataccaccacaggattggcttgaccgcggcgatgagtctgctccaatccgtacgcccgcaatgattggctgttccttcgttgtggaccgcgaatacttcggagatattggactgcttgatcctggcatggaagtgtatgggggagagaatgtagaactaggcatgagggtgtggcaatgcggaggctcaatggaggttcttccatgtagtcgcgtggcacacatcgagaggactcgtaaaccctacaacaatgacattgattactacgccaagagaaatgccctgcgagccgctgaggtgtggatggacgacttcaaaagccacgtttatatggcttggaatatccctatgagcaacccgggcgtggattttggagacgtaagtgaacgtctcgccttgaggcagcggctcaaatgcagaagctttaagtggtacctagagaatgtgtatcctgaaatgcgcgtttataataatactctcacatatggtgaggttaggaattccaaggccagtgcctattgtttggaccagggcgccgaagatggggatagggcgattctctacccctgccatggaatgagctcccagttggttcgctatagcgctgatgggctgttacagttgggtcctttgggttccactgctttccttcccgactccaagtgtctggtggatgatggaacgggtcgtatgcctacgctgaagaaatgtgaggacgtggccaggccgacccagcgactctgggatttcactcagtccggacctatagtgagcagggctactggtagatgccttgaggtggagatgagcaaggatgccaatttcgggctacgcctggttgtgcaacggtgctccggtcagaagtggatgatacgaaactggatcaagcacgctcggcattag

SEQ ID NO: 43616 - DNA, 1065 bp, Artificial Sequence
  derived and/or modified sequence
atgatcggctgcagcttcgtggtggaccgggagtacttcggcgacattgggctgttggaccccgggatggaagtgtacgggggagagaacgttgaactcggtatgcgcgagactgagggattccagcaagacaaagttaattacaagcagaataagcgggggagaaaaacgaggcagagggttaagaggtctcgcagtgaggcacatcgagcccagccctctcctggagctacacatggagcgcactctagggctccgggtccaagaactgaacccaccgccgagccttggggtcacgcccgccccacagctgcactccctgcgaccggggtttggcagtgtggcggttcaatggaagtgctcccatgtagtcgggtggcgcatatcgagaggacaagaaagccatataacaatgacatcgactattacgcaaagcgcaatgctcttagggctgccgaggtgtggatggacgacttcaaaagccacgtgtacatggcctggaacatccctatgagcaaccctggggttgattttggggatgtgtccgagaggctggcactcagacagcgactgaagtgccggagctttaaatggtacctggaaaacgtctatccagagatgcgggtgtataataacaccttgacttatggtgaggtgaggaattccaaagcctctgcttactgcctcgatcagggagccgaggatggcgacagagccatcttgtatccgtgccatggcatgagctcgcagctggtgaggtatagcgcagatggcttgcttcagttagggccacttggaagcactgcattcctgcccgacagcaagtgcctggtcgacgatggaacaggcagaatgccgacattaaaaaaatgcgaagacgtagctcggccaacgcagcggctgtgggactttacacagtccgggccgattgtgtcccgggccacaggacggtgtctcgaagtcgagatgagcaaggacgccaacttcgggctcagactcgtagtgcaaagatgtagcgggcaaaagtggatgatccgtaattggatcaaacacgcacgtcactag

SEQ ID NO: 43617 - DNA, 1812 bp, Artificial Sequence
  derived and/or modified sequence
atggccgtggcccggaagatccggaccctgctgaccgtgaacatcctcgttttcgtggggatcgtactgttcagcgtgtattgtaggcttcaaggccgatcacaggagttagtccgaattgtgtccggtgatagacgggtgcggagccggcacgccaaggtgggtacgcttggcgatcgcgaagccatcctccagcgtctcgatcatttggaagaggttgtgtacaaccaattgaacggattggcaaagcccataggtctggtcgagggacccggagggctgggccagggtggtcttgcagccacgttgcgggacgacgggcaggaagcggagggaaagtatgaggaatatggctacaacgctcagttgtccgatagaataagtctggacaggtcgatccccgactaccgcccacgcaaatgtcggcagatgagttatgcgcaagacctaccacaggtctccgttgtcttcatctttgtcaacgaggcgctctccgttattctaagaagcgtgcactccgtggttaaccacactcctagccagttgttaaaggaagtgatattagtggacgataactctgacaacgtggagctcaaattcaatctagatcagtacgtgaacaaacgctacccaggcctggtcaaaatagtgcgaaattcgaggcgcgaaggtttaatccgcgctcgactacaggggtggaaggcagcaacggcccctgttgtcgggttcttcgacgctcacgttgaatttaatactggatgggccgaacctgccttgtcccgtattcgagaagaccggagaaggatcgtgcttcctgctatcgacaatatcaaatacagcacattcgaggttcaacaatatgctaacgcggctcacggttacaactggggtctgtggtgcatgtacattattcccccccaagactggttggacagaggagacgagtcggcaccaattagaaccccagcaatgatcggttgctccttcgtggtcgacagagaatactttggcgacataggtcttctcgacccaggaatggaggtgtacggaggcgaaaatgttgagctgggaatgagagtatggcagtgcggggggtccatggaggtgctgccatgctctcgagtggcacacattgagcgtacaaggaagccctacaacaacgatatcgattattacgcaaagaggaatgcccttagagccgctgaagtctggatggatgatttcaaaagtcatgtttacatggcgtggaacatccctatgtcaaatcccggggtggactttggagatgtgtcagagagactggctctgcggcaacgcctcaaatgcaggagttttaagtggtatctcgaaaacgtctacccagagatgagggtgtacaacaacacactgacatacggagaggtccggaatagcaaagctagcgcctattgtttggatcagggcgcggaagacggggatcgggcaatactgtacccctgccacggaatgtcatctcagctggtgcggtacagtgcagatggactccttcagctcggcccactgggcagtaccgcctttctgccagattctaagtgtctcgttgacgatggcaccggcaggatgccgaccctcaagaagtgtgaagatgtggcccgaccaacacagaggctgtgggattttactcagtctggccccattgtgtccagggctacgggacgctgtttggaggtagaaatgagcaaggacgccaactttgggctgagactggtagtgcagaggtgctctggtcagaagtggatgattcgcaattggattaaacacgcccggcattag

SEQ ID NO: 43618 - DNA, 1812 bp, Artificial Sequence
  derived and/or modified sequence
atggccgtggcgaggaaaattcggactctgctgacggtaaatatcctcgtttttgtggggatcgtgctcttctctgtgtactgtcggctgcaaggacgtagccaggagctcgtgagaatcgtgagtggagatcgacgggtccgaagtaggcacgctaaagtgggcacactgggagatcgggaggcgatcctacagagactggaccacttggaagaagtggtgtataaccagctcaatggcttagccaagccaatcggactggtggagggcccaggcggactcggacaaggcggactggccgctacgcttagggatgacggccaggaggcagaagggaagtatgaggagtacggttacaatgctcagctgtccgaccgcatttccctcgataggagtataccagattatcgccctcgcaagtgtcggcagatgtcatacgcccaggatctcccgcaagtctctgttgtcttcatctttgtcaacgaggcactgagcgtgattttgcgttctgtgcattctgtggtgaatcacacgccttctcagctgcttaaagaggttatattggtggatgacaacagtgacaacgtggaattgaaattcaacctggatcagtacgtgaataaacgttaccctgggttggtgaaaattgtccggaatagcagaagggagggtctcattagggccagattgcagggttggaaagccgctaccgcacctgtcgtcggcttcttcgatgctcatgtggagtttaatacaggctgggcagagccagcattatcaaggataagagaggataggcgtcggatcgtcctgccagctatcgacaatattaaatactctactttcgaggtccagcagtacgctaatgcggctcatgggtacaattggggcttatggtgcatgtatattattccgccacaagattggttagatagaggcgatgagagcgctccaatcaggacccccgctatgattgggtgctcgttcgttgtagacagagaatattttggcgacatcgggctgctggatcccggaatggaggtttatgggggagaaaatgttgagttgggtatgcgggtatggcagtgcggagggtccatggaagtgctaccctgctctagagttgcccacattgaaagaacacgcaaaccttacaataacgatatcgattattatgcaaaacggaatgccttaagggccgcagaagtgtggatggacgactttaaaagtcacgtgtatatggcctggaacattcccatgtccaaccctggcgtcgattttggggacgtaagtgagcgtttagccttgcgtcagcgacttaaatgtagatcttttaaatggtatcttgagaacgtgtacccagaaatgcgagtatataacaacacgttgacgtatggggaggtgcgaaacagcaaggcctccgcctattgcctggatcagggagcggaggacggcgatcgggctatcctatacccttgccacggaatgagctcccaactagtacgatacagtgctgacgggctgctgcagctgggtcctctaggttccaccgcctttttacctgatagtaagtgccttgtggacgacgggacagggagaatgcctactctcaagaaatgtgaagacgtggcgaggccgactcagaggctttgggacttcactcagagcggacctatcgtgtccagagcaacgggcaggtgtctggaagttgagatgagcaaagatgcaaatttcggacttcggctcgttgtccaacgctgttccggacaaaagtggatgataaggaactggatcaaacatgctcgccattag

SEQ ID NO: 43619 - DNA, 1065 bp, Artificial Sequence
  derived and/or modified sequence
atgataggatgcagcttcgtggtggatcgggagtattttggcgatattgggctccttgacccagggatggaagtctatggtggcgaaaacgtggagctcggtatgagggaaacggaaggcttccagcaggataaggtgaattacaaacagaataagcggggaaggaaaacgagacagcgcgttaagcgctccaggtcagaggcccaccgcgcacagccctcccccggagcaacacacggtgcacattctagagcacctggacctcgaaccgagcctacagcagagccgtgggggcacgcacggccaacggctgcgctgccagccaccggagtgtggcagtgtggcggttccatggaagtcctcccgtgtagcagggttgcgcacatcgagcgaacacgaaagccctacaataacgacattgactactacgcaaagagaaatgcgctgagggccgctgaggtgtggatggacgatttcaaatctcatgtgtatatggcttggaatatccccatgtccaaccctggggtcgatttcggcgacgtttccgagaggctagccctacgccagaggctcaaatgcagatcattcaagtggtaccttgagaatgtttatccagaaatgcgcgtttacaataacactttgacttatggcgaggtcaggaattcgaaggcctcagcttattgcttggatcagggggcagaagatggcgacagagcgatcttgtatccatgtcacggaatgagctcccaacttgtccgctatagcgccgatggcctgctccagctcggacccctggggtccacagcctttctccctgactctaaatgtctggtggacgacggcaccggcaggatgccaacactgaaaaaatgcgaagatgtagctaggccaacgcaacggttgtgggacttcacacagtccggaccaatcgtgtccagagccaccggacggtgcttggaagtggaaatgagtaaggatgctaactttggattacgcctggtggtgcagcggtgttctggacaaaaatggatgatacggaactggatcaaacacgcacgacactag

SEQ ID NO: 43620 - DNA, 1812 bp, Artificial Sequence
  derived and/or modified sequence
atggccgtcgctcgcaaaattcgcaccctacttactgtcaacattcttgtcttcgtgggcatagttctgttcagcgtttactgccgacttcagggccgttcacaagaattagtgagaattgtttccggagaccgcagggtgaggagcagacacgctaaagtcggcacccttggtgacagggaagcaattttacaaaggctcgatcacctggaagaggtggtgtacaaccaactcaatggcctcgccaaacccattggcctggtcgaaggacctgggggactgggccagggcggattagccgcaactctgcgggacgatggccaggaagccgagggaaaatatgaggagtacggctataacgcgcaacttagcgaccgcatatccttggataggagcattcccgattaccgacccagaaagtgtcggcaaatgagctacgcgcaggacctcccacaggtgtctgtggtgtttatattcgtcaacgaagccctgtctgttattttgcgatccgtacactccgttgtcaatcataccccatcccaactgctcaaggaagtcattctggtcgatgataatagtgataacgtggagctcaaattcaaccttgaccagtatgtcaataagcggtaccctggccttgtgaaaatcgttcggaacagccggagagaaggccttattcgtgcaagactgcaggggtggaaagccgctacggccccagttgtcggattttttgatgcccatgtagagttcaacacaggttgggctgagcccgctctctcacgcatccgcgaggatcgtaggcgtatcgtacttcccgctattgataacattaaatacagtactttcgaggttcagcagtacgccaacgctgcacacggatacaactggggcctctggtgtatgtacattatccctccccaggattggcttgacaggggggacgaaagcgcacccatccgaacgcctgcgatgattggctgttccttcgtcgtggatcgggaatacttcggggatatagggctcttggatccaggcatggaagtgtacggcggagagaatgtcgagcttgggatgagagtctggcagtgcgggggtagcatggaggtcctgccttgttcccgtgtggcccacattgaacgtactagaaagccgtataataatgacatcgactattacgctaagcgcaacgctctgcgcgcagccgaggtttggatggacgactttaaatcccatgtttacatggcttggaacatacctatgagtaatccaggagtcgactttggagatgttagcgagagactggccttgcgccagagactcaaatgtagaagcttcaaatggtatctcgagaatgtgtatccagagatgcgtgtgtacaacaatactttgacgtacggcgaggtacgcaacagcaaagcttccgcctactgtctggaccaaggcgcagaggacggagaccgcgcaatcttgtacccatgccatggtatgtccagccagctggtgcgctactcagctgatggtctgctccaactcgggcctctcgggagcacagcattccttccggactccaagtgtctcgtggacgatggaacagggcgtatgcccacactaaaaaaatgcgaggatgtggccaggcctactcagcgactttgggattttacccagtcaggacctatcgtgtctcgcgctacgggcaggtgcctggaagtggagatgagtaaagatgccaactttggacttcggctggtcgttcagaggtgttcaggccagaagtggatgattcggaactggatcaaacatgcgaggcactag

SEQ ID NO: 43621 - DNA, 2410 bp, Artificial Sequence
  derived and/or modified sequence
atggcggtggccaggaagatccgaactttgctgacggtgaacatcctggtgttcgtgggcatcgtcctgttctccgtgtactgccgcctgcagggccgctcccaggagctcgtgcgcatcgtgagcggcgaccgccgggtgcgcagccgacacgccaaggtgggcacgctgggggaccgtgaggccatcctgcagcgcctggaccacctggaggaggtggtctacaaccagctcaacggccttgccaagcccatcggcctggtggaggggccaggaggcctgggccagggtggcttggcggccaccctgcgtgatgacggccaggaggcggaaggcaagtatgaggagtacggctacaacgctcagctcagcgaccgcatctccctcgatcggagcatccccgactaccggcccagaaagtgcagacagatgagctacgcccaggacctgccccaggtctccgtggtcttcatcttcgtcaatgaggcgctgtcggtcatcctgcgctccgtgcacagcgtggtcaaccacacgccctcccagctcctcaaggaggtcatcctggtggacgacaacagtgacaacgtggaactcaagttcaatctggaccagtacgtcaacaagcggtacccaggcctcgtgaagattgtccgcaacagccggcgggaaggactgatccgcgcgcggctgcagggctggaaggcggccaccgccccagtcgtcggcttctttgatgcccacgtcgagttcaacacgggctgggccgagcccgcactgtcgcggatccgagaggaccggcgtcgcatcgtgctgccagccatcgacaacatcaagtacagcacgtttgaggtgcagcagtatgcgaacgccgcccatggctacaactggggcctctggtgcatgtacatcatccccccgcaggactggctggaccgcggcgacgagtcagcacccatcaggaccccagccatgatcggctgctccttcgtagtggaccgcgagtacttcggagacattgggctgctggaccccggcatggaggtgtatggcggcgagaacgtagaactgggcatgagggtgtggcagtgtggcggcagcatggaggtgctgccctgctcccgcgtggcccacatcgagcgcaccaggaagccctacaacaacgacattgactactatgccaagcgcaacgccctgcgcgccgccgaggtgtggatggatgacttcaagtcccacgtgtacatggcctggaacatccccatgtcgaacccaggggtggacttcggggacgtgtctgagaggctggccctgcgtcagaggctgaagtgtcgcagcttcaagtggtacctggagaacgtgtacccggagatgagggtctacaacaacaccctcacgtacggagaggtgagaaacagcaaagccagtgcctactgtctggaccagggagcggaggacggcgaccgggcgatcctctacccctgccacgggatgtcctcccagctggtgcggtacagcgctgatggactgctgcagctggggcctctgggctccacagccttcttgcctgactccaagtgtctggtggatgacggcacgggccgcatgcccaccctgaagaagtgtgaggatgtggcgcggccaacacagcggctgtgggacttcacccagagtggccccattgtgagccgggccacgggccgctgcctggaggtggagatgtccaaagatgccaactttgggctccggctggtggtacagaggtgctcggggcagaagtggatgatcagaaactggatcaaacacgcacggcactgaccccacctccgcccggacccccacagacctcgggaaggcgctgggccgagccagtgtggctgagtgaccggggtgtgcccggcagacacagcaggacagggctctatgtgcggccaggacagcagaggctgaggggccggggtgtggctgagtgaccagggtgtcacccactgcatctggagtacagcttctcctaggacaggcggctctacccgagggagggcgtctggggacagtgatgccaactcaaacacgtgccttctccacggtatctcctggccaggctgctgggacagccgccgcctctgcatgtaccacagccccccacgccccatagggaggccaagccccggaccatgcaccaggctgcaccctggtgtcttccacccgcaggcctcccatgctccaagcagcctcccccagcacttgcggccgctcagccctccaaccaagacctaagtcacacatcataatgcagctccttgtggtctggtaagaggggtgctggaggacatggacagcgacaaacctgaggccgtgtctaggaggctggcacgactgcttcagcagagaccaaataaagagaggattaggcagc

SEQ ID NO: 43622 - DNA, 1720 bp, Artificial Sequence
  derived and/or modified sequence
ggcgcttctgaagacgggtgggcagacgatggaggacgaggctctgtcccgcccctgcagagcttccttcgttccggccccttccagcgaagggcagggctccgagcagagacaacagacagaaacccagaaaccacctgccacgatgtgaacctgatgcagaaacgcggttcgctccctcgggatgcaaaggccaacttcagcctggcacggcggcgccgcggactccaccatcccggggaaggagccggacccctgtgtggcagtgtggcggcagcatggaggtgctgccctgctcccgcgtggcccacatcgagcgcaccaggaagccctacaacaacgacattgactactatgccaagcgcaacgccctgcgcgccgccgaggtgtggatggatgacttcaagtcccacgtgtacatggcctggaacatccccatgtcgaacccaggggtggacttcggggacgtgtctgagaggctggccctgcgtcagaggctgaagtgtcgcagcttcaagtggtacctggagaacgtgtacccggagatgagggtctacaacaacaccctcacgtacggagaggtgagaaacagcaaagccagtgcctactgtctggaccagggagcggaggacggcgaccgggcgatcctctacccctgccacgggatgtcctcccagctggtgcggtacagcgctgatggactgctgcagctggggcctctgggctccacagccttcttgcctgactccaagtgtctggtggatgacggcacgggccgcatgcccaccctgaagaagtgtgaggatgtggcgcggccaacacagcggctgtgggacttcacccagagtggccccattgtgagccgggccacgggccgctgcctggaggtggagatgtccaaagatgccaactttgggctccggctggtggtacagaggtgctcggggcagaagtggatgatcagaaactggatcaaacacgcacggcactgaccccacctccgcccggacccccacagacctcgggaaggcgctgggccgagccagtgtggctgagtgaccggggtgtgcccggcagacacagcaggacagggctctatgtgcggccaggacagcagaggctgaggggccggggtgtggctgagtgaccagggtgtcacccactgcatctggagtacagcttctcctaggacaggcggctctacccgagggagggcgtctggggacagtgatgccaactcaaacacgtgccttctccacggtatctcctggccaggctgctgggacagccgccgcctctgcatgtaccacagccccccacgccccatagggaggccaagccccggaccatgcaccaggctgcaccctggtgtcttccacccgcaggcctcccatgctccaagcagcctcccccagcacttgcggccgctcagccctccaaccaagacctaagtcacacatcataatgcagctccttgtggtctggtaagaggggtgctggaggacatggacagcgacaaacctgaggccgtgtctaggaggctggcacgactgcttcagcagagaccaaataaagagaggattaggcagcagcactgtgtgtgtcttcctgggagccgagctgggggttggggcccggtcccacctctttcccaggcacctgggccctgccgcagcccagccccttgcctgttttaataaatacagttttattggcgccc

SEQ ID NO: 43623 - DNA, 1727 bp, Artificial Sequence
  derived and/or modified sequence
catcatccccccgcaggactggctggaccgcggcgacgagtcagcacccatcaggaccccagccatgatcggctgctccttcgtagtggaccgcgagtacttcggagacattgggctgctggaccccggcatggaggtgtatggcggcgagaacgtagaactgggcatgagggaaacagaagggttccagcaagataaggtaaattataaacagaataaaagaggaagaaaaacacggcagagagtgaagaggagcaggtccgaggcccatagagcacagccgagccccggggccacgcacggagcccacagccgagccccggggccacgcacggagcccacagctgagccctggggccacgccaggcccacagcagcactgccagcgactggagtgtggcagtgtggcggcagcatggaggtgctgccctgctcccgcgtggcccacatcgagcgcaccaggaagccctacaacaacgacattgactactatgccaagcgcaacgccctgcgcgccgccgaggtgtggatggatgacttcaagtcccacgtgtacatggcctggaacatccccatgtcgaacccaggggtggacttcggggacgtgtctgagaggctggccctgcgtcagaggctgaagtgtcgcagcttcaagtggtacctggagaacgtgtacccggagatgagggtctacaacaacaccctcacgtacggagaggtgagaaacagcaaagccagtgcctactgtctggaccagggagcggaggacggcgaccgggcgatcctctacccctgccacgggatgtcctcccagctggtgcggtacagcgctgatggactgctgcagctggggcctctgggctccacagccttcttgcctgactccaagtgtctggtggatgacggcacgggccgcatgcccaccctgaagaagtgtgaggatgtggcgcggccaacacagcggctgtgggacttcacccagagtggccccattgtgagccgggccacgggccgctgcctggaggtggagatgtccaaagatgccaactttgggctccggctggtggtacagaggtgctcggggcagaagtggatgatcagaaactggatcaaacacgcacggcactgaccccacctccgcccggacccccacagacctcgggaaggcgctgggccgagccagtgtggctgagtgaccggggtgtgcccggcagacacagcaggacagggctctatgtgcggccaggacagcagaggctgaggggccggggtgtggctgagtgaccagggtgtcacccactgcatctggagtacagcttctcctaggacaggcggctctacccgagggagggcgtctggggacagtgatgccaactcaaacacgtgccttctccacggtatctcctggccaggctgctgggacagccgccgcctctgcatgtaccacagccccccacgccccatagggaggccaagccccggaccatgcaccaggctgcaccctggtgtcttccacccgcaggcctcccatgctccaagcagcctcccccagcacttgcggccgctcagccctccaaccaagacctaagtcacacatcataatgcagctccttgtggtctggtaagaggggtgctggaggacatggacagcgacaaacctgaggccgtgtctaggaggctggcacgactgcttcagcagagaccaaataaagagaggattaggcagc

SEQ ID NO: 43624 - DNA, 897 bp, Artificial Sequence
  derived and/or modified sequence
gtgttccccagcgtgaggcccgaggacaggattctgtggtgggtggggggaccgagtcaccgtggcctctgtactgggggtagacaaggaggctgaaactgctggaggtcgtcccagaggccagtgtgccaggcgcttctgaagacgggtgggcagacgatggaggacgaggctctgtcccgcccctgcagagcttccttcgttccggccccttccagcgaagggcagggctccgagcagagacaacagacagaaacccagaaaccacctgccacgatgtgaacctgatgcagaaacgcggttcgctccctcgggatgcaaaggccaacttcagcctggcacggcggcgccgcggactccaccatcccggggaaggagccggacccctgtgggtgacgtgggactgtggggcgggggtgtccccggctgggctgagctgagcagcgaggaggctctgggttgccggaccggggtcagggagcctggcgttagctgcgtgctgtgtggtcatctcggcgaggagggagcggctccctcctgccccggactctggatctgtcctgcggtgggcggtgtcggagcagccgtgtggcagtgtggcggcagcatggaggtgctgccctgctcccgcgtggcccacatcgagcgcaccaggaagccctacaacaacgacattgactactatgccaagcgcaacgccctgcgcgccgccgaggtgtggatggatgacttcaagtcccacgtgtacatggcctggaacatccccatgtcgaacccaggggtggacttcggggacgtgtctgagaggctggccctgcgtcagaggctgaagtgtcgcagcttcaagtggtacctggagaacgtgtacccggagatgagggtctacaacaacaccct

SEQ ID NO: 43625 - DNA, 1001 bp, Artificial Sequence
  derived and/or modified sequence
cctagtctggaaggcagaaaggaagccccggctcagggggctggaaaaccccaggcttttctcaggcaggttgtcccacagcagagacaacagacagaaacccagaaaccacctgccacgatgtgaacctgatgcagaaacgcggttcgctccctcgggatgcaaaggccaacttcagcctggcacggcggcgccgcggactccaccatcccggggaaggagccggacccctgtgtggcagtgtggcggcagcatggaggtgctgccctgctcccgcgtggcccacatcgagcgcaccaggaagccctacaacaacgacattgactactatgccaagcgcaacgccctgcgcgccgccgaggtgtggatggatgacttcaagtcccacgtgtacatggcctggaacatccccatgtcgaacccaggggtggacttcggggacgtgtctgagaggctggccctgcgtcagaggctgaagtgtcgcagcttcaagtggtacctggagaacgtgtacccggagatgagggtctacaacaacaccctcacgtacggagaggtgagaaacagcaaagccagtgcctactgtctggaccagggagcggaggacggcgaccgggcgatcctctacccctgccacgggatgtcctcccagctggtgcggtacagcgctgatggactgctgcagctggggcctctgggctccacagccttcttgcctgactccaagtgtctggtggatgacggcacgggccgcatgcccaccctgaagaagtgtgaggatgtggcgcggccaacacagcggctgtgggacttcacccagagtggccccattgtgagccgggccacgggccgctgcctggaggtggagatgtccaaagatgccaactttgggctccggctggtggtacagaggtgctcggggcagaagtggatgatcagaaactggatcaaacacgcacggcactgaccccacctccgcccggacccccacagacctcggg

SEQ ID NO: 43626 - DNA, 624 bp, Artificial Sequence
  derived and/or modified sequence
aaatcccgaccctagtctggaaggcagaaaggaagccccggctcagggggctggaaaaccccaggcttttctcaggcaggttgtcccacagcagagacaacagacagaaacccagaaaccacctgccacgatgtgaacctgatgcagaaacgcggttcgctccctcgggatgcaaaggccaacttcagcctggcacggcggcgccgcggactccaccatcccggggaaggagccggacccctgtgggtgacgtgggactgtggggcgggggtgtccccggctgggctgagctgagcagcgaggaggctctgggttgccggaccggggtcagggagcctggcgttagctgcgtgctgtgtggtcatctcggcgaggagggagcggctccctcctgccccggactctggatctgtcctgcggtgggcggtgtcggagcagccgtgtggcagtgtggcggcagcatggaggtgctgccctgctcccgcgtggcccacatcgagcgcaccaggaagccctacaacaacgacattgactactatgccaagcgcaacgccctgcgcgccgccgaggtgtggatggatgacttcaagtcccacgtgtacatggcctggaacatccccatgt

SEQ ID NO: 43627 - protein, 827 aa, Artificial Sequence
  derived and/or modified sequence
MAHEREILKGMYEELKEKSHKPDVELIQHRAWRIDMVSTELESFRKASYIESGPEEFYQRFKKCFSATHIFISIKGKDSQNTAHGYLILNRTLHQQLKIKNPFLAPSSEAVRIPATLPHPGALPFPPYVAKASSDELLNLQKPLQSALGFVILRSSQNWNSKNRQRWSRTKAGQMSHGLQMAGPQETVLALPLREGVQAAATVPILLYNLEDGLSDHPLDQGPRCPARRPCSPASAPAPTSPKKPKIQAPGETFPTDWSPPPVEFLNPRVLQASREAPAQRWVGVVGPQGLRRLAGELPEELEQEHLDLDPKRGLALPEKLFWNTSGLSQQAAAPEFSWGGSGSYFNNLDYLLQEKREQALEQERERLLLQECLNLNSLDLDEEEVPLTPEHRMLVEKYSVSLQTIPPVHPGETVFLPRCHPLPCILDSSLLKPRSHLEGLFLSSPPAQQLSFLRSGLLNILYLHMPDCPVSLLQWLFQLLTWPPETSLGAFGLLWDLIVDGIFLQPDEDKHLWCPSLQEVREAFHSLGAHSPALYPLGPFWHGGRVLPGEAGLNENEEQDAPQEIALDISLGHIYKFLALCAQAQPGAYTDENLMGLIELLCRTSLDVGLRLLPKVDLQQLLLLLLENIREWPGKLQELCCTLSWVSDHHHNLLALVQFFPDMTSRSRRLRSQLSLVVIARMLGQQEMLPLWQEKTQLSSLSRLLGLMRPSSLRQYLDSVPLPPCQEQQPKASAELDHKACYLCHSLLMLAGVVVSCQDITPDQWGELQLLCMQLDRHISTQIRESPQAMHRTMLKDLATQTYIRWQELLTHCQPQAQYFSPWKDI

SEQ ID NO: 43628 - protein, 679 aa, Artificial Sequence
  derived and/or modified sequence
MWPRLPGAGLAPQLRRQDQRLHFTGQMSHGLQMAGPQETVLALPLREGVQAAATVPILLYNLEDGLSDHPLDQGPRCPARRPCSPASAPAPTSPKKPKIQAPGETFPTDWSPPPVEFLNPRVLQASREAPAQRWVGVVGPQGLRRLAGELPEELEQEHLDLDPKRGLALPEKLFWNTSGLSQQAAAPEFSWGGSGSYFNNLDYLLQEKREQALEQERERLLLQECLNLNSLDLDEEEVPLTPEHRMLVEKYSVSLQTIPPVHPGETVFLPRCHPLPCILDSSLLKPRSHLEGLFLSSPPAQQLSFLRSGLLNILYLHMPDCPVSLLQWLFQLLTWPPETSLGAFGLLWDLIVDGIFLQPDEDKHLWCPSLQEVREAFHSLGAHSPALYPLGPFWHGGRVLPGEAGLNENEEQDAPQEIALDISLGHIYKFLALCAQAQPGAYTDENLMGLIELLCRTSLDVGLRLLPKVDLQQLLLLLLENIREWPGKLQELCCTLSWVSDHHHNLLALVQFFPDMTSRSRRLRSQLSLVVIARMLGQQEMLPLWQEKTQLSSLSRLLGLMRPSSLRQYLDSVPLPPCQEQQPKASAELDHKACYLCHSLLMLAGVVVSCQDITPDQWGELQLLCMQLDRHISTQIRESPQAMHRTMLKDLATQTYIRWQELLTHCQPQAQYFSPWKDI

SEQ ID NO: 43629 - DNA, 1944 bp, Artificial Sequence
  derived and/or modified sequence
atggccggcccccaggagaccgtgctggccctgcccctgagagagggcgtgcaggccgccgccaccgtgcccatcctgctgtacaacctggaggacggcctgagcgaccaccccctggaccagggccccagatgccccgccagaagaccctgcagccccgccagcgcccccgcccccaccagccccaagaagcccaagatccaggcccccggcgagaccttccccaccgactggagccccccccccgtggagttcctgaaccccagagtgctgcaggccagcagagaggcccccgcccagagatgggtgggcgtggtgggcccccagggcctgagaagactggccggcgagctgcccgaggagctggagcaggagcacctggacctggaccccaagagaggcctggccctgcccgagaagctgttctggaacaccagcggcctgagccagcaggccgccgcccccgagttcagctggggcggcagcggcagctacttcaacaacctggactacctgctgcaggagaagagagagcaggccctggagcaggagagagagagactgctgctgcaggagtgcctgaacctgaacagcctggacctggacgaggaggaggtgcccctgacccccgagcacagaatgctggtggagaagtacagcgtgagcctgcagaccatcccccccgtgcaccccggcgagaccgtgttcctgcccagatgccaccccctgccctgcatcctggacagcagcctgctgaagcccagaagccacctggagggcctgttcctgagcagcccccccgcccagcagctgagcttcctgagaagcggcctgctgaacatcctgtacctgcacatgcccgactgccccgtgagcctgctgcagtggctgttccagctgctgacctggccccccgagaccagcctgggcgccttcggcctgctgtgggacctgatcgtggacggcatcttcctgcagcccgacgaggacaagcacctgtggtgccccagcctgcaggaggtgagagaggccttccacagcctgggcgcccacagccccgccctgtaccccctgggccccttctggcacggcggcagagtgctgcccggcgaggccggcctgaacgagaacgaggagcaggacgccccccaggagatcgccctggacatcagcctgggccacatctacaagttcctggccctgtgcgcccaggcccagcccggcgcctacaccgacgagaacctgatgggcctgatcgagctgctgtgcagaaccagcctggacgtgggcctgagactgctgcccaaggtggacctgcagcagctgctgctgctgctgctggagaacatcagagagtggcccggcaagctgcaggagctgtgctgcaccctgagctgggtgagcgaccaccaccacaacctgctggccctggtgcagttcttccccgacatgaccagcagaagcagaagactgagaagccagctgagcctggtggtgatcgccagaatgctgggccagcaggagatgctgcccctgtggcaggagaagacccagctgagcagcctgagcagactgctgggcctgatgagacccagcagcctgagacagtacctggacagcgtgcccctgcccccctgccaggagcagcagcccaaggccagcgccgagctggaccacaaggcctgctacctgtgccacagcctgctgatgctggccggcgtggtggtgagctgccaggacatcacccccgaccagtggggcgagctgcagctgctgtgcatgcagctggacagacacatcagcacccagatcagagagagcccccaggccatgcacagaaccatgctgaaggacctggccacccagacctacatcagatggcaggagctgctgacccactgccagccccaggcccagtacttcagcccctggaaggacatctag

SEQ ID NO: 43630 - DNA, 2484 bp, Artificial Sequence
  derived and/or modified sequence
atggcccacgagagagagatcctgaagggcatgtacgaggagctgaaggagaagagccacaagcccgacgtggagctgatccagcacagagcctggagaatcgacatggtgagcaccgagctggagagcttcagaaaggccagctacatcgagagcggccccgaggagttctaccagagattcaagaagtgcttcagcgccacccacatcttcatcagcatcaagggcaaggacagccagaacaccgcccacggctacctgatcctgaacagaaccctgcaccagcagctgaagatcaagaaccccttcctggcccccagcagcgaggccgtgagaatccccgccaccctgccccaccccggcgccctgcccttccccccctacgtggccaaggccagcagcgacgagctgctgaacctgcagaagcccctgcagagcgccctgggcttcgtgatcctgagaagcagccagaactggaacagcaagaacagacagagatggagcagaaccaaggccggccagatgagccacggcctgcagatggccggcccccaggagaccgtgctggccctgcccctgagagagggcgtgcaggccgccgccaccgtgcccatcctgctgtacaacctggaggacggcctgagcgaccaccccctggaccagggccccagatgccccgccagaagaccctgcagccccgccagcgcccccgcccccaccagccccaagaagcccaagatccaggcccccggcgagaccttccccaccgactggagccccccccccgtggagttcctgaaccccagagtgctgcaggccagcagagaggcccccgcccagagatgggtgggcgtggtgggcccccagggcctgagaagactggccggcgagctgcccgaggagctggagcaggagcacctggacctggaccccaagagaggcctggccctgcccgagaagctgttctggaacaccagcggcctgagccagcaggccgccgcccccgagttcagctggggcggcagcggcagctacttcaacaacctggactacctgctgcaggagaagagagagcaggccctggagcaggagagagagagactgctgctgcaggagtgcctgaacctgaacagcctggacctggacgaggaggaggtgcccctgacccccgagcacagaatgctggtggagaagtacagcgtgagcctgcagaccatcccccccgtgcaccccggcgagaccgtgttcctgcccagatgccaccccctgccctgcatcctggacagcagcctgctgaagcccagaagccacctggagggcctgttcctgagcagcccccccgcccagcagctgagcttcctgagaagcggcctgctgaacatcctgtacctgcacatgcccgactgccccgtgagcctgctgcagtggctgttccagctgctgacctggccccccgagaccagcctgggcgccttcggcctgctgtgggacctgatcgtggacggcatcttcctgcagcccgacgaggacaagcacctgtggtgccccagcctgcaggaggtgagagaggccttccacagcctgggcgcccacagccccgccctgtaccccctgggccccttctggcacggcggcagagtgctgcccggcgaggccggcctgaacgagaacgaggagcaggacgccccccaggagatcgccctggacatcagcctgggccacatctacaagttcctggccctgtgcgcccaggcccagcccggcgcctacaccgacgagaacctgatgggcctgatcgagctgctgtgcagaaccagcctggacgtgggcctgagactgctgcccaaggtggacctgcagcagctgctgctgctgctgctggagaacatcagagagtggcccggcaagctgcaggagctgtgctgcaccctgagctgggtgagcgaccaccaccacaacctgctggccctggtgcagttcttccccgacatgaccagcagaagcagaagactgagaagccagctgagcctggtggtgatcgccagaatgctgggccagcaggagatgctgcccctgtggcaggagaagacccagctgagcagcctgagcagactgctgggcctgatgagacccagcagcctgagacagtacctggacagcgtgcccctgcccccctgccaggagcagcagcccaaggccagcgccgagctggaccacaaggcctgctacctgtgccacagcctgctgatgctggccggcgtggtggtgagctgccaggacatcacccccgaccagtggggcgagctgcagctgctgtgcatgcagctggacagacacatcagcacccagatcagagagagcccccaggccatgcacagaaccatgctgaaggacctggccacccagacctacatcagatggcaggagctgctgacccactgccagccccaggcccagtacttcagcccctggaaggacatctag

SEQ ID NO: 43631 - DNA, 2040 bp, Artificial Sequence
  derived and/or modified sequence
atgtggcccagactgcccggcgccggcctggccccccagctgagaagacaggaccagagactgcacttcaccggccagatgagccacggcctgcagatggccggcccccaggagaccgtgctggccctgcccctgagagagggcgtgcaggccgccgccaccgtgcccatcctgctgtacaacctggaggacggcctgagcgaccaccccctggaccagggccccagatgccccgccagaagaccctgcagccccgccagcgcccccgcccccaccagccccaagaagcccaagatccaggcccccggcgagaccttccccaccgactggagccccccccccgtggagttcctgaaccccagagtgctgcaggccagcagagaggcccccgcccagagatgggtgggcgtggtgggcccccagggcctgagaagactggccggcgagctgcccgaggagctggagcaggagcacctggacctggaccccaagagaggcctggccctgcccgagaagctgttctggaacaccagcggcctgagccagcaggccgccgcccccgagttcagctggggcggcagcggcagctacttcaacaacctggactacctgctgcaggagaagagagagcaggccctggagcaggagagagagagactgctgctgcaggagtgcctgaacctgaacagcctggacctggacgaggaggaggtgcccctgacccccgagcacagaatgctggtggagaagtacagcgtgagcctgcagaccatcccccccgtgcaccccggcgagaccgtgttcctgcccagatgccaccccctgccctgcatcctggacagcagcctgctgaagcccagaagccacctggagggcctgttcctgagcagcccccccgcccagcagctgagcttcctgagaagcggcctgctgaacatcctgtacctgcacatgcccgactgccccgtgagcctgctgcagtggctgttccagctgctgacctggccccccgagaccagcctgggcgccttcggcctgctgtgggacctgatcgtggacggcatcttcctgcagcccgacgaggacaagcacctgtggtgccccagcctgcaggaggtgagagaggccttccacagcctgggcgcccacagccccgccctgtaccccctgggccccttctggcacggcggcagagtgctgcccggcgaggccggcctgaacgagaacgaggagcaggacgccccccaggagatcgccctggacatcagcctgggccacatctacaagttcctggccctgtgcgcccaggcccagcccggcgcctacaccgacgagaacctgatgggcctgatcgagctgctgtgcagaaccagcctggacgtgggcctgagactgctgcccaaggtggacctgcagcagctgctgctgctgctgctggagaacatcagagagtggcccggcaagctgcaggagctgtgctgcaccctgagctgggtgagcgaccaccaccacaacctgctggccctggtgcagttcttccccgacatgaccagcagaagcagaagactgagaagccagctgagcctggtggtgatcgccagaatgctgggccagcaggagatgctgcccctgtggcaggagaagacccagctgagcagcctgagcagactgctgggcctgatgagacccagcagcctgagacagtacctggacagcgtgcccctgcccccctgccaggagcagcagcccaaggccagcgccgagctggaccacaaggcctgctacctgtgccacagcctgctgatgctggccggcgtggtggtgagctgccaggacatcacccccgaccagtggggcgagctgcagctgctgtgcatgcagctggacagacacatcagcacccagatcagagagagcccccaggccatgcacagaaccatgctgaaggacctggccacccagacctacatcagatggcaggagctgctgacccactgccagccccaggcccagtacttcagcccctggaaggacatctag

SEQ ID NO: 43632 - DNA, 1944 bp, Artificial Sequence
  derived and/or modified sequence
atggccggtccgcaggagacggtgctggccctccctctgagagagggtgtgcaggccgcggccacagtgccaattctgctgtataacttagaagacggcttgagcgaccaccctctggaccaagggccccgctgccctgctcgacgaccgtgctccccagccagtgcacccgcgccgacctcacccaaaaagccaaaaatccaggcccctggcgaaacctttcctacagactggtccccgcccccggtcgaattcctgaacccgcgtgtgctccaagccagccgagaagcccctgcccagaggtgggttggagtggtcgggcctcaggggctgcggcgtctcgccggagagctgccagaggaattggaacaggagcatctggatctggaccctaagagagggctggcactgccagaaaagcttttttggaatacaagcgggctgagccagcaagctgcagctcccgagttcagctggggaggctctgggagttactttaataacttggattatttgctgcaggaaaagagagaacaggccctggagcaggagcgagaaagactccttcttcaggaatgtctcaacctgaattcactggatctggacgaggaagaagtcccactgacacctgagcacagaatgttggtcgagaaatacagcgtgtctctgcagaccatcccccccgtgcatccaggcgaaactgtgtttctgcccaggtgccacccgctcccatgtattctggattcttcgctgctaaaacctaggtcccacctcgagggcttgttccttagcagtccccccgcacagcagttgtcttttctgagatccggcctgctcaacattctctacctacatatgccagactgccccgtcagtctgctgcagtggctgtttcagctgctaacatggccccccgagaccagcctaggtgcctttggcttgctttgggacctcatcgtggacgggatatttttgcagcctgacgaggataagcatctctggtgcccctctctccaagaggtgcgggaggcatttcattctctaggtgcccactctccagcattgtatcccctcgggccgttctggcacggaggccgggtgcttcctggcgaggcaggcctgaacgagaatgaagagcaggacgctccacaggaaattgccctggacattagtcttggccatatctacaaatttctcgccctgtgcgcccaggcccaacctggagcttatactgacgaaaatcttatgggactcatcgagcttctctgccgcaccagtctcgatgtgggactgcgcctgctgcctaaagttgacctgcagcaactcctgcttcttctactggaaaacattagggagtggcctggcaagctccaggaactttgttgtactctgtcctgggtgtccgatcaccaccataacttgttagccctcgtgcagtttttccctgatatgaccagccgatcaagacgtctccggtcccagcttagtctggtcgtcatagcccgaatgttgggtcagcaggaaatgctacccctgtggcaagaaaagacacagctatcctcgctgtctcgcctacttggtctcatgcgtccgagctctctacggcagtacttagatagcgtgccactgcccccgtgtcaggagcagcagcccaaggcatctgccgagcttgatcataaagcctgctacctgtgccactccctcctcatgcttgccggcgtcgtggtgagctgccaggatattaccccagatcagtggggagagctgcagctcctgtgtatgcagctcgatagacacatctctacacagattagagagagcccacaggctatgcatagaacaatgttgaaggacttggcgacacagacatacatccggtggcaggagctgctgacacattgtcagccccaagcccagtacttcagcccatggaaagacatttag

SEQ ID NO: 43633 - DNA, 2484 bp, Artificial Sequence
  derived and/or modified sequence
atggctcatgagagagagatcctgaaagggatgtacgaagaactgaaagagaagagccataaacctgacgtcgagctcattcaacatcgcgcatggcgaatcgatatggtatctaccgaactggagtctttccgaaaagcctcttacatcgaatctggccctgaggaattctatcagcgctttaagaagtgcttctctgccacccatatcttcatctcgataaagggcaaagatagccagaatacagctcacggctacctgatcctgaacaggacattgcaccaacagttgaaaattaagaaccccttcctagctccttcttcagaagctgtgagaatcccagcaactctaccacaccccggagcacttccttttccaccctatgtcgctaaggctagctcggacgagctgctcaaccttcagaagccccttcagtccgctctgggattcgtaatactgcgctcttcccagaattggaatagcaagaatcgacagcggtggtcacggactaaagcaggccaaatgagccatgggctgcaaatggctgggccccaggagactgtccttgcgctaccactgagagagggagttcaggctgctgctaccgtgcccatcctgctgtataacctcgaggatggcctctctgatcaccccctggaccaagggccaaggtgtcctgcaagaaggccttgttctccggcttctgcaccggcacccacttcccccaagaaacccaaaatacaagccccaggcgaaaccttcccaactgactggagcccaccaccggtggagttcctgaatccccgcgttctgcaggcaagtagagaggcgcctgcccagagatgggtgggcgtcgtcggcccccaggggctgcgaagactggctggggaactgcccgaggaactggagcaagagcatctggacctggatcccaaaagggggctggcattgcctgagaagctgttttggaacacaagtggtctgagccaacaggccgcagctccagaattctcctggggcgggagcggctcttattttaacaatctagactatctgctgcaggaaaagagggaacaggctctggaacaggaaagagagcgactactgctccaggagtgcctgaacttgaattccttggatctcgatgaagaagaggtgccccttacacctgagcacagaatgctggtggaaaaatatagtgtgagtctccaaacgatacctcccgtccacccgggagagaccgttttcctgccacggtgccatccccttccctgtatccttgattcatctctcctcaagccgagatcacacctggaagggctattcctgtcttcaccacctgctcagcagctgtccttcctgcggagcgggctactgaacatattgtacctccatatgccagattgcccggtctccttacttcagtggctgttccaactcttgacttggccccctgaaacctccctaggtgcattcgggctgctgtgggacttgattgttgacggcatatttctccagccggacgaagacaaacatctgtggtgtccaagcctccaggaggtaagagaggctttccatagtctcggggctcattcccccgcgctgtacccacttggcccattctggcacgggggcagagtgctgccgggagaggcaggtctgaacgagaacgaagaacaggacgctccacaagagatcgccctggacatctccctagggcatatttacaagttcctggcactctgtgcgcaggctcagcctggcgcttataccgatgagaatctgatggggctcatagaactgctttgtagaaccagcctggatgtcggcttgagactgctcccaaaggtcgatctgcaacagctgctcttgctcctcttggagaatatcagagagtggcccggaaagctgcaggagttgtgctgcacactcagttgggtatcagaccatcatcacaacctcctggcccttgtgcaattttttcctgatatgacttcccgatcaaggaggctgaggtcccagctatcactggtggtcatcgctagaatgctgggacagcaggaaatgcttcccttgtggcaggagaagacccaattatcctccctgtcaaggctccttgggctgatgcgcccctcctcactccggcaatatctcgacagcgtaccccttcctccctgccaggagcaacagccaaaagccagtgctgaactggaccacaaggcgtgctatttatgtcactccctactaatgctggccggggtggtggtgtcctgccaggacattacacccgaccaatggggcgagctgcagctgttatgtatgcaactggacagacatatcagtacccagataagagaaagtccccaggctatgcaccgtaccatgctgaaggatctggcgacacaaacctatattaggtggcaggaactgctgacccattgccagccacaggcacagtacttttctccctggaaggacatttag

SEQ ID NO: 43634 - DNA, 2040 bp, Artificial Sequence
  derived and/or modified sequence
atgtggcctcgactgcctggtgccgggttggccccgcagctcagacggcaggatcagaggctccatttcaccggtcagatgagccacggcttacagatggccggcccccaagaaaccgttcttgccctgcccttgagagagggtgtccaggccgccgccacggtcccaatattgctgtacaatctggaggacggcctctccgatcatcccctggaccagggcccaagatgcccggcaagacgaccctgttcaccagcatctgctcctgcccctacctcacctaaaaagcccaagatccaggcccccggcgaaaccttcccaaccgattggtccccccctcctgtcgagtttttaaaccccagagtgctccaggccagccgggaggcaccagcccagaggtgggttggtgtggtcggacctcaggggttgaggcgactcgcgggggaattgcccgaggaactggaacaggagcatcttgatttggatccgaaaaggggtttagccctgccggagaaactgttttggaacacctcaggattaagccaacaagcggccgcgcctgagttcagctggggtggatcgggatcctacttcaataacctggactaccttctgcaggaaaagcgggagcaggcgctcgaacaggaaagagagagacttttactgcaggagtgcttaaacctaaacagcttggaccttgatgaagaagaagtcccactgacacccgagcatcggatgctggttgaaaagtacagcgtctctttgcagacgatcccccctgtccatccaggggagacagtttttcttccgcgctgtcatcccttaccctgtatcctggattcgagtttacttaagccaaggtcccacctggaggggctctttctgagttccccgccggctcagcagcttagctttcttcgcagcggactcttaaatatattgtatctgcacatgcctgattgccccgtgtcactacttcagtggctgtttcagttactcacctggcctccggaaacaagccttggcgcatttggcctgctgtgggaccttatcgtggatggaatcttcctgcagcccgacgaggataagcatttatggtgccccagccttcaggaggtgcgcgaggcgtttcacagcctcggggcacattcccctgccctatatcccctcgggccattctggcacgggggaagagtgctgccaggagaggcgggattgaacgagaacgaggaacaggatgctccccaggaaattgctctcgacatttccctgggacacatttacaaattccttgccctgtgtgcacaggcccagcctggagcctacactgatgaaaacctcatggggctcattgagctgctgtgccgtaccagtctggatgtcgggctgcgacttctgcccaaagtggatctgcagcaactcctactgctcctgttggagaatatcagggagtggcccggaaagctccaagagctctgttgtaccctcagctgggtatccgaccaccaccataacctccttgccctggtccagttttttcccgatatgacatccaggagccgcagactgcggagtcaactctctctggtggtcatcgcgaggatgctgggacagcaggaaatgttgccattatggcaggagaagacccagctcagttcccttagccggttgctggggctgatgaggcctagtagccttagacagtacctggactccgtaccactccccccttgccaagagcagcagccaaaagcctcagccgaactagaccacaaagcatgctacctgtgtcattctctgctgatgttggctggtgtggtggttagttgtcaagatattacacccgaccagtggggggagctgcagctcttgtgtatgcagctcgacagacatatcagtactcagatccgcgagtccccccaggccatgcataggactatgttgaaggacctggctacccagacgtatatccgctggcaggaacttcttacccattgtcagcctcaggcccagtacttcagcccttggaaggacatctag

SEQ ID NO: 43635 - DNA, 2684 bp, Artificial Sequence
  derived and/or modified sequence
ctccccagctggcggcggcggcggctgtgagctggccgcttggtttggagtcggaactcaatccccagaactggatctttaggttccacgttggcggccctggatctagggacgcaactcttggggtcctcccactgcgccgcctggggagcctgctcctgcttcctttcccggctagctggccccgtcctctgaggccgtgcgaattcccgccaccctccctcaccccggagccctgcccttcccgccctatgtggccaaggcttccaggtgcgggcctcgctccacaactcaggaggcaggatcagcggctccattttacaggacagatgtcccacggcttgcagatggctgggccccaggagacggtgctagcccttcctctgagagaaggggtgcaggctgccgccaccgtgcccatcctcctgtacaacctggaggatggcttgtcagaccatcccctggaccaggggccccgctgccctgcccggcggccctgcagccctgcctcggctccagctcccacatcgccaaagaagcccaagatacaggcacctggggaaacgtttcccactgactggagccccccgcccgtggaattcctcaacccgagggtgctgcaggccagtcgggaggccccggcccagaggtgggtgggtgtggtgggcccccagggcctgaggagactggctggtgagctgcccgaggagttggagcaggaacacctggacttggacccgaagaggggcctggccttgccagagaagctgttctggaacacgtcaggcctgagccagcaggctgcggccccagagttttcctgggggggctcaggaagctacttcaacaacctggactacttactgcaggagaagagggaacaggccctggagcaggagcgagagaggctgcttctgcaggagtgtctcaatctcaactccttggatcttgatgaagaggaagtgccactcacacccgagcacaggatgctggtggaaaagtactcagtgtccctgcagaccatcccgccggtccatccaggtgagactgtgtttctgcccaggtgtcaccccctgccatgcatcctggactcctcactcctgaagccacgcagccacctggaagggctgttcctcagctccccgccagcccaacagctctccttcctgcgcagtggcctcctgaacatcctctacctgcacatgcctgactgcccggtatccctgctccagtggctgttccagctgctgacatggcctccagaaacatctttgggagcctttggtcttctgtgggatctcattgtggatggaatcttccttcagcctgatgaagacaagcacctgtggtgcccctcactgcaagaagtcagggaggcattccacagcctgggtgcccacagtcctgccctgtaccctctggggcccttttggcacggtggcagggtgcttccaggcgaggctggcctgaatgagaatgaggagcaggacgctccccaagagattgccttggacatcagcctgggccacatctacaagtttctggcgctgtgtgcccaggcccagccgggggcctacactgatgagaacctcatgggactgattgagctgctgtgccgcaccagcctggacgtggggctccgcctgctgcccaaagttgacctccagcagcttctcctcttgctcctggagaacatccgggagtggccagggaagctccaggaactgtgctgcaccctgagctgggtgtctgaccaccaccacaacctgctggccctcgtgcagttcttcccagacatgacctcccggagcaggcggcttcgaagccagctcagccttgtggtcattgctcgaatgctgggccagcaggagatgctccctctctggcaagagaagacccagctgtcctcgctcagccggctcctgggcctcatgaggccatcatctctcaggcaatacctggactctgtgcccttgccaccctgccaggagcaacagccaaaggctagtgccgagctagaccacaaggcctgctacctgtgccacagcttgctgatgctggccggggtagttgttagctgccaggacatcactccagaccagtggggcgagctgcagctgctgtgcatgcagttggaccgccacatcagcacgcagatccgggagagcccccaggccatgcaccgcaccatgctcaaggacctggctacccagacctacatccgttggcaggagctgctgacccactgccagccccaggcccagtatttcagcccctggaaagacatctaaagggacagggtcagggcagcccagggctcctggcttcagcaggaagtgaacaggctcagggaactggaggaagcgaagcatcaaggccagaggaggccacatgctgaccagcctgatgaggcaagagcctgcccctgccaccgccccgacccctctcctctctgcaagagcctgcctctgccaccgccccgaccccctctcctctcagcaagggatgggcctctctgcctcgcccacccctcagccctcctcccagccatctcctcttccctaaggcctctgtctccatagctctggtttccctgggcctcagtcctccccaccctccttcctctgtctccctgtcactaatgtgaggtttctttgtgcacattaaagtcttctttcagcatc

SEQ ID NO: 43636 - DNA, 2877 bp, Artificial Sequence
  derived and/or modified sequence
atggcccatgagagggagattttaaaaggaatgtatgaggagctgaaggaaaagtcccataaaccagatgtggagctaatccagcatcgtgcatggaggatcgacatggtttccacagagctggagtcattcaggaaagcttcttatatcgagagtggtccagaagaattctaccaaagatttaagaagtgtttttctgcaactcacatcttcataagtataaagggtaaagattctcagaatacagctcatggatatctgattcttaacaggactctacatcaacaactaaaaattaaaaatccttttctggccccgtcctctgaggccgtgcgaattcccgccaccctccctcaccccggagccctgcccttcccgccctatgtggccaaggcttccagcgatgaactgctgaacttgcagaaacccttgcagagtgccctgggcttcgtgatcttgagaagcagccaaaactggaacagcaaaaaccgtcaacgctggagtagaacaaaggccggacagatgtcccacggcttgcagatggctgggccccaggagacggtgctagcccttcctctgagagaaggggtgcaggctgccgccaccgtgcccatcctcctgtacaacctggaggatggcttgtcagaccatcccctggaccaggggccccgctgccctgcccggcggccctgcagccctgcctcggctccagctcccacatcgccaaagaagcccaagatacaggcacctggggaaacgtttcccactgactggagccccccgcccgtggaattcctcaacccgagggtgctgcaggccagtcgggaggccccggcccagaggtgggtgggtgtggtgggcccccagggcctgaggagactggctggtgagctgcccgaggagttggagcaggaacacctggacttggacccgaagaggggcctggccttgccagagaagctgttctggaacacgtcaggcctgagccagcaggctgcggccccagagttttcctgggggggctcaggaagctacttcaacaacctggactacttactgcaggagaagagggaacaggccctggagcaggagcgagagaggctgcttctgcaggagtgtctcaatctcaactccttggatcttgatgaagaggaagtgccactcacacccgagcacaggatgctggtggaaaagtactcagtgtccctgcagaccatcccgccggtccatccaggtgagactgtgtttctgcccaggtgtcaccccctgccatgcatcctggactcctcactcctgaagccacgcagccacctggaagggctgttcctcagctccccgccagcccaacagctctccttcctgcgcagtggcctcctgaacatcctctacctgcacatgcctgactgcccggtatccctgctccagtggctgttccagctgctgacatggcctccagaaacatctttgggagcctttggtcttctgtgggatctcattgtggatggaatcttccttcagcctgatgaagacaagcacctgtggtgcccctcactgcaagaagtcagggaggcattccacagcctgggtgcccacagtcctgccctgtaccctctggggcccttttggcacggtggcagggtgcttccaggcgaggctggcctgaatgagaatgaggagcaggacgctccccaagagattgccttggacatcagcctgggccacatctacaagtttctggcgctgtgtgcccaggcccagccgggggcctacactgatgagaacctcatgggactgattgagctgctgtgccgcaccagcctggacgtggggctccgcctgctgcccaaagttgacctccagcagcttctcctcttgctcctggagaacatccgggagtggccagggaagctccaggaactgtgctgcaccctgagctgggtgtctgaccaccaccacaacctgctggccctcgtgcagttcttcccagacatgacctcccggagcaggcggcttcgaagccagctcagccttgtggtcattgctcgaatgctgggccagcaggagatgctccctctctggcaagagaagacccagctgtcctcgctcagccggctcctgggcctcatgaggccatcatctctcaggcaatacctggactctgtgcccttgccaccctgccaggagcaacagccaaaggctagtgccgagctagaccacaaggcctgctacctgtgccacagcttgctgatgctggccggggtagttgttagctgccaggacatcactccagaccagtggggcgagctgcagctgctgtgcatgcagttggaccgccacatcagcacgcagatccgggagagcccccaggccatgcaccgcaccatgctcaaggacctggctacccagacctacatccgttggcaggagctgctgacccactgccagccccaggcccagtatttcagcccctggaaagacatctaaagggacagggtcagggcagcccagggctcctggcttcagcaggaagtgaacaggctcagggaactggaggaagcgaagcatcaaggccagaggaggccacatgctgaccagcctgatgaggcaagagcctgcccctgccaccgccccgacccctctcctctctgcaagagcctgcctctgccaccgccccgaccccctctcctctcagcaagggatgggcctctctgcctcgcccacccctcagccctcctcccagccatctcctcttccctaaggcctctgtctccatagctctggtttccctgggcctcagtcctccccaccctccttcctctgtctccctgtcactaatgtgaggtttctttgtgcacattaaagtcttctttcagcatc

SEQ ID NO: 43637 - DNA, 2710 bp, Artificial Sequence
  derived and/or modified sequence
ggaagagggtgcgcacttggccggcgagctccccagctggcggcggcggcggctgtgagctggccgcttggtttggagtcggaactcaatccccagaactggatctttaggttccacgttggcggccctggatctagggacgcaactcttggggtcctcccactgcgccgcctggggagcctgctcctgcttcctttcccggctagctggccccgtcctctgaggccgtgcgaattcccgccaccctccctcaccccggagccctgcccttcccgccctatgtggccaaggcttccaggtgcgggcctcgctccacaactcaggaggcaggatcagcggctccattttacaggacagatgtcccacggcttgcagatggctgggccccaggagacggtgctagcccttcctctgagagaaggggtgcaggctgccgccaccgtgcccatcctcctgtacaacctggaggatggcttgtcagaccatcccctggaccaggggccccgctgccctgcccggcggccctgcagccctgcctcggctccagctcccacatcgccaaagaagcccaagatacaggcacctggggaaacgtttcccactgactggagccccccgcccgtggaattcctcaacccgagggtgctgcaggccagtcgggaggccccggcccagaggtgggtgggtgtggtgggcccccagggcctgaggagactggctggtgagctgcccgaggagttggagcaggaacacctggacttggacccgaagaggggcctggccttgccagagaagctgttctggaacacgtcaggcctgagccagcaggctgcggccccagagttttcctgggggggctcaggaagctacttcaacaacctggactacttactgcaggagaagagggaacaggccctggagcaggagcgagagaggctgcttctgcaggagtgtctcaatctcaactccttggatcttgatgaagaggaagtgccactcacacccgagcacaggatgctggtggaaaagtactcagtgtccctgcagaccatcccgccggtccatccaggtgagactgtgtttctgcccaggtgtcaccccctgccatgcatcctggactcctcactcctgaagccacgcagccacctggaagggctgttcctcagctccccgccagcccaacagctctccttcctgcgcagtggcctcctgaacatcctctacctgcacatgcctgactgcccggtatccctgctccagtggctgttccagctgctgacatggcctccagaaacatctttgggagcctttggtcttctgtgggatctcattgtggatggaatcttccttcagcctgatgaagacaagcacctgtggtgcccctcactgcaagaagtcagggaggcattccacagcctgggtgcccacagtcctgccctgtaccctctggggcccttttggcacggtggcagggtgcttccaggcgaggctggcctgaatgagaatgaggagcaggacgctccccaagagattgccttggacatcagcctgggccacatctacaagtttctggcgctgtgtgcccaggcccagccgggggcctacactgatgagaacctcatgggactgattgagctgctgtgccgcaccagcctggacgtggggctccgcctgctgcccaaagttgacctccagcagcttctcctcttgctcctggagaacatccgggagtggccagggaagctccaggaactgtgctgcaccctgagctgggtgtctgaccaccaccacaacctgctggccctcgtgcagttcttcccagacatgacctcccggagcaggcggcttcgaagccagctcagccttgtggtcattgctcgaatgctgggccagcaggagatgctccctctctggcaagagaagacccagctgtcctcgctcagccggctcctgggcctcatgaggccatcatctctcaggcaatacctggactctgtgcccttgccaccctgccaggagcaacagccaaaggctagtgccgagctagaccacaaggcctgctacctgtgccacagcttgctgatgctggccggggtagttgttagctgccaggacatcactccagaccagtggggcgagctgcagctgctgtgcatgcagttggaccgccacatcagcacgcagatccgggagagcccccaggccatgcaccgcaccatgctcaaggacctggctacccagacctacatccgttggcaggagctgctgacccactgccagccccaggcccagtatttcagcccctggaaagacatctaaagggacagggtcagggcagcccagggctcctggcttcagcaggaagtgaacaggctcagggaactggaggaagcgaagcatcaaggccagaggaggccacatgctgaccagcctgatgaggcaagagcctgcccctgccaccgccccgacccctctcctctctgcaagagcctgcctctgccaccgccccgaccccctctcctctcagcaagggatgggcctctctgcctcgcccacccctcagccctcctcccagccatctcctcttccctaaggcctctgtctccatagctctggtttccctgggcctcagtcctccccaccctccttcctctgtctccctgtcactaatgtgaggtttctttgtgcacattaaagtcttctttcagca

SEQ ID NO: 43638 - DNA, 1944 bp, Artificial Sequence
  derived and/or modified sequence
atggccggcccccaggagaccgtgctggccctgcccctgcgggagggcgtgcaggccgccgccaccgtgcccatcctgctgtacaacctggaggatggcctgagtgaccaccccctggaccagggcccccgctgcccagcccggcggccctgcagccctgccagcgccccagcccccaccagccccaagaagcccaagatccaggcccctggagagaccttccccacagactggagccccccacctgtggagttcctgaacccccgggtgctgcaggccagccgggaggccccagcccagcgctgggtgggcgtggtgggcccccagggcctgcggcggctggccggggagctgcctgaggagctggagcaggagcacctggacctggaccccaagaggggcctggccctgcctgagaagctgttctggaacaccagcggcctgagccagcaggccgccgcccctgagttctcctggggcggcagcggcagctacttcaacaacctggactacctgctgcaggagaagcgggagcaggccctggagcaggagcgggagcggctgctgctgcaggagtgcctgaacctgaacagcctggacctggatgaggaggaggtgcccctgaccccagagcacaggatgctggtggagaagtacagcgtgtccctgcagaccatcccccctgtgcaccctggagagaccgtcttcctgccccgctgccaccccctgccctgcatcctggacagcagcctgctgaagcccaggagccacctggagggcctcttcctgagcagccccccagcccagcagctgtccttcctgcggagcggcctgctgaacatcctgtacctgcacatgccagactgccctgtgtccctgctgcagtggctgttccagctgctgacctggcccccagagaccagcctgggcgccttcggcctgctgtgggacctgattgtggatggcatcttcctgcagccagatgaggacaagcacctgtggtgccccagcctgcaggaggtgcgggaggccttccacagcctgggcgcccacagccctgccctgtaccccctgggccccttctggcatggaggccgggtgctgcctggagaggccggcctgaatgaaaatgaggagcaggatgccccccaggagatcgccctggacatcagcctgggccacatctacaagttcctggccctgtgtgcccaggcccagcccggggcctacacagatgagaacctgatgggcctgattgagctgctgtgcaggaccagcctggatgtgggcctgcggctgctgcccaaggtggacctgcagcagctgctgctgctgctgctggagaacatccgggagtggccaggcaagctgcaggagctgtgctgcaccctgtcctgggtgtctgaccaccaccacaacctgctggccctggtgcagttcttcccagacatgaccagccgcagccggcggctgcggagccagctgagcctggtggtgattgccaggatgctgggccagcaggagatgctgcccctgtggcaggagaagacccagctgagcagcctgagccggctgctgggcctgatgaggcccagcagcctgcggcagtacctggacagcgtgcccctgcccccctgccaggagcagcagcccaaggccagcgctgagctggaccacaaggcctgctacctgtgccacagcctgctgatgctggccggcgtggtggtgtcctgccaggacatcaccccagaccagtggggcgagctgcagctgctgtgcatgcagctggacagacacatcagcacccagatccgggagagcccccaggccatgcacaggaccatgctgaaggacctggccacccagacctacatccgctggcaggagctgctgacccactgccagccccaggcccagtacttcagcccctggaaggacatctag

SEQ ID NO: 43639 - DNA, 2484 bp, Artificial Sequence
  derived and/or modified sequence
atggcccacgagcgggagatcctgaagggcatgtatgaggagctgaaggagaagagccacaagccagatgtggagctgatccagcaccgggcctggagaattgacatggtgtccacagagctggagagcttcaggaaggccagctacatcgagagcggccctgaggagttctaccagcgcttcaagaagtgcttcagcgccacccacatcttcatcagcatcaagggcaaggacagccagaacacagcccacggctacctgatcctgaacagaaccctgcaccagcagctgaagatcaagaaccccttcctggcccccagcagcgaggccgtgcgcatcccagccaccctgccccaccctggggccctgcccttccccccctacgtggccaaggccagcagtgatgagctgctgaacctgcagaagcccctgcagagcgccctgggcttcgtcatcctgcggagcagccagaactggaacagcaagaaccggcagcgctggagcaggaccaaggccggccagatgagccacggcctgcagatggccggcccccaggagaccgtgctggccctgcccctgcgggagggcgtgcaggccgccgccaccgtgcccatcctgctgtacaacctggaggatggcctgagtgaccaccccctggaccagggcccccgctgcccagcccggcggccctgcagccctgccagcgccccagcccccaccagccccaagaagcccaagatccaggcccctggagagaccttccccacagactggagccccccacctgtggagttcctgaacccccgggtgctgcaggccagccgggaggccccagcccagcgctgggtgggcgtggtgggcccccagggcctgcggcggctggccggggagctgcctgaggagctggagcaggagcacctggacctggaccccaagaggggcctggccctgcctgagaagctgttctggaacaccagcggcctgagccagcaggccgccgcccctgagttctcctggggcggcagcggcagctacttcaacaacctggactacctgctgcaggagaagcgggagcaggccctggagcaggagcgggagcggctgctgctgcaggagtgcctgaacctgaacagcctggacctggatgaggaggaggtgcccctgaccccagagcacaggatgctggtggagaagtacagcgtgtccctgcagaccatcccccctgtgcaccctggagagaccgtcttcctgccccgctgccaccccctgccctgcatcctggacagcagcctgctgaagcccaggagccacctggagggcctcttcctgagcagccccccagcccagcagctgtccttcctgcggagcggcctgctgaacatcctgtacctgcacatgccagactgccctgtgtccctgctgcagtggctgttccagctgctgacctggcccccagagaccagcctgggcgccttcggcctgctgtgggacctgattgtggatggcatcttcctgcagccagatgaggacaagcacctgtggtgccccagcctgcaggaggtgcgggaggccttccacagcctgggcgcccacagccctgccctgtaccccctgggccccttctggcatggaggccgggtgctgcctggagaggccggcctgaatgaaaatgaggagcaggatgccccccaggagatcgccctggacatcagcctgggccacatctacaagttcctggccctgtgtgcccaggcccagcccggggcctacacagatgagaacctgatgggcctgattgagctgctgtgcaggaccagcctggatgtgggcctgcggctgctgcccaaggtggacctgcagcagctgctgctgctgctgctggagaacatccgggagtggccaggcaagctgcaggagctgtgctgcaccctgtcctgggtgtctgaccaccaccacaacctgctggccctggtgcagttcttcccagacatgaccagccgcagccggcggctgcggagccagctgagcctggtggtgattgccaggatgctgggccagcaggagatgctgcccctgtggcaggagaagacccagctgagcagcctgagccggctgctgggcctgatgaggcccagcagcctgcggcagtacctggacagcgtgcccctgcccccctgccaggagcagcagcccaaggccagcgctgagctggaccacaaggcctgctacctgtgccacagcctgctgatgctggccggcgtggtggtgtcctgccaggacatcaccccagaccagtggggcgagctgcagctgctgtgcatgcagctggacagacacatcagcacccagatccgggagagcccccaggccatgcacaggaccatgctgaaggacctggccacccagacctacatccgctggcaggagctgctgacccactgccagccccaggcccagtacttcagcccctggaaggacatctag

SEQ ID NO: 43640 - DNA, 2040 bp, Artificial Sequence
  derived and/or modified sequence
atgtggccccggctgcccggggccggcctggccccccagctgcggcggcaggaccagaggctgcacttcaccggccagatgagccacggcctgcagatggccggcccccaggagaccgtgctggccctgcccctgcgggagggcgtgcaggccgccgccaccgtgcccatcctgctgtacaacctggaggatggcctgagtgaccaccccctggaccagggcccccgctgcccagcccggcggccctgcagccctgccagcgccccagcccccaccagccccaagaagcccaagatccaggcccctggagagaccttccccacagactggagccccccacctgtggagttcctgaacccccgggtgctgcaggccagccgggaggccccagcccagcgctgggtgggcgtggtgggcccccagggcctgcggcggctggccggggagctgcctgaggagctggagcaggagcacctggacctggaccccaagaggggcctggccctgcctgagaagctgttctggaacaccagcggcctgagccagcaggccgccgcccctgagttctcctggggcggcagcggcagctacttcaacaacctggactacctgctgcaggagaagcgggagcaggccctggagcaggagcgggagcggctgctgctgcaggagtgcctgaacctgaacagcctggacctggatgaggaggaggtgcccctgaccccagagcacaggatgctggtggagaagtacagcgtgtccctgcagaccatcccccctgtgcaccctggagagaccgtcttcctgccccgctgccaccccctgccctgcatcctggacagcagcctgctgaagcccaggagccacctggagggcctcttcctgagcagccccccagcccagcagctgtccttcctgcggagcggcctgctgaacatcctgtacctgcacatgccagactgccctgtgtccctgctgcagtggctgttccagctgctgacctggcccccagagaccagcctgggcgccttcggcctgctgtgggacctgattgtggatggcatcttcctgcagccagatgaggacaagcacctgtggtgccccagcctgcaggaggtgcgggaggccttccacagcctgggcgcccacagccctgccctgtaccccctgggccccttctggcatggaggccgggtgctgcctggagaggccggcctgaatgaaaatgaggagcaggatgccccccaggagatcgccctggacatcagcctgggccacatctacaagttcctggccctgtgtgcccaggcccagcccggggcctacacagatgagaacctgatgggcctgattgagctgctgtgcaggaccagcctggatgtgggcctgcggctgctgcccaaggtggacctgcagcagctgctgctgctgctgctggagaacatccgggagtggccaggcaagctgcaggagctgtgctgcaccctgtcctgggtgtctgaccaccaccacaacctgctggccctggtgcagttcttcccagacatgaccagccgcagccggcggctgcggagccagctgagcctggtggtgattgccaggatgctgggccagcaggagatgctgcccctgtggcaggagaagacccagctgagcagcctgagccggctgctgggcctgatgaggcccagcagcctgcggcagtacctggacagcgtgcccctgcccccctgccaggagcagcagcccaaggccagcgctgagctggaccacaaggcctgctacctgtgccacagcctgctgatgctggccggcgtggtggtgtcctgccaggacatcaccccagaccagtggggcgagctgcagctgctgtgcatgcagctggacagacacatcagcacccagatccgggagagcccccaggccatgcacaggaccatgctgaaggacctggccacccagacctacatccgctggcaggagctgctgacccactgccagccccaggcccagtacttcagcccctggaaggacatctag

SEQ ID NO: 43641 - DNA, 1944 bp, Artificial Sequence
  derived and/or modified sequence
atggccggcccccaggagaccgtgctggccctgcccctgcgggagggggtgcaggcagccgccacggtgcccatactcttgtataatctcgaagacggcttaagcgaccaccctctcgaccagggcccacggtgtccggcaaggcgaccttgcagccccgcaagcgccccagcgccgaccagccctaagaaacccaaaatccaggcgcccggcgagacctttcccaccgactggagtcctccccctgtggagttcctaaacccgagagtgcttcaagcttcacgcgaggcgcccgcgcaaaggtgggtaggggtcgttggtccacaagggctcagaaggcttgccggtgagcttccagaagaattggagcaggaacacctcgacctcgacccaaaacgtggcctagctctccctgagaagctgttttggaacacgagcggcctgtcccaacaggcggccgcccctgagtttagctggggaggctcggggagctactttaacaacttggattatttgctccaggaaaagagagaacaagccctggagcaggagagagagcgacttttgttgcaagaatgcctgaatttaaattcattggacctggacgaggaggaagttcccttaacgccagaacatcgaatgcttgtcgaaaaatactcggttagcttacaaaccatcccacccgtccacccaggggaaacggttttcctgccgcggtgccatcccttaccttgtatactggactccagtctccttaaaccacgctcgcacctggagggcctgttccttagctccccaccggcacaacagctctcttttctgcggagcggccttctgaacatactgtaccttcatatgccggattgtcctgtgagccttctgcagtggctgtttcagctcctgacctggcctccggaaacttctctaggcgccttcggactgttatgggacctgatcgtcgacggcatctttttgcaaccagacgaggataaacacctctggtgcccatcactccaagaagttcgggaagccttccattccctaggcgcccattccccagccctgtacccacttggacctttttggcacggcgggcgcgtcttacccggggaagcaggcctgaatgaaaacgaggagcaggatgccccacaggaaatcgcactcgacatcagtctcggacatatctacaagtttctagccctttgcgctcaagcacagccgggggcgtataccgacgagaatctgatggggcttatcgaattgctgtgtcgtaccagtttggatgtgggtctcaggctacttcccaaagtggatctgcagcagctgctgttgcttctccttgaaaatatcagagaatggcctggtaagttacaagaactctgctgcacactgagttgggtgtccgaccatcaccacaacttactggctctggtgcagtttttcccagatatgacctcccggagcagaagactacgtagtcagctatctcttgttgtcattgctcgaatgcttggtcagcaggagatgctgccactgtggcaggaaaagacccagctgtcatcactgagtcggctcctcggtctcatgagaccgtccagcctgaggcagtacttggacagcgttccactacccccgtgtcaggaacaacagcctaaggcaagtgcagagctcgatcacaaagcttgttatctttgtcactccctcctcatgctcgcaggcgtggtcgtgtcctgccaggacataaccccggaccagtggggcgaacttcagctgctctgcatgcaacttgatcggcacatctcaacacagattcgagaatctccacaagcaatgcaccgcaccatgcttaaagatctggctacccagacgtacatccgatggcaggagctgctgacccattgccagcctcaggcccagtacttcagtccatggaaggatatctag

SEQ ID NO: 43642 - DNA, 2484 bp, Artificial Sequence
  derived and/or modified sequence
atggcccacgagcgggagatcctgaagggcatgtacgaggagctgaaagagaaatcccataaaccagacgtggagctgattcagcaccgagcatggagaatagacatggtcagcaccgagctggagtcatttagaaaggcatcttacattgagtccgggccagaggagttttatcaaaggttcaaaaaatgcttctcagcgacccacattttcatctcaattaagggtaaagactcacaaaacacagcccatgggtatttgatactgaatcgaacactgcaccagcagctgaaaatcaagaacccatttctggcacctagcagtgaggccgtcaggattcccgctactctgccacatcccggagctctgccttttcctccttatgtagctaaagcatcgagcgacgagctgctgaacttgcagaagccacttcagtcagccctagggtttgtgattctgagatcttcccagaactggaactccaaaaatcgccagaggtggtcacgcacaaaggccggacaaatgtcccacggtctccagatggctgggcctcaggagactgttctggccctaccactgagagagggtgtacaagccgctgcaaccgtgcctatcctgctatataacctggaagacggcttgagcgatcatcccctggaccaaggcccccggtgtcctgctcgtcgcccttgctcgcctgcctcagcacccgcacctacctctccaaagaaaccaaagatccaggcccctggggaaactttccctactgactggtctccaccaccagttgagttcctgaacccccgcgtcttacaggcaagtcgcgaagcgcctgcccagcggtgggtcggagtagtcggcccacagggattacgcagactggccggcgagctgcccgaagaattagagcaggagcatctagacttggaccctaagcgtgggctagccctgcccgaaaaactattctggaacacatccgggttatcacagcaggctgccgctcccgaattctcctggggcggctctggcagctactttaacaacctggattacctattacaggaaaaaagagaacaggcactcgaacaggagcgggagaggcttttactgcaggaatgtttaaacctgaatagccttgacctggacgaggaggaagtccctttaacaccagaacataggatgctagtggaaaagtactctgtcagtttgcaaacaataccaccagtgcaccctggtgagacagtgtttttaccaaggtgccatcctctgccatgcatcctggattcttcgttgctcaagcccagatctcatctcgaaggtcttttcctcagcagcccaccagcgcaacagcttagcttcctgcgctccggactgttgaacatcctgtacttacacatgcctgactgcccagtctctctactccaatggctgtttcagttactgacatggccacctgaaacttccctgggagcctttggattgctgtgggatctcatcgtagacgggatctttctccaacccgacgaagacaagcacctgtggtgtccatccttgcaggaggtccgggaagcatttcactctctaggcgctcattctccagcactgtaccctctgggaccattctggcatggcggacgggtcctgcctggagaggcaggcctcaatgaaaatgaagaacaggacgcccctcaggaaatcgcactagacatttccttggggcatatttacaaatttctggctttgtgcgcgcaagcgcaaccaggcgcctatacagacgagaacctcatgggcctgattgagcttctgtgcaggaccagtcttgatgtggggctgcgtctcctgccaaaggtcgaccttcagcaactgttgcttctgcttttggaaaatataagagaatggcctggaaagctgcaagaactgtgctgtaccctgagctgggttagtgatcatcatcacaatcttctcgctctggtgcaattcttccctgacatgacttcaaggtcccgacgcctcaggtctcagctctcattagtggtgatcgcgcgaatgctggggcaacaggaaatgctgcctttatggcaggaaaaaacacagctgtcaagtctctctcgcttgctggggctgatgcggccctcgtctctgagacagtatcttgacagcgtacccctgcccccatgtcaggaacaacagcctaaggctagtgccgagctagatcacaaggcctgctacctatgccattccttgctgatgcttgctggagtcgtcgtttcctgccaagacataacgcctgatcagtggggagaactgcagttactctgcatgcagctggacaggcacatttcaacgcaaattagggaaagtccccaagcgatgcaccgtaccatgctgaaggacctggcaacacagacttatattaggtggcaagagctcctgacgcactgccaacctcaggcgcagtatttctctccgtggaaagatatatag

SEQ ID NO: 43643 - DNA, 2040 bp, Artificial Sequence
  derived and/or modified sequence
atgtggccccggctgcccggcgccggcctggccccccagctgcggcgccaggatcaaagattgcacttcacaggccagatgtctcatggcttacaaatggccggcccacaggagacagtattagcactccctctccgcgaaggggtccaggcggcagccacagttcccatactcttatacaacctggaagacggtcttagcgatcacccgctcgaccagggcccccggtgcccagcacgccggccttgctccccggcaagcgcacctgccccaacctcgccaaagaagcctaagatccaggctcctggagaaacttttccaaccgattggagtcctcctcccgtggaattcctgaaccctcgggtcttgcaggccagccgggaagctcctgcccagcggtgggtaggggtcgttggcccacagggcttgcggcggctggccggcgagctgcccgaggagctggagcaggagcatttagaccttgacccgaaacgcgggcttgccttgccagaaaagctgttctggaacacctcaggcttaagccagcaggctgcagctcccgagttctcctggggcggtagcggcagctactttaacaatctcgactacctgttgcaggaaaaaagggaacaggccctggagcaggaacgcgaaagactgctgctgcaggagtgtttgaacctcaacagcctggatctggatgaagaagaagtgccactaacccctgaacacagaatgttggtggaaaagtactcagtatcactgcaaactataccccccgtgcaccctggagaaacagtcttcttgccaagatgccaccctcttccctgtatcctcgattcaagcttgttaaagccgcgatctcatcttgagggactgtttctgtccagccccccagcacagcagctctcatttctgcgctcaggcttgttgaacatcctctacttgcatatgccagattgccccgtttccctgctacaatggctgttccagttattgacttggcctcccgagacaagcctcggtgcttttggattgctttgggacttgatcgtggatgggatctttctgcagcctgacgaagacaagcatctgtggtgtcctagcctacaggaggtgcgagaggccttccactcccttggggcccactcacctgccctgtatccactcggtcccttctggcacggcggccgtgtcctaccgggcgaagctggtctcaatgaaaatgaagaacaggacgctccccaggagatcgccctggatattagcctggggcacatatacaagtttcttgccctgtgcgcacaggcgcagccaggagcatataccgacgaaaacctgatgggactgatagaacttttgtgcaggacaagtcttgacgttgggttgcgccttctgcctaaagtggaccttcagcagttgttgttgcttctgctcgagaatatcagagaatggccgggtaaactgcaagagctgtgctgtacactttcctgggtgtcggaccaccatcacaacctcctggcgctggtacaattcttcccagacatgacctccagaagccgtcgcttaagaagtcagctgagtctggtagttattgcccgcatgctcggacaacaggaaatgctgccactctggcaggagaagacacaactttcgtcactttccaggcttctgggactgatgcgacccagctctctgcgccagtatctagatagtgtgcccctccccccatgtcaggagcagcagccgaaggctagtgcggaactcgaccataaagcatgttatctgtgccacagtctcttaatgctggctggcgtggtggtgagctgccaggacatcactccagaccaatggggtgagctgcagctgctgtgcatgcagctcgacaggcatatctccactcaaatccgagaatctcctcaggccatgcaccgtactatgctgaaggatctggcgacgcagacatatatacgttggcaggaattactgactcattgtcagcctcaggctcaatatttctccccttggaaggacatttag

SEQ ID NO: 43644 - DNA, 1944 bp, Artificial Sequence
  derived and/or modified sequence
atggccggacctcaagagactgtgctcgccctgccccttcgcgaaggggtccaggccgctgccactgttcccatcctgctgtacaatcttgaggacgggctgtccgatcacccactcgatcagggtccccgttgtcctgcgcgaaggccatgctccccagccagtgcaccagcaccaacgtccccaaagaaaccaaagatccaggccccaggtgaaacttttccgaccgactggtcaccgcctcctgtggagtttctgaaccccagagtactccaggcctctcgcgaagccccagcccagcgatgggtcggggtggtggggcctcaagggctgaggcgactggctggagaactacccgaggaactagaacaggaacacttggatctagacccaaaaagagggctggcattgcccgaaaagttattctggaacacgagtggcctgtcccagcaggctgccgctcctgaatttagctggggcggaagtgggagctacttcaacaacctggactacctcctgcaggagaaacgagaacaagctctggaacaggagcgggagcggctactgttacaggaatgtcttaatctcaattcactagacctggatgaggaggaggtgcctcttacgcccgagcacaggatgctggtagagaagtactcagtatcacttcagactatcccacccgtgcaccctggggaaactgtgttcctgccaagatgtcacccccttccttgcattctggattcgagccttctgaagcccagatcccacctggagggtctgtttctttcttccccacccgcacaacagttgagttttcttcgctcgggactgcttaatattctgtatctgcatatgccagactgcccggtttcgctgctgcaatggctctttcagctcttaacttggccacccgaaacgtcactgggagcttttggccttttatgggatttgattgtcgatgggatcttcttacagcccgatgaagacaagcatttatggtgtccctctttacaggaagtgcgggaggcattccactcactgggagctcactcacctgccctgtaccccctgggacctttctggcacggcggaagggtactgcctggtgaggctgggctgaatgaaaacgaggagcaggatgctccacaggagattgctttagacataagcctgggccacatttacaaatttctggccctatgcgctcaggctcagccaggcgcatacactgatgagaatttgatgggcctgatagagctgctctgtcggacgtcactcgacgttggactgcggctgctgccaaaagtggaccttcaacaattgctgctgctcttactggaaaatattcgagagtggcctggaaaactgcaggagctgtgttgtaccctgtcctgggtgtccgatcatcaccataaccttctcgcacttgtgcagtttttccccgatatgacaagccgtagccggcgtttgcggtcgcaattaagcctggtggtgatcgctagaatgctcggacagcaggagatgctccctctgtggcaggaaaaaacacaactttcctcattgtctcggctgctggggctcatgaggccaagcagcctgcgccaatacttagacagcgttcctttgcccccttgccaggaacagcaaccaaaagcaagcgccgaacttgatcataaagcatgttatttgtgccatagcttgctcatgcttgccggagtcgtggtctcgtgccaggacatcacccccgatcaatggggggaactccaactactttgtatgcagctagacagacatattagtacacagatccgagaaagccctcaagccatgcataggacgatgctcaaagatctggctacacaaacatatatccggtggcaggagctgctgactcattgccagccacaagcccagtatttttctccctggaaggacatctag

SEQ ID NO: 43645 - DNA, 2484 bp, Artificial Sequence
  derived and/or modified sequence
atggcccatgaacgagagatcctgaagggaatgtatgaagagttgaaagaaaaatctcacaagcctgatgtcgaacttatccaacacagagcatggcggattgatatggtttctactgagctggagtcttttcgaaaggcatcctatatcgagagtgggcctgaggagttctatcagcgattcaaaaagtgtttctcagctactcatatcttcatctcgattaagggtaaagattctcagaacaccgctcatggatacctaatactcaacagaacgcttcaccagcagctgaagattaagaacccatttctcgctcctagcagtgaagctgtcagaatccccgctacacttccacatcctggagcacttcctttccccccttatgtcgccaaggcttcatccgatgaactcctgaatctgcagaagcctctccagagtgccctgggctttgttattctgcggagctctcagaattggaacagcaagaatcggcagagatggtccaggaccaaggcgggtcagatgtcccatggcctccagatggccggtccacaggagaccgtactggctttgcctcttcgcgagggcgtccaggccgctgctacagtgcctatccttctctataaccttgaagacggcctcagcgaccatccccttgaccaggggcctcgctgtcccgcacgcaggccctgcagccctgcgtctgctcctgcgcctacatcaccaaaaaagcctaaaatacaggcaccgggtgaaacgttccccaccgattggagccctcctccagtcgaattcctcaaccctcgtgttctgcaggcatcgcgagaggctccagcccagagatgggtgggcgtggttggccctcaggggctccggaggctggctggcgaactgccggaggagttggagcaggagcacctcgatctcgacccgaaaagaggtctcgcccttcccgagaaactattttggaacacatctgggctttctcagcaggctgcagcccctgaattttcgtggggcggtagcggatcctatttcaacaacctggactacttactgcaggaaaagagagagcaggctttggaacaggagagagaaagactgctgctgcaagagtgtttgaatctgaattcactggacctcgacgaagaggaggtgccgctgactccggagcataggatgctggtggagaaatattccgtgagcttgcagacaatccctccagtccacccaggggaaacagtgttcctcccacgttgccatccactgccgtgcattctggacagcagcttgcttaagccacggtcccacctcgaaggcctgttcctgagctcaccacctgcccagcagctttcattccttaggagcggcctgctgaacatactctatctgcacatgcctgattgccccgtgtctttgctgcagtggctgttccagctgctcacgtggccacctgaaacatccttgggtgctttcgggctgctttgggacttgatcgttgatggaatattcctgcagccggacgaggacaaacatctgtggtgcccttccctgcaggaagtacgcgaagcttttcacagcctgggtgcgcattccccggcattataccctctgggaccgttctggcatggcggaagagtattgcctggggaggcaggactgaacgagaacgaggaacaggacgccccacaagagatagccctggacatttcactcggccacatctacaagtttctcgccctttgtgcgcaggcccaacctggagcctacacagacgagaacctcatgggcctgatcgaactcctgtgtcgtacatctctggacgtgggattaaggctgttgcccaaagtagacctccagcagctgctgcttctgttgctggaaaacattcgtgagtggcccggtaagctgcaggagttgtgctgtaccctatcgtgggtgtccgatcaccaccacaacctgctagccctcgtgcagttttttcctgacatgactagcaggagccggagacttaggtcacaactcagtctggtagtaattgcacggatgcttggccagcaagagatgctgcctttgtggcaggagaaaacccaattgtcctcactgagcagattgttaggtctaatgaggccctcttcacttagacaatatctcgattcggtccctctgcccccatgtcaggaacagcaaccaaaggctagcgcggaattagatcacaaggcctgctatctgtgccactctctgcttatgcttgctggagtcgttgtttcctgtcaggatataactccagaccagtggggagaacttcagctgttgtgcatgcagctggatagacatatttcaacgcaaatcagggaatccccacaggcgatgcaccggaccatgctgaaagatctcgcaacgcagacctacattcgctggcaggagttgctcacccactgtcagccacaagctcaatacttctcaccgtggaaggacatctag

SEQ ID NO: 43646 - DNA, 2040 bp, Artificial Sequence
  derived and/or modified sequence
atgtggccacggctccccggtgctggtctcgctcctcagttgagacgacaggatcagagattgcatttcacggggcaaatgagtcacggacttcagatggccggtccccaggagacagtccttgcattacccctgcgcgaaggagtccaggcagcggctaccgtgccaatcctgctctacaacctcgaggacggcctgagcgatcatccactggaccagggaccgaggtgtcctgcacgacggccatgctcacccgcatcagcccctgccccaacgtcccccaagaagcccaagattcaagcccctggggaaacatttcccactgactggtccccccctcccgtggagttcctgaatcctcgtgtgctacaggcatccagggaagcccctgcgcaaagatgggtcggcgttgttggaccacaaggcctccgcaggctggccggagaactgccagaagaactcgagcaggagcatttggacctcgatcccaaaagaggactcgctctccctgagaagctattctggaacaccagcgggttgtctcagcaagcagctgcgcctgagttttcttggggtggatctggctcctattttaataacctggattatctgctgcaggaaaagagagaacaggctctcgagcaagaaagggaacgccttctattacaggagtgcctgaacctcaattctttggatttagacgaagaggaagtgccccttacacccgaacaccgaatgctggtcgaaaagtactcagtctctttacagaccatccccccagtgcatccgggagagaccgtgttcttgcccagatgccaccctctcccatgcattctcgactcctcccttctgaaacccaggtctcacctcgagggcctgtttctgagcagtccgccagctcagcagctgagctttctgagatcaggactgttaaacattttgtacctgcacatgcccgactgtcccgtctccttgctccagtggctttttcagctcctcacttggccacctgaaacctcattgggcgcatttgggctgctttgggacctgatcgtggacggcatttttttacaacccgatgaggacaagcatctctggtgcccatctctgcaagaggtgcgtgaagccttccatagcctgggcgcacactcacctgccttataccctcttggtcccttttggcatggcggacgcgtacttcccggtgaggctgggctgaacgaaaatgaggaacaggatgccccacaagagattgctctcgatatctctctcgggcacatttacaagttcctcgcactctgtgcccaggcacaacccggtgcttataccgacgagaatctgatgggcctgatcgaactgctctgtaggacttcactggacgtcggactgaggctcctgcccaaagtggacctgcaacagctgctgttgctgctgctcgaaaatattcgggagtggccaggaaagttgcaggaactgtgttgcacactttcatgggtcagcgaccatcatcacaacttactggctttggtccagttttttccagacatgactagccgaagcagacggctgaggtcccagctatctctagttgtaattgccaggatgctcgggcaacaggaaatgctgcccctgtggcaggagaagacccaacttagttccctgagtaggctcctggggttgatgaggccaagttccctaaggcaatacctagactcagtgcctctgcccccatgccaggagcagcaaccgaaggccagcgctgaactggaccacaaggcctgttacctgtgtcacagcctgctgatgctggccggagtggtggtttcttgccaagacatcacccccgatcaatggggggagcttcagttgctatgtatgcaactggaccgccacatctccacccaaatccgggagtctccccaggccatgcatcggacaatgctgaaggacctggcaacccaaacctacatcaggtggcaggaattattaactcattgccagcctcaagcccagtatttttctccgtggaaggacatttag

SEQ ID NO: 43647 - protein, 1210 aa, Artificial Sequence
  derived and/or modified sequence
MRSRSNSGVRLDGYARLVQQTILCHQNPVTGLLPASYDQKDAWVRDNVYSILAVWGLGLAYRKNADRDEDKAKAYELEQSVVKLMRGLLHCMIRQVDKVESFKYSQSTKDSLHAKYNTKTCATVVGDDQWGHLQLDATSVYLLFLAQMTASGLHIIHSLDEVNFIQNLVFYIEAAYKTADFGIWERGDKTNQGISELNASSVGMAKAALEALDELDLFGVKGGPQSVIHVLADEVQHCQSILNSLLPRASTSKEVDASLLSVVSFPAFAVEDSQLVELTKQEIITKLQGRYGCCRFLRDGYKTPKEDPNRLYYEPAELKLFENIECEWPLFWTYFILDGVFSGNAEQVQEYKEALEAVLIKGKNGVPLLPELYSVPPDRVDEEYQNPHTVDRVPMGKLPHMWGQSLYILGSLMAEGFLAPGEIDPLNRRFSTVPKPDVVVQVSILAETEEIKTILKDKGIYVETIAEVYPIRVQPARILSHIYSSLGCNNRMKLSGRPYRHMGVLGTSKLYDIRKTIFTFTPQFIDQQQFYLALDNKMIVEMLRTDLSYLCSRWRMTGQPTITFPISHSMLDEDGTSLNSSILAALRKMQDGYFGGARVQTGKLSEFLTTSCCTHLSFMDPGPEGKLYSEDYDDNYDYLESGNWMNDYDSTSHARCGDEVARYLDHLLAHTAPHPKLAPTSQKGGLDRFQAAVQTTCDLMSLVTKAKELHVQNVHMYLPTKLFQASRPSFNLLDSPHPRQENQVPSVRVEIHLPRDQSGEVDFKALVLQLKETSSLQEQADILYMLYTMKGPDWNTELYNERSATVRELLTELYGKVGEIRHWGLIRYISGILRKKVEALDEACTDLLSHQKHLTVGLPPEPREKTISAPLPYEALTQLIDEASEGDMSISILTQEIMVYLAMYMRTQPGLFAEMFRLRIGLIIQVMATELAHSLRCSAEEATEGLMNLSPSAMKNLLHHILSGKEFGVERSVRPTDSNVSPAISIHEIGAVGATKTERTGIMQLKSEIKQSPGTSMTPSSGSFPSAYDQQSSKDSRQGQWQRRRRLDGALNRVPVGFYQKVWKVLQKCHGLSVEGFVLPSSTTREMTPGEIKFSVHVESVLNRVPQPEYRQLLVEAILVLTMLADIEIHSIGSIIAVEKIVHIANDLFLQEQKTLGADDTMLAKDPASGICTLLYDSAPSGRFGTMTYLSKAAATYVQEFLPHSICAMQ

SEQ ID NO: 43648 - DNA, 3633 bp, Artificial Sequence
  derived and/or modified sequence
atgaggagtcgctctaattccggtgtcagacttgatggctacgctagattagtgcagcaaacaatcctgtgtcaccaaaatcccgtgacaggcctactgcccgccagttatgaccagaaggatgcatgggtgcgagataatgtatattctattctcgcagtatggggactcggattggcgtatagaaaaaatgcagaccgcgacgaggataaagccaaggcatacgaattggaacagtcagtggtgaaactgatgagaggactgcttcattgcatgatcagacaagtcgacaaagtcgagtcattcaaatacagccagtcgacgaaggacagtctgcatgccaagtacaacacaaaaacctgcgctacagtcgtcggggatgaccagtggggtcatctccagttagacgccacctcagtatacttactattcctcgcgcaaatgacagcaagtggactgcatatcattcactcactcgatgaagtgaattttatccagaatctagtcttttatattgaggccgcttacaagaccgccgactttgggatctgggagcgcggcgacaagacaaatcaggggatctccgagctgaatgcctcctccgtgggcatggcgaaggcggctttggaggcactggatgagctggatctttttggtgtaaaaggcggaccccagagtgtgatccacgtgctcgccgacgaagtccagcattgtcagagtattctgaactcactgttgccccgtgcttcaactagcaaagaagttgatgccagtctgctgtccgttgtgagttttcccgcctttgccgtggaggacagccagctggttgaattaacaaagcaagaaatcatcacaaagctacaggggagatatggctgttgtagattccttcgtgatggctataagactccaaaggaagatcccaacaggctttactatgagccagccgaattaaaattgtttgagaatatagaatgtgagtggcctctgttttggacctatttcattttggatggggtgttcagtggaaacgctgaacaggtccaggagtacaaggaggccctggaagctgtgttgatcaagggaaaaaacggggtgcccctgttgcccgagctatattccgtcccccctgaccgggtggatgaagaatatcagaacccacacacagtagacagagtacccatgggaaagcttccccatatgtggggccagtctctgtatatccttgggagcttaatggccgagggttttctcgcccctggggaaatagaccctctgaataggcggttttctacagttcctaagccggatgtggtggtccaggtgagcattctggctgaaactgaggaaattaagactatcctgaaggacaaagggatatacgtggaaacgattgcagaggtgtatccaatcagagtgcagccagctcgcattctttcacacatttactccagcctgggttgcaacaacaggatgaaactctccgggcgaccttaccgccatatgggggttctcggtactagcaagctttacgatattaggaaaacaatcttcacgtttaccccccaattcatcgaccagcagcaattttatcttgctctcgataataagatgatcgtggaaatgttgagaactgacctcagctacctgtgttctcggtggcggatgacaggccagccaacaatcaccttccccatcagccattcaatgctagatgaagacggaacgagcctcaactcctcaatcctagctgccctgaggaagatgcaggacggttatttcggcggtgcacgggtgcagacagggaagctgtctgagtttttgaccacctcctgctgcacgcacctgagcttcatggatccaggaccagaaggtaagctgtactcagaagattacgatgacaactacgactatttagaatcaggaaactggatgaatgactacgacagtacctctcatgcaaggtgtggagatgaagtggctcggtatctggatcacctcttggcccacaccgcaccccatcccaaactggctcctacctcacagaagggcggcctcgatagatttcaagcagcagtccagacgacttgtgacttgatgtctctggtgactaaggccaaggaacttcacgtccagaacgtgcatatgtacctgcccaccaagttatttcaagcctcccggccatcatttaacttgctcgatagtccccaccctcggcaagaaaaccaagtgcctagtgtgagagtggaaatccacctgccgagagaccagtctggtgaggtcgactttaaggcgctggtcctccagctgaaggagacaagttccctacaagagcaggctgatattctgtacatgctgtacacaatgaagggaccggactggaacactgagctctataatgaacgaagtgctaccgtgagagagttactgacagagctttatggcaaagtgggtgagataagacattgggggttgattcgatacataagcggaatcctgcggaagaaggtcgaggccctcgacgaggcctgcactgacctgctgtcacaccaaaagcacctcacagtgggccttccacccgaacctcgggaaaaaaccatcagcgcacctcttccgtatgaggcgctcacccaactaatagacgaggcctccgagggcgatatgtccataagcatcctgacacaggaaatcatggtttacttagcgatgtatatgcggacacagccaggactcttcgctgaaatgttccggcttcgcatcgggctgataatacaggtaatggccacagagctggcccactctcttcggtgctcggcggaggaggctacagaaggattgatgaacctgagcccatccgctatgaagaatcttttacatcatatactgagcggcaaagagtttggcgtggagaggtctgtgaggccaacagattcaaacgtgtcccctgcaatctctatccatgagatcggagcggttggcgcaacaaaaaccgaacgcactggtattatgcagttgaaaagcgaaatcaagcagagccctgggacatcaatgaccccttcgtctggctcttttccctcggcctatgaccaacaatcgtctaaagatagtcggcagggacaatggcagcgtaggaggcgacttgatggggcattgaaccgcgtgccggttggtttctatcaaaaggtttggaaagttctgcaaaaatgccacggactgagcgtggaaggatttgttctgccttcttcaaccacacgggagatgactcctggtgagattaagtttagcgtccacgtggaaagcgtcttgaatagagtgcctcagccagaataccggcaactcctcgttgaagctatcctagttctaactatgctggcagatattgaaattcattctattggtagcataatcgccgtcgagaagattgttcatattgccaatgaccttttcctgcaagaacagaagacgctcggcgccgatgatactatgctggcgaaagatcccgccagcggcatctgtactttgttatacgattccgcaccctccggtcggttcggaactatgacttacctctccaaggccgctgcgacctatgtgcaggaatttcttccccattcaatctgtgctatgcagtag

SEQ ID NO: 43649 - DNA, 3633 bp, Artificial Sequence
  derived and/or modified sequence
atgaggagccgcagcaacagcggcgtgcggctggatggctacgcccggctggtgcagcagaccatcctgtgccaccagaaccctgtgacaggcctgctgcctgccagctatgaccagaaggatgcctgggtgcgggacaacgtgtacagcatcctggccgtgtggggcctgggcctggcctacaggaagaatgctgacagagatgaggacaaggccaaggcctatgagctggagcagagcgtggtgaagctgatgaggggcctgctgcactgcatgatccggcaggtggacaaggtggagagcttcaagtacagccagagcaccaaggacagcctgcacgccaagtacaacaccaagacctgtgccaccgtggtgggagatgaccagtggggccacctgcagctggatgccacctctgtgtacctgctcttcctggcccagatgacagccagcggcctgcacatcatccacagcctggatgaggtgaacttcatccagaacctggtgttctacatcgaggccgcctacaagacagctgactttggcatctgggagcggggggacaagaccaaccagggcatcagcgagctgaatgccagctctgtgggcatggccaaggccgccctggaggccctggatgagctggacctgtttggagtgaagggcggcccccagagcgtcatccacgtgctggctgatgaggtgcagcactgccagagcatcctgaacagcctgctgccccgggccagcaccagcaaggaggtggatgccagcctgctgtctgtggtgtccttccctgcctttgctgtggaggacagccagctggtggagctgaccaagcaggagatcatcaccaagctgcagggccgctatggctgctgccgcttcctgagagatggctacaagacccccaaggaggaccccaacagactctactatgagcctgctgagctgaagctgtttgagaacattgaatgtgagtggcccctcttctggacctacttcatcctggatggagtcttctctggaaatgctgagcaggtgcaggagtacaaggaggccctggaggccgtgctgatcaagggcaagaatggagtgcccctgctgcctgagctgtacagcgtgcccccagacagagtggatgaggagtaccagaacccccacacagtggacagagtgcccatgggcaagctgccccacatgtggggccagagcctgtacatcctgggcagcctgatggccgagggcttcctggcccctggagaaattgaccccctgaacagacgcttcagcacagtgcccaagccagatgtggtggtgcaggtgtccatcctggccgagacagaggagatcaagaccatcctgaaggacaagggcatctacgtggagaccatcgccgaggtgtaccccatccgggtgcagcctgcccgcatcctgagccacatctacagcagcctgggctgcaacaacaggatgaagctgagcggccggccctaccgccacatgggcgtgctgggcaccagcaagctgtatgacatcaggaagaccatcttcaccttcaccccccagttcatcgaccagcagcagttctacctggccctggacaacaagatgattgtggagatgctgaggacagacctgagctacctgtgcagccgctggaggatgacaggccagcccaccatcaccttccccatcagccacagcatgctggatgaagatggcaccagcctgaacagcagcatcctggccgccctgaggaagatgcaggacggctactttggaggagcccgggtgcagacaggcaagctgtctgagttcctgaccaccagctgctgcacccacctgtccttcatggaccccggccctgagggcaagctgtacagcgaggactatgatgacaactatgactacctggagagcggcaactggatgaatgactatgacagcaccagccacgcccgctgtggagatgaggtggcccgctacctggaccacctgctggcccacacagccccccaccccaagctggcccccaccagccagaagggcggcctggaccgcttccaggccgctgtgcagaccacctgtgacctgatgagcctggtgaccaaggccaaggagctgcacgtgcagaatgtgcacatgtacctgcccaccaagctgttccaggccagccggcccagcttcaacctgctggacagcccccacccccggcaggagaaccaggtgcccagcgtgcgggtggagatccacctgccccgggaccagagcggggaggtggacttcaaggccctggtgctgcagctgaaggagaccagcagcctgcaggagcaggccgacatcctgtacatgctgtacaccatgaagggccctgactggaacacagagctgtacaatgaaagaagtgccaccgtgcgggagctgctgacagagctgtatggcaaggtgggggagatccgccactggggcctcatccgctacatcagcggcatcctgaggaagaaggtggaggccctggatgaggcctgcacagacctgctgagccaccagaagcacctgactgtgggcctgcccccagagccccgggagaagaccatcagcgcccccctgccctatgaggccctgacccagctgattgatgaggccagcgagggggacatgagcatcagcatcctgacccaggagatcatggtgtacctggccatgtacatgaggacccagcccggcctgtttgctgagatgttccggctgcgcatcggcctcatcatccaggtgatggccacagagctggcccacagcctgcgctgcagcgctgaggaggccacagagggcctgatgaacctgagccccagcgccatgaagaacctgctgcaccacatcctgagcggcaaggagtttggagtggagaggtctgtgcggcccacagacagcaatgtgtccccagccatcagcatccatgaaattggagctgtgggcgccaccaagacagagaggacaggcatcatgcagctgaagtctgagatcaagcagagccctggcacctccatgacccccagcagcggcagcttccccagcgcctatgaccagcagagcagcaaggacagccggcagggccagtggcagaggagaagaaggctggatggagccctgaacagagtgcctgtgggcttctaccagaaggtgtggaaggtgctgcagaagtgccacggcctgtctgtggagggctttgtgctgcccagcagcaccacccgggagatgaccccaggagagatcaagttctctgtgcacgtggagagcgtgctgaacagagtgccccagcctgagtaccggcagctgctggtggaggccatcctggtgctgaccatgctggccgacatcgagatccacagcatcggcagcatcatcgctgtggagaagatcgtgcacatcgccaatgacctcttcctgcaggagcagaagaccctgggcgcagatgacaccatgctggccaaggaccctgccagcggcatctgcaccctgctgtatgacagcgcccccagcggccgcttcggcaccatgacctacctgagcaaggccgccgccacctacgtgcaggagttcctgccccacagcatctgtgccatgcagtag

SEQ ID NO: 43650 - DNA, 3633 bp, Artificial Sequence
  derived and/or modified sequence
atgcggagccggagcaacagcggcgtgcggctggacggctacgccaggctcgtacagcagactatattgtgtcaccaaaatccggtaaccggtctcctccccgccagctatgatcagaaagacgcctgggtgcgggataatgtgtattcaattctggctgtgtggggactggggctggcttaccggaagaatgcagacagagatgaagataaagctaaggcatacgaacttgaacagtccgtggtgaagctcatgcgtggcctcctccattgtatgataagacaagtagacaaagtcgaatctttcaagtacagtcagtcgaccaaagactctcttcacgcaaagtataacaccaagacctgcgctaccgtggtgggcgacgaccagtgggggcacttacagctcgatgcaacaagtgtgtacctgttgtttcttgctcagatgacggcctctggattgcatatcatacatagtctggatgaagtgaacttcatccagaacctggtgttctacatcgaggcagcctataagaccgctgattttggcatttgggagaggggggacaagacaaaccagggcatttccgagttaaatgccagttccgtggggatggctaaagcggcactggaagcccttgacgagctagatctctttggagtcaagggaggaccccaatccgttattcatgtactagccgatgaagtccagcactgtcagtcaatcttaaactccctgctccccagagcctccacatctaaggaggttgacgcttccctgctgtctgttgtctctttccctgcatttgccgtggaagacagccagctggttgagttaactaaacaggagataattacaaagttgcagggccgttacgggtgctgtagatttctccgcgatggatacaagacccccaaggaggaccctaaccgtctatattatgaacccgccgaactgaaactgtttgaaaatattgagtgcgaatggcctctcttctggacttacttcattctggacggtgtgttcagcggcaatgccgaacaggtccaggaatacaaggaagctctggaggccgtactgataaagggaaaaaatggggtgccactgttacccgaactgtacagcgtccctccggatcgtgtcgacgaggaataccagaacccacacaccgtcgatcgagtgcctatgggcaaattgcctcacatgtggggccagagtttgtatatccttggctctcttatggctgaaggattcttggcgcccggagaaattgaccctttaaatcgacgtttcagtacagttcctaagccagacgtggtggttcaggtcagcatactagccgaaacagaagaaatcaagaccatcctgaaagacaaaggcatatacgtggaaaccatcgccgaggtctacccaatacgcgtgcagccggctaggatactctcccacatctacagttctttaggatgcaacaatcgcatgaaactttcagggcgaccctacagacacatgggtgtactgggcaccagcaagctatacgacatccggaaaacaattttcacattcaccccccagttcattgatcaacagcaattctatttggcactggataacaaaatgatcgtcgagatgctcaggactgacctgtcctacttgtgcagccgttggagaatgacgggacaacccaccatcacattccccatcagccactcaatgcttgatgaagacggaacttctttgaattctagcatcttggcggctctccgtaagatgcaggacggctattttggcggcgcaagggtacagaccgggaagctgtctgagtttctgaccaccagttgctgcacacatctgtccttcatggacccaggtcctgaaggaaagctctactccgaggattatgatgacaattacgattatcttgagagtgggaactggatgaatgactacgactcaacttctcatgccaggtgtggagacgaggtggccagatatttagaccatctcttggcccatactgcccctcaccccaagctggcccctacaagtcagaaaggggggctggaccgatttcaagcagccgtgcagaccacctgcgacctgatgtcactcgtgactaaagccaaggaactgcacgtgcagaatgtccacatgtatttgcccaccaagttgttccaggcatctcgaccaagtttcaatctcttagatagcccgcaccccaggcaggaaaatcaagtgccctccgttagagtggagatacatcttcctcgagaccaaagtggggaggtggattttaaagcgcttgttctgcagttaaaggagacctccagtttacaggaacaagccgacattctatacatgttatacactatgaaggggccagactggaatacagagctctacaacgaacggtccgcgacggtgcgggaattgcttactgaactttacgggaaagtaggcgaaatccgtcactggggcctgatacgatacataagcggcatattgcggaaaaaagttgaagcactggacgaagcatgtacagatcttctgagccaccagaaacacctgaccgtcggtctgcctcctgagccccgggaaaaaactatctcggcaccacttccctacgaggcacttacccaactgatcgatgaggctagcgaaggcgatatgtctatcagtatcctgacccaagagatcatggtttacctcgctatgtatatgcggacacagcccggactcttcgcggagatgtttagattacgcatagggctgatcattcaagtcatggcgacagaactcgcacattcgctccgctgtagcgccgaggaggccacagaaggccttatgaatctgtctccgtctgccatgaagaacctcctgcaccacatcctgagtggaaaagagttcggagttgaaagatctgtaagaccgacagactctaacgtttcacctgcgatcagcatccacgagattggagcagtgggtgccacaaagacagagcggactggtatcatgcagctcaagagcgagattaaacagtcccccgggacatcgatgaccccatcttcaggaagcttccccagcgcatacgaccagcaatcatcaaaggattctcggcagggacaatggcagcgccgacggagactagacggagctttaaatcgagtgccagtaggattctaccagaaagtttggaaagtgctacagaagtgccacggacttagcgtcgagggctttgtcctccccagctcaaccactagggagatgacaccgggtgagattaaattttccgtgcacgtggaatccgtgctgaatagagtgcctcaacctgagtatagacagctgctcgtggaggcgatcttggtcttaacaatgcttgccgacatcgagatccactccatcggctctataattgccgtggagaaaatcgtccatattgctaacgatttgttcctgcaggagcagaaaacactgggggctgacgataccatgcttgctaaagaccctgctagcggaatttgcaccctactgtacgactctgccccctctggccggtttgggacgatgacctatctgtctaaggcagccgccacttacgtgcaagagttcctgccacattcaatatgcgccatgcaatag

SEQ ID NO: 43651 - DNA, 6121 bp, Artificial Sequence
  derived and/or modified sequence
cacgcggaggccggactggactaagggggcaggagcggcgcctggggcgctgcggcggggctctagaccgcgggaagccagtgctagcgctggcgcgtggtgggcccctgaggccgccggagtccggagaggtacgcggaatccgcggcgccaggcctgagcggtgggagggctctgcggggcctggtgttcaggcgtcccaccacgagggtggagcagcgttggatacttgttccttagggaccgaaggctccggtggcacccgggctatttctcagaggacaattagtaacgtgtcgccatgaggagccggagtaactccggggtccggctggacggctacgctcgactggtgcaacagaccatcctgtgccatcagaatccagtgactggcttgcttccagccagctatgatcagaaagatgcttgggtccgagataatgtgtacagcatcttggctgtgtggggtttgggcctggcctatcggaagaatgcagaccgggatgaggataaggcaaaggcctatgaattggagcagagtgtagtgaagctgatgagaggactactgcactgcatgatcagacaggtggataaagtagaatccttcaaatatagtcagagtactaaggatagcctccatgcaaagtacaacaccaaaacctgtgccactgtagtgggtgatgatcaatggggacacctgcagttggatgctacctctgtgtacctgctcttcttagcccaaatgactgcctcaggactccatatcatccacagcctagatgaagtcaatttcatacagaaccttgtgttttacattgaagctgcatataaaactgctgacttcgggatatgggaacgtggagacaagaccaaccaagggatctcagagttgaatgccagttcagttggaatggcaaaggcagccctggaagcattagatgaactggatctgtttggtgtgaaaggtgggcctcaatcagttatccatgtcctggctgatgaagtacagcactgccagtctatcctaaattcactactgccccgtgcttcaacatcaaaagaggttgatgctagtctactctcagtggtttccttccctgcctttgcagtagaggatagccagttggtggagctcacaaaacaggaaatcatcaccaagcttcagggtcgttatggttgctgtcgctttctacgagatggatataaaactcctaaagaggatcccaatcgtctgtactatgaaccagctgagctgaagctatttgaaaacattgagtgtgaatggccattgttctggacatactttattcttgatggggtcttcagtggcaatgcagaacaggttcaagaatataaagaggctcttgaagcagtcctcatcaagggcaaaaatggagtcccacttctgccagagctgtacagtgttcctcctgacagggtcgatgaagaatatcagaatcctcacactgtggaccgagtccccatggggaaattgcctcacatgtggggtcagtctctatacattttaggaagcttgatggcagagggatttttagcccctggagaaattgatcccctgaatcgcaggttttctactgtaccgaagcccgatgttgtggttcaagtctccattctagctgaaacagaagaaatcaagaccattttgaaggacaagggaatttacgtggagaccattgctgaggtataccccatcagagtacaaccagctcgtattctcagccacatttattccagcctaggatgcaacaatagaatgaaactcagtggacgaccctacagacacatgggagtgcttggaacttcaaaactctatgacattcggaaaactatctttactttcactccacagtttatagaccagcaacagttctacctggctctggacaacaagatgatagtggaaatgcttagaacagacctctcctacctctgtagccgctggcggatgacaggccagcccaccatcaccttccccatctcacacagcatgcttgatgaagatggaacaagcttgaattcaagtatcctggcagcactccgaaaaatgcaagatgggtattttggtggggcaagggttcaaacaggtaaattgtcagagtttttgacaacatcttgttgcacacacttgagcttcatggaccctggacctgagggtaagctgtacagtgaagattatgatgacaactatgattacctggaatctggcaactggatgaatgattatgattcaaccagtcatgctcgctgtggtgatgaagttgctcgttatttagatcaccttttggcgcacactgctccccatcctaaactagcccctacctcacagaagggagggctagatcggttccaagctgctgtgcaaacaacctgcgacttaatgtccttggtgaccaaggccaaggaactgcatgtacagaatgttcacatgtatcttcctacgaagttatttcaggcttcccggccttcattcaacttacttgattcacctcatccccgacaggagaaccaggttccctctgttcgtgtagaaatacatcttcctagagaccagtctggggaggtggactttaaagcactggttttacagttgaaggagacctcaagcttacaggaacaagctgatatcctctatatgctgtatactatgaaaggacctgactggaacactgaattgtataatgaacggagtgctacagtgagagagcttcttaccgagctgtatggcaaagtgggagaaattcgtcactggggcctgatccgatacatttctgggatcttaaggaagaaagtggaagcacttgatgaggcctgcacagaccttctctcccaccagaaacatttgacagtaggacttcctccagaacctcgagaaaagactatctctgcacctctgccctatgaggcgctcactcagctgatagatgaagccagtgaaggggatatgagcatttcaatccttacacaggaaataatggtatatctagccatgtatatgcgaacccagcctggcctctttgctgaaatgtttcgacttcgaattggtctgatcatacaagttatggcaacagaactggcccactcccttcgatgctcagctgaggaagccacagagggcctgatgaatctcagtccttcggccatgaagaatctcctgcatcacattctcagcggcaaggagtttggagtggaacgaagcgttcgtcccactgattcaaatgtcagtcctgctatttctatccacgagattggtgctgttggagcaaccaaaacagaacgaactgggatcatgcagttaaaaagtgagataaagcagtcacctggaacctctatgactccaagtagtgggtcctttcctagtgcatatgatcagcagtcatctaaagatagtcgtcaaggtcaatggcaacgccgaagaaggctggatggggcactgaatagagttccagttggattttatcagaaagtatggaaagttttgcagaagtgtcacggactttctgttgaagggtttgtccttccttcctctaccactagagagatgactccaggtgagattaaattctctgttcatgtggagtctgtcctgaatcgtgtacctcagccagagtaccgtcagctgctggttgaagccatccttgtcctcaccatgctggcagatattgaaattcatagcatcggaagcatcattgctgtggaaaaaatagtgcatattgccaatgacttgttccttcaagaacagaaaacccttggcgcagatgataccatgttggcaaaggatcccgcatctggcatctgtactcttctgtatgacagtgcacccagtggcaggtttggcaccatgacctacctctccaaggcagccgccacctacgtgcaggagttcctgccccacagcatctgtgccatgcaatgagggctttggttcctggcttctgggagccttttgacagctggtccctgcctcggttgattgtgcatggaactaaaatgttattgcctaatcactccaaccctgcccctttctgtcccatccttcccaagaagagagaactttttcgataaactaactactgtagaagaagtgaacacttacctggaggctcaccttgcagaaccagtgacaatcttatgagtataatgaacactcagccaggcctgtcatgattggctttatttctttcatcattcataaaagtttgcatgtgtttttattctctagatctgttaccaatatagttttctaactcctgtttggggagcaagtgttaataataacttattcctaaagcttggtttttcttttttgtgattttattgtgtatatgagtggtgggtactttgggacattatttcaaatgagtaaactctaaattgttaaatatttatgctgctataaattagaattacctattctacgtgccttttcttaggaaaagagagtactggatcatggttttcttccttacttacaggttgcttcacactgagtgataatttaaaattgtttctatgtagaatcattgtctctactgttgccctctctgtgtctgcacacataatgcctctctcactttggtgaaatatcaaaaaaatgcaagtacagcatgcatatttaagaatttctgaactaacacttgaaatcacattttataaagattgttggtactcagagttgtatttgcagcagaaaatgcagaataacccagaaatggagcccggagcccaattccagagaggaagggaaagaagagacgatgcctggacaatgtcttatacatagggaacagagagggaatcagaggtggcttagttccctgaagacagccttatgcgcttaatccctgcctttgaaaaatgggccaatacacaacacagacaataatttgaagcgtctgtattcagcaaagataaatacagcagtccagtctataggtgctctacttagcattcttttcatgtgctcctggtctctgtctcactcacctactttctactacatccaactcaactccctgacaccctatccccccatctattcttaaactctttcatatatattttcacttcctaattctagtgtacatatccctgtatatcatggtatctgtgggcatatgtctgtttcttataaagacacatatttgtgtgtgtatgtgtgtgtgtgtgtgtgtgtgtgtataagcatacatgggaatttttctgaatgtaagcagttttgatgtgtctgtatatcaatctgtatctacatttgatggactgagtaagaatgttgcatgtgagagaagggatgtgactgtggactcagattgacacacacagattggtggaagaatagcttcagtcctcttccttcatcccatatgtaggtagccttgcttgacaaatgtttcttctaactctccttcttctgaattgtgcagagactctgttaacttccctttttgcacttagataacttcctacttcaaccccctcctttatcttggatttctaaagtttttccccaatattgggaatggtgagggtggggatgagagactctctgaacaattcttgcagaaccagtgacaatcttatgaatataatgaataagtaagcatatagtagggtgatagaatacagatagtagaaacaaagagaggacagcaaaccttttcagcacttctctcagagcaaatggaaacacacagtaagtagctttctgactacattattttctggtcacttttaaagaaagtttacaacctgttctgaaactatttgtcttttcactggttgtaagtgtaccccaatctcagggagtatatctgtagtgccacaggcaaaagatccactccttcccacactcatttgcctgaacttactcgaagggctgcatttctctgagtttacgaaattgtgtcattatggtccccatacagtggtatttaacttttaaagcaacttttaagaaaactcgacttgttttttgttcattttaagtgtgtggtactaaaaagacatgttagactttttttaaaaaagcacttatgttttgaaaatagaataaataataagaatttccaattaaatcatgtctggtgccaatgtgcaaaacttc

SEQ ID NO: 43652 - DNA, 3633 bp, Artificial Sequence
  derived and/or modified sequence
atgcgtagtcgatccaactccggggttaggctggacggatatgcccgtctggttcagcagaccattctctgccaccagaaccctgtcaccggtttgttgcccgcttcatatgaccaaaaggatgcctgggtgagagacaacgtgtatagcattctggcagtgtggggcctgggcctggcatacaggaagaacgccgaccgggatgaggacaaagccaaagcctacgagctcgagcagagtgtagtgaaacttatgcggggtcttctgcattgtatgattcgacaggtcgacaaggttgagtccttcaaatactcccaatccaccaaggacagcttacatgccaagtataacacaaagacgtgtgcaacagtggtcggcgacgaccaatggggacacctgcagctggacgccaccagcgtctatctgcttttcctcgcccagatgactgcttcgggccttcatatcatccattcgcttgacgaagtaaactttatccaaaatctcgtattctatatcgaagctgcttacaaaacagccgattttgggatatgggaaagaggagacaaaactaaccagggcatatccgagctcaatgcatcaagcgtgggcatggctaaagctgctctggaggcactagacgagctggatcttttcggagtgaagggcggaccacagtccgtgatccatgtgttggccgacgaagttcaacactgccagagtattctgaactctttactccctcgagcctctacctcaaaggaggttgacgcatccctgttaagtgtggtgtctttccctgcattcgccgtggaagacagccagttggtcgaactgacaaaacaggagatcatcaccaagctgcaaggacgttacgggtgctgtcggtttctgcgggacggatacaagactcctaaagaggacccgaacagactatactatgagcctgctgagctgaaactgttcgaaaacattgaatgtgagtggcccctattctggacgtactttattttagatggagtatttagtggaaatgctgaacaggttcaggagtataaggaggcattggaggctgtgttgattaaggggaagaatggcgtgcccttacttcccgagctgtattccgtgcctccagacagagtggatgaggaataccagaatcctcataccgtcgaccgagtcccaatgggtaaactgcctcacatgtggggccagtccctgtatatactgggatcactgatggcggagggcttcttggctcccggagaaatcgaccctttaaatagacggttcagcactgtgccaaagcccgatgtggtcgtgcaggtatccatcctcgccgagactgaggagattaagaccatcttgaaggacaagggcatctacgtagagaccatcgccgaagtataccccatccgagtccagcccgctaggatcctcagtcacatctattcatcactgggctgtaataaccgtatgaaactgtccgggagaccttatagacacatgggcgtcctaggaaccagcaagttatatgatattaggaaaacaatatttaccttcaccccacaattcatcgatcagcagcagttctatcttgctcttgacaataaaatgattgtagagatgctgcgcaccgacctgagctacctgtgtagtcgctggcggatgacgggacagccgacaatcaccttcccaatcagccatagtatgctcgatgaggacgggacgagcctgaattcttctatcctggccgctctgagaaaaatgcaggatggctattttgggggtgcccgagtgcaaaccggcaagctgagcgagtttttgactacctcttgctgtacacacctgtcttttatggatcccggtcctgaggggaagctctattcagaagactatgacgataactatgactacctggagtcagggaattggatgaatgactatgattcaacctcacatgcccgatgcggggacgaagttgcccgttatctggatcatctattagcccatactgcgcctcatcccaaactcgcaccaacatcgcaaaagggcggactggacaggttccaagcagcagtccagaccacatgcgatctgatgagcctggtgaccaaagccaaggaactacacgtgcagaatgtacatatgtatttacccaccaaactgttccaggcctcccgtccaagcttcaatctgcttgatagcccccacccccgtcaggagaatcaggtgccctctgttcgcgtagaaattcacctcccaagagaccagagtggagaggtggatttcaaagcgctcgtcctacagctgaaagagacaagtagcctgcaagagcaggccgacatcctgtacatgctgtacaccatgaagggtcctgattggaatacggagctatacaacgaaaggtcggctactgtacgggagctactgacagaactttacgggaaagtgggcgagattcggcactgggggcttatccggtatatatccggcattctgaggaagaaggtcgaggcccttgatgaggcctgtactgatttactaagtcaccagaaacacctgacagtgggactgccccctgagcccagagagaagacaattagtgctccgttgccctatgaagcactgacgcaactcatcgatgaagcatcggagggggacatgtcaatatcaattcttacccaggagatcatggtttacctggccatgtatatgaggacacagccaggtctctttgccgagatgtttaggctcagaatcgggttgatcatccaggtaatggctactgagctggcccacagcttacgttgctccgccgaagaggccaccgaggggctgatgaatctctccccaagcgcgatgaagaacctcctgcatcatatcttgtcaggaaaggagttcggagttgagcggtcagttagacctaccgatagcaacgtgtcgccagcaatcagcatccacgagattggcgctgtcggtgcaaccaaaaccgaacgaactggaattatgcaattgaaatcggagattaagcagtctcctgggacaagcatgaccccatcctccggctccttcccctctgcatatgatcaacagagcagcaaggatagccggcagggccagtggcagaggagacgcagactggatggagctctgaatagagttccggtcgggttttatcaaaaggtctggaaagttctccagaaatgtcacggactttctgttgaaggattcgtcttgccaagttctaccacacgcgagatgactcctggggaaatcaaattttccgttcatgttgaaagcgtcttgaatagggttccgcagcctgagtatcggcaactgttggtagaggccatcctagtcctaactatgttggccgatattgaaattcacagtatcggaagcattattgccgtggagaagatcgtacacattgccaatgatttattcctccaagagcagaagaccctgggtgccgacgatactatgctggccaaagaccctgcctctggaatttgcacgcttctgtatgattcggccccatccggacgcttcggcacaatgacttaccttagtaaagccgctgccacctacgtgcaggagttcctcccccactctatttgtgccatgcagtag

SEQ ID NO: 43653 - DNA, 3633 bp, Artificial Sequence
  derived and/or modified sequence
atgagaagcagaagcaacagcggcgtgagactggacggctacgccagactggtgcagcagaccatcctgtgccaccagaaccccgtgaccggcctgctgcccgccagctacgaccagaaggacgcctgggtgagagacaacgtgtacagcatcctggccgtgtggggcctgggcctggcctacagaaagaacgccgacagagacgaggacaaggccaaggcctacgagctggagcagagcgtggtgaagctgatgagaggcctgctgcactgcatgatcagacaggtggacaaggtggagagcttcaagtacagccagagcaccaaggacagcctgcacgccaagtacaacaccaagacctgcgccaccgtggtgggcgacgaccagtggggccacctgcagctggacgccaccagcgtgtacctgctgttcctggcccagatgaccgccagcggcctgcacatcatccacagcctggacgaggtgaacttcatccagaacctggtgttctacatcgaggccgcctacaagaccgccgacttcggcatctgggagagaggcgacaagaccaaccagggcatcagcgagctgaacgccagcagcgtgggcatggccaaggccgccctggaggccctggacgagctggacctgttcggcgtgaagggcggcccccagagcgtgatccacgtgctggccgacgaggtgcagcactgccagagcatcctgaacagcctgctgcccagagccagcaccagcaaggaggtggacgccagcctgctgagcgtggtgagcttccccgccttcgccgtggaggacagccagctggtggagctgaccaagcaggagatcatcaccaagctgcagggcagatacggctgctgcagattcctgagagacggctacaagacccccaaggaggaccccaacagactgtactacgagcccgccgagctgaagctgttcgagaacatcgagtgcgagtggcccctgttctggacctacttcatcctggacggcgtgttcagcggcaacgccgagcaggtgcaggagtacaaggaggccctggaggccgtgctgatcaagggcaagaacggcgtgcccctgctgcccgagctgtacagcgtgccccccgacagagtggacgaggagtaccagaacccccacaccgtggacagagtgcccatgggcaagctgccccacatgtggggccagagcctgtacatcctgggcagcctgatggccgagggcttcctggcccccggcgagatcgaccccctgaacagaagattcagcaccgtgcccaagcccgacgtggtggtgcaggtgagcatcctggccgagaccgaggagatcaagaccatcctgaaggacaagggcatctacgtggagaccatcgccgaggtgtaccccatcagagtgcagcccgccagaatcctgagccacatctacagcagcctgggctgcaacaacagaatgaagctgagcggcagaccctacagacacatgggcgtgctgggcaccagcaagctgtacgacatcagaaagaccatcttcaccttcaccccccagttcatcgaccagcagcagttctacctggccctggacaacaagatgatcgtggagatgctgagaaccgacctgagctacctgtgcagcagatggagaatgaccggccagcccaccatcaccttccccatcagccacagcatgctggacgaggacggcaccagcctgaacagcagcatcctggccgccctgagaaagatgcaggacggctacttcggcggcgccagagtgcagaccggcaagctgagcgagttcctgaccaccagctgctgcacccacctgagcttcatggaccccggccccgagggcaagctgtacagcgaggactacgacgacaactacgactacctggagagcggcaactggatgaacgactacgacagcaccagccacgccagatgcggcgacgaggtggccagatacctggaccacctgctggcccacaccgccccccaccccaagctggcccccaccagccagaagggcggcctggacagattccaggccgccgtgcagaccacctgcgacctgatgagcctggtgaccaaggccaaggagctgcacgtgcagaacgtgcacatgtacctgcccaccaagctgttccaggccagcagacccagcttcaacctgctggacagcccccaccccagacaggagaaccaggtgcccagcgtgagagtggagatccacctgcccagagaccagagcggcgaggtggacttcaaggccctggtgctgcagctgaaggagaccagcagcctgcaggagcaggccgacatcctgtacatgctgtacaccatgaagggccccgactggaacaccgagctgtacaacgagagaagcgccaccgtgagagagctgctgaccgagctgtacggcaaggtgggcgagatcagacactggggcctgatcagatacatcagcggcatcctgagaaagaaggtggaggccctggacgaggcctgcaccgacctgctgagccaccagaagcacctgaccgtgggcctgccccccgagcccagagagaagaccatcagcgcccccctgccctacgaggccctgacccagctgatcgacgaggccagcgagggcgacatgagcatcagcatcctgacccaggagatcatggtgtacctggccatgtacatgagaacccagcccggcctgttcgccgagatgttcagactgagaatcggcctgatcatccaggtgatggccaccgagctggcccacagcctgagatgcagcgccgaggaggccaccgagggcctgatgaacctgagccccagcgccatgaagaacctgctgcaccacatcctgagcggcaaggagttcggcgtggagagaagcgtgagacccaccgacagcaacgtgagccccgccatcagcatccacgagatcggcgccgtgggcgccaccaagaccgagagaaccggcatcatgcagctgaagagcgagatcaagcagagccccggcaccagcatgacccccagcagcggcagcttccccagcgcctacgaccagcagagcagcaaggacagcagacagggccagtggcagagaagaagaagactggacggcgccctgaacagagtgcccgtgggcttctaccagaaggtgtggaaggtgctgcagaagtgccacggcctgagcgtggagggcttcgtgctgcccagcagcaccaccagagagatgacccccggcgagatcaagttcagcgtgcacgtggagagcgtgctgaacagagtgccccagcccgagtacagacagctgctggtggaggccatcctggtgctgaccatgctggccgacatcgagatccacagcatcggcagcatcatcgccgtggagaagatcgtgcacatcgccaacgacctgttcctgcaggagcagaagaccctgggcgccgacgacaccatgctggccaaggaccccgccagcggcatctgcaccctgctgtacgacagcgcccccagcggcagattcggcaccatgacctacctgagcaaggccgccgccacctacgtgcaggagttcctgccccacagcatctgcgccatgcagtag

SEQ ID NO: 43654 - protein, 372 aa, Artificial Sequence
  derived and/or modified sequence
MAKQLQARRLDGIDYNPWVEFVKLASEHDVVNLGQGFPDFPPPDFAVEAFQHAVSGDFMLNQYTKTFVIIIEPFFDCYEPMTMMAGGRPVFVSLKPGPIQNGELGSSSNWQLDPMELAGKFTSRTKALVLNTPNNPLGKVFSREELELVASLCQQHDVVCITDEVYQWMVYDGHQHISIASLPGMWERTLTIGSAGKTFSATGWKVGWVLGPDHIMKHLRTVHQNSVFHCPTQSQAAVAESFEREQLLFRQPSSYFVQFPQAMQRCRDHMIRSLQSVGLKPIIPQGSYFLITDISDFKRKMPDLPGAVDEPYDRRFVKWMIKNKGLVAIPVSIFYSVPHQKHFDHYIRFCFVKDEATLQAMDEKLRKWKVEL

SEQ ID NO: 43655 - protein, 159 aa, Artificial Sequence
  derived and/or modified sequence
AMAKQLQARRLDGIDYNPWVEFVKLASEHDVVNLGQGFPDFPPPDFAVEAFQHAVSGDFMLNQYTKTFVSLCYPGWSAMVRSWSTAALTLPVSSGPPTSASGVTGTTGWSQSWLESSFFDPKKKKIIWGYPPLTKILASFFGELLGQEIDPLRNVLVTV

SEQ ID NO: 43656 - DNA, 1119 bp, Artificial Sequence
  derived and/or modified sequence
atggccaaacaactgcaggcgcgacgactcgatggcattgactacaatccctgggtggagtttgttaaactggcttccgaacatgacgtggtgaacctggggcagggattcccagatttccctcctccagactttgccgttgaggcttttcaacacgctgtgtcaggcgacttcatgttaaaccagtataccaagacattcgtgatcattatcgaaccattcttcgattgctacgagcccatgacaatgatggcaggcggccgcccagtgttcgtgtccctgaagcccggccctatccagaatggagagctgggatcatccagcaactggcaattagatcctatggagcttgcgggaaagttcaccagtcggaccaaagccttggtattaaatacccccaataaccctctcggaaaggtgttttccagggaggagcttgaattggttgcttcgctctgtcagcaacacgatgtcgtatgcatcacagatgaggtgtaccagtggatggtgtacgatggacaccaacacatctcgattgcaagtctgccgggcatgtgggagcgtaccctgaccatagggagcgcgggaaagacgttctctgcaaccggctggaaagtggggtgggtgctgggccctgaccatatcatgaaacacctgcgaacagtgcatcaaaacagtgtgtttcattgccccacccagtctcaggcagctgttgccgaatcattcgagagagaacagcttctgtttagacagccttcctcttatttcgtgcagttccctcaggcgatgcaaagatgtcgcgaccacatgattagatccctgcagtccgtggggctcaagcccattattcctcaggggtcttattttttgatcactgatattagtgactttaaaagaaagatgcctgatctacccggcgcagtggacgagccatatgataggcgctttgtcaagtggatgatcaagaacaaaggtcttgtcgctatcccggtgagcattttctatagcgtgccccatcaaaaacacttcgaccactacatacggttttgtttcgttaaggatgaagccacacttcaggctatggatgaaaagctcaggaaatggaaagtggagttatag

SEQ ID NO: 43657 - DNA, 480 bp, Artificial Sequence
  derived and/or modified sequence
gccatggctaagcagctgcaggcaaggaggttggacgggattgattacaacccatgggtcgaattcgttaagcttgcctctgaacatgacgtcgttaacctgggacagggcttccccgactttcccccgcctgactttgcagtggaagcttttcagcacgctgttagcggggatttcatgttaaaccagtacactaaaactttcgtctctctgtgttatcctggttggtccgcaatggtgcgttcctggtccacagctgctctgaccctgcccgtaagtagcggcccacccaccagcgcatccggcgtcacgggcaccacaggctggtctcaatcctggctggagtcctcattctttgatcctaaaaaaaagaagattatatggggatatcccccccttaccaagatattagcaagtttcttcggggaactcctgggtcaagagatcgatcccctgaggaatgtgctggtcaccgtgtag

SEQ ID NO: 43658 - DNA, 480 bp, Artificial Sequence
  derived and/or modified sequence
gccatggcgaaacagctacaggctaggcgactggatggcatagactacaacccctgggtggaattcgtcaagctggcctcggagcacgacgtggtaaacttaggccaaggatttcctgacttccctccaccagactttgctgttgaagcttttcaacacgctgtctcgggcgactttatgttgaaccagtacaccaagacattcgtgtctctgtgctatcccggatggagcgctatggtgcggtcttggtcgacagctgctctcactctgccggttagttcaggtccaccaacttccgcttctggagtgacaggcaccacgggctggtctcagtcatggttagagtcctccttcttcgaccccaaaaaaaaaaaaataatttggggttatccaccattgactaagatccttgcttccttttttggcgagctgttaggccaggagatcgaccccctcaggaatgttttagtgactgtgtag

SEQ ID NO: 43659 - DNA, 1119 bp, Artificial Sequence
  derived and/or modified sequence
atggccaagcagctgcaggcccggcggctggatggcatcgactacaacccctgggtggagtttgtgaagctggccagcgagcatgatgtggtgaacctgggccagggcttcccagacttccccccaccagactttgctgtggaggccttccagcacgctgtgtctggggacttcatgctgaaccagtacaccaagacctttgtgatcatcatcgagcccttctttgactgctatgagcccatgaccatgatggccggcggccggcctgtgtttgtgtccctgaagccaggccccatccagaatggagagctgggcagcagcagcaactggcagctggaccccatggagctggccggcaagttcaccagcaggaccaaggccctggtgctgaacacccccaacaaccccctgggcaaggtgttcagccgggaggagctggagctggtggccagcctgtgccagcagcatgatgtggtgtgcatcacagatgaggtgtaccagtggatggtgtatgatggccaccagcacatcagcatcgccagcctgcccggcatgtgggagaggaccctgaccatcggcagcgctgggaagaccttcagcgccaccggctggaaggtgggctgggtgctgggccctgaccacatcatgaagcacctgaggacagtgcaccagaacagcgtcttccactgccccacccagagccaggccgctgtggccgagagctttgagcgggagcagctgctcttccggcagcccagcagctactttgtgcagttcccccaggccatgcagcgctgccgggaccacatgatccgcagcctgcagagcgtgggcctgaagcccatcatcccccagggcagctacttcctgatcacagacatcagtgacttcaagaggaagatgccagacctgcctggagctgtggatgagccctatgacagaagatttgtgaagtggatgatcaagaacaagggcctggtggccatccctgtgtccatcttctacagcgtgccccaccagaagcactttgaccactacatccgcttctgctttgtgaaggatgaggccaccctgcaggccatggatgagaagctgaggaagtggaaggtggagctgtag

SEQ ID NO: 43660 - DNA, 480 bp, Artificial Sequence
  derived and/or modified sequence
gccatggccaagcagctgcaggcccggcggctggatggcatcgactacaacccctgggtggagtttgtgaagctggccagcgagcatgatgtggtgaacctgggccagggcttcccagacttccccccaccagactttgctgtggaggccttccagcacgctgtgtctggggacttcatgctgaaccagtacaccaagacctttgtgtccctgtgctacccaggctggagcgccatggtgcgctcctggagcacagctgccctgaccctgcctgtgagcagcggcccccccaccagcgccagcggcgtgacaggcaccaccggctggagccagagctggctggagagcagcttctttgaccccaagaagaagaagatcatctggggctacccacccctgaccaagatcctggccagcttctttggagagctgctgggccaggagattgaccccctgagaaatgtgctggtgacagtgtag

SEQ ID NO: 43661 - DNA, 1119 bp, Artificial Sequence
  derived and/or modified sequence
atggccaagcagctgcaggcccggcggctggacggcatcgactacaacccctgggtcgagtttgtgaagcttgccagcgaacatgacgtggtgaatctcggccaggggtttccggatttcccccctcctgactttgctgtcgaggcctttcagcatgctgtaagcggagatttcatgctcaatcagtacacaaagaccttcgtgattatcattgagccctttttcgactgttacgaacccatgaccatgatggcaggtggaagacccgtgttcgtctccctgaaaccagggcctatacagaacggggaattaggctccagttcgaattggcaactggaccctatggagctggcagggaagtttaccagcagaaccaaagcactggttctgaatactccgaataaccctctcggtaaagtcttttcccgggaggagctggagttggttgcatccctgtgccagcagcacgacgtagtgtgcattacagatgaggtctaccagtggatggtctacgatggacaccaacacatcagtatagcttcactcccgggcatgtgggagaggactttgaccattggcagtgccggaaaaacgtttagcgccactgggtggaaagtgggctgggtgctgggcccagatcatattatgaaacatctgagaactgtgcatcagaattccgtcttccactgccctactcagagtcaggccgctgtggccgagagttttgaaagggagcaactcctgttcagacagcccagttcctacttcgtacaattcccacaggcaatgcagagatgcagggatcatatgatacgcagcctacagtctgtggggctgaagcccatcatccctcaagggtcctacttcctcattaccgatatttctgactttaagagaaaaatgccagacctgcctggcgccgtggatgagccctatgatcgcaggtttgtcaagtggatgataaaaaacaagggccttgttgctatcccggtcagcattttttacagtgtaccccatcaaaagcacttcgaccactatattcgcttttgctttgtcaaggatgaggcaacgttacaagccatggatgaaaagctccgcaagtggaaagtagaactgtag

SEQ ID NO: 43662 - DNA, 480 bp, Artificial Sequence
  derived and/or modified sequence
gccatggccaagcagctgcaggcccggcggctggacggcatcgactacaacccttgggtggagtttgtaaagctcgcgtctgaacacgatgtcgttaacctggggcaggggttccccgactttccacctccagattttgcagtcgaggcttttcaacacgctgtttcaggagatttcatgctgaaccagtacacgaagacatttgtatctctgtgttatcctggttggagtgctatggtccgttcctggagtactgcggcattaaccttgccggtatcctccggtccgcctacctcagcttccggcgttactgggactacgggctggagtcagtcctggctcgagtcctccttcttcgaccctaagaagaagaagattatttggggctaccctcctctgacaaagatactcgcgtctttctttggggaattgctggggcaagagatcgaccccttgcggaacgttcttgtgaccgtgtag

SEQ ID NO: 43663 - DNA, 480 bp, Artificial Sequence
  derived and/or modified sequence
gccatggccaagcagctgcaggcccggcggctggacggcatcgactacaatccctgggtcgaattcgtcaagctggcgagtgagcatgacgtggtcaacctcggccagggctttccagactttccaccacccgattttgctgttgaggcctttcagcatgcagtgagtggggactttatgttgaaccagtacacaaaaacgtttgtctctctctgttatccagggtggagcgccatggtccgttcttggagcacagccgctctcacactcccagtaagcagtggacctcccacaagcgcatccggcgtcactggcaccaccgggtggtctcagtcttggctcgaatccagttttttcgaccccaaaaagaagaagatcatttggggctaccctcctctaactaagattctggcctcgttttttggtgagcttctcggccaggagattgacccactgcgcaacgtcttggtgacagtctag

SEQ ID NO: 43664 - DNA, 1119 bp, Artificial Sequence
  derived and/or modified sequence
atggctaaacagctgcaagcacggagattggacgggattgattacaatccttgggtggaattcgtcaagctggcaagcgaacatgacgtggtcaatctgggtcagggctttcccgactttccaccccctgatttcgccgttgaagcgttccagcacgctgtcagcggggattttatgcttaaccagtacactaagacgttcgtcatcatcatcgagcctttcttcgattgctacgagcccatgactatgatggccggtggcagaccggttttcgtgtccctgaagcccggtccaatacaaaacggggagcttggcagctcgtctaactggcagcttgacccaatggagctggctggcaaatttacatcaagaacaaaagcactcgttctgaacacccctaataatccacttggcaaagttttctccagggaagagttggagctagttgcatcgctctgccaacagcacgatgtggtgtgtataacagacgaggtataccagtggatggtatatgatggccaccagcacatttcaattgccagcctgcccggaatgtgggaaaggaccctgactataggctcggctggcaagacttttagcgctaccggttggaaagtagggtgggtgttggggccagaccatataatgaaacacctcaggactgtccatcagaatagcgtctttcactgtcccacacagtctcaggctgcggtcgcggagagcttcgagcgggagcagctgctctttagacagccgtcatcctactttgttcagtttcctcaggctatgcagcgatgcagagatcatatgattcggagcctgcagagcgtagggctgaagccgatcattccccaaggctcatattttctgatcacggacatctcagattttaagaggaaaatgccggacctaccaggagcagtggatgagccatatgatcgacgtttcgtgaaatggatgattaagaacaagggcttggtagccatccctgttagcatattttattccgtgccacatcagaagcatttcgaccactatatccgtttttgtttcgtcaaagatgaggcaaccttgcaagctatggacgagaaactgagaaaatggaaggttgaactctag

SEQ ID NO: 43665 - DNA, 480 bp, Artificial Sequence
  derived and/or modified sequence
gcgatggccaaacagctgcaggctcggaggttggacgggatagattataatccctgggttgaatttgttaagctcgcctccgaacatgatgttgttaacctcggacagggtttcccagactttcctccacccgattttgccgtcgaggccttccagcacgcagttagtggtgactttatgctaaatcaatacacaaaaacctttgtgtctttatgctatccaggctggtcagcaatggtgagatcttggtcgactgctgccctgaccctcccagttagctctggaccccctacatccgcgtccggtgtaactgggaccaccggatggtcacaatcttggttagagagttcctttttcgaccccaaaaaaaaaaagatcatctggggatatcccccacttacaaagattctggcctccttctttggagaactgctcggccaggagatcgaccctctgagaaatgtgttagtcacagtctag

SEQ ID NO: 43666 - DNA, 480 bp, Artificial Sequence
  derived and/or modified sequence
gccatggctaaacagctccaggccagacgcttagatgggatcgactacaatccgtgggtcgagtttgtgaaattagcttccgaacatgatgtggtgaatctgggccaggggttccccgatttccctcctccggattttgcggtagaggcctttcagcatgcagtttctggggatttcatgctgaaccaatatactaaaacctttgtgagcctatgctaccctgggtggtcagcgatggtgaggtcctggtccaccgcagcacttacactgccagtgagtagcggaccgcctacatctgcatcaggagttacaggaaccaccggatggagccagtcctggctagagtccagttttttcgatcctaagaagaaaaaaattatatggggttatcccccactcaccaaaatccttgctagttttttcggtgaactgctggggcaggaaattgatccccttagaaatgtgctggtaacggtttag

SEQ ID NO: 43667 - DNA, 1623 bp, Artificial Sequence
  derived and/or modified sequence
ttgggaacgaggggtgaagcggcccaggtgaggctcgccatggccaaacagctgcaggcccgaaggctagacgggatcgactacaacccctgggtggagtttgtgaaactggccagtgagcatgacgtcgtgaacttgggccagggcttcccggatttcccaccaccagactttgccgtggaagcctttcagcacgctgtcagtggagacttcatgcttaaccagtacaccaagacatttgtcatcatcatcgaacccttttttgactgctacgagcccatgacaatgatggcagggggtcgtcctgtgtttgtgtccctgaagccgggtcccatccagaatggagaactgggttccagcagcaactggcagctggaccccatggagctggccggcaaattcacatcacgcaccaaagccctggtcctcaacacccccaacaaccccctgggcaaggtgttctccagggaagagctggagctggtggccagcctttgccagcagcatgacgtggtgtgtatcactgatgaagtctaccagtggatggtctacgacgggcaccagcacatcagcattgccagcctccctggcatgtgggaacggaccctgaccatcggcagcgccggcaagaccttcagcgccactggctggaaggtgggctgggtcctgggtccagatcacatcatgaagcacctgcggaccgtgcaccagaactccgtcttccactgccccacgcagagccaggctgcagtagccgagagctttgaacgggagcagctgctcttccgccaacccagcagctactttgtgcagttcccgcaggccatgcagcgctgccgtgaccacatgatacgtagcctacagtcagtgggcctgaagcccatcatccctcagggcagctacttcctcatcacagacatctcagacttcaagaggaagatgcctgacttgcctggagctgtggatgagccctatgacagacgcttcgtcaagtggatgatcaagaacaagggcttggtggccatccctgtctccatcttctatagtgtgccacatcagaagcactttgaccactatatccgcttctgttttgtgaaggatgaagccacgctccaggccatggacgagaagctgcggaagtggaaggtggaactctagccctgaagtcacgccttggccctgacatccccacatgcccgcagagatcctctttgagtgtctgtctttgtccaggtttcagacatttctaggttggggaagatgctattgggaaacctcttctccgtgacacagaatgttctgggtgggagccgcccttcttcatcttagagaaccaagtgcctcctgtctgaaaggtgagggtggcctgacctgggcctctccctgcccctccataggtgggtttgtagggtcttgtgttgcttctggtctctccaggcttggctgagacggacggtagacttccaccatgtaccgatcacatcccagctctgcatggcccctgctaaggctcaggtataacctcaccttccctggctcatcttggccttggggagttgcctttaggcttgagtcctcaagcctctccttttcgtccataataaaatgtttaagttattaaga

SEQ ID NO: 43668 - DNA, 477 bp, Artificial Sequence
  derived and/or modified sequence
gccatggccaaacagctgcaggcccgaaggctagacgggatcgactacaacccctgggtggagtttgtgaaactggccagtgagcatgacgtcgtgaacttgggccagggcttcccggatttcccaccaccagactttgccgtggaagcctttcagcacgctgtcagtggagacttcatgcttaaccagtacaccaagacatttgtctcactctgttatccaggctggagtgcaatggtgcgatcatggtccactgcagccttgaccctgccagtctcaagtggtcctcccacctcagcctctggagtaactgggactacaggctggtctcagagctggttggaaagttccttctttgatccaaaaaaaaaaaaaatcatttggggttacccaccactgacgaagatcctggcaagtttctttggggagctgctgggtcaggagatagacccgctcaggaatgtgctggtgactgtt

SEQ ID NO: 43669 - DNA, 1119 bp, Artificial Sequence
  derived and/or modified sequence
atggccaagcagctgcaggccagaagactggacggcatcgactacaacccctgggtggagttcgtgaagctggccagcgagcacgacgtggtgaacctgggccagggcttccccgacttccccccccccgacttcgccgtggaggccttccagcacgccgtgagcggcgacttcatgctgaaccagtacaccaagaccttcgtgatcatcatcgagcccttcttcgactgctacgagcccatgaccatgatggccggcggcagacccgtgttcgtgagcctgaagcccggccccatccagaacggcgagctgggcagcagcagcaactggcagctggaccccatggagctggccggcaagttcaccagcagaaccaaggccctggtgctgaacacccccaacaaccccctgggcaaggtgttcagcagagaggagctggagctggtggccagcctgtgccagcagcacgacgtggtgtgcatcaccgacgaggtgtaccagtggatggtgtacgacggccaccagcacatcagcatcgccagcctgcccggcatgtgggagagaaccctgaccatcggcagcgccggcaagaccttcagcgccaccggctggaaggtgggctgggtgctgggccccgaccacatcatgaagcacctgagaaccgtgcaccagaacagcgtgttccactgccccacccagagccaggccgccgtggccgagagcttcgagagagagcagctgctgttcagacagcccagcagctacttcgtgcagttcccccaggccatgcagagatgcagagaccacatgatcagaagcctgcagagcgtgggcctgaagcccatcatcccccagggcagctacttcctgatcaccgacatcagcgacttcaagagaaagatgcccgacctgcccggcgccgtggacgagccctacgacagaagattcgtgaagtggatgatcaagaacaagggcctggtggccatccccgtgagcatcttctacagcgtgccccaccagaagcacttcgaccactacatcagattctgcttcgtgaaggacgaggccaccctgcaggccatggacgagaagctgagaaagtggaaggtggagctgtag

SEQ ID NO: 43670 - DNA, 480 bp, Artificial Sequence
  derived and/or modified sequence
gccatggccaagcagctgcaggccagaagactggacggcatcgactacaacccctgggtggagttcgtgaagctggccagcgagcacgacgtggtgaacctgggccagggcttccccgacttccccccccccgacttcgccgtggaggccttccagcacgccgtgagcggcgacttcatgctgaaccagtacaccaagaccttcgtgagcctgtgctaccccggctggagcgccatggtgagaagctggagcaccgccgccctgaccctgcccgtgagcagcggcccccccaccagcgccagcggcgtgaccggcaccaccggctggagccagagctggctggagagcagcttcttcgaccccaagaagaagaagatcatctggggctacccccccctgaccaagatcctggccagcttcttcggcgagctgctgggccaggagatcgaccccctgagaaacgtgctggtgaccgtgtag

SEQ ID NO: 43671 - protein, 2598 aa, Artificial Sequence
  derived and/or modified sequence
GRPIPPTSSPSLLPSAQLPSSHNPPPVSCQMPLLDSNTSHQIMDTNPDEEFSPNSYLLRACSGPQQASSSGPPNHHSQSTLRPPLPPPHNHTLSHHHSSANSLNRNSLTNRRSQIHAPAPAPNDLATTPESVQLQDSWVLNSNVPLETRHFLFKTSSGSTPLFSSSSPGYPLTSGTVYTPPPRLLPRNTFSRKAFKLKKPSKYCSWKCAALSAIAAALLLAILLAYFIAMHLLGLNWQLQPADGHTFNNGIRTGLPGNDDVATMPSGGKVPWSLKNSSIDSGEAEVGRRVTQEVPPGVFWRSQIHISQPQFLKFNISLGKDALFGVYIRRGLPPSHAQYDFMERLDGKEKWSVVESPRERRSIQTLVQNEAVFVQYLDVGLWHLAFYNDGKDKEMVSFNTVVLDSVQDCPRNCHGNGECVSGVCHCFPGFLGADCAKAACPVLCSGNGQYSKGTCQCYSGWKGAECDVPMNQCIDPSCGGHGSCIDGNCVCSAGYKGEHCEEVDCLDPTCSSHGVCVNGECLCSPGWGGLNCELARVQCPDQCSGHGTYLPDTGLCSCDPNWMGPDCSVEVCSVDCGTHGVCIGGACRCEEGWTGAACDQRVCHPRCIEHGTCKDGKCECREGWNGEHCTIDGCPDLCNGNGRCTLGQNSWQCVCQTGWRGPGCNVAMETSCADNKDNEGDGLVDCLDPDCCLQSACQNSLLCRGSRDPLDIIQQGQTDWPAVKSFYDRIKLLAGKDSTHIIPGENPFNSSLVSLIRGQVVTTDGTPLVGVNVSFVKYPKYGYTITRQDGTFDLIANGGASLTLHFERAPFMSQERTVWLPWNSFYAMDTLVMKTEENSIPSCDLSGFVRPDPIIISSPLSTFFSAAPGQNPIVPETQVLHEEIELPGSNVKLRYLSSRTAGYKSLLKITMTQSTVPLNLIRVHLMVAVEGHLFQKSFQASPNLAYTFIWDKTDAYGQRVYGLSDAVVSVGFEYETCPSLILWEKRTALLQGFELDPSNLGGWSLDKHHILNVKSGILHKGTGENQFLTQQPAIITSIMGNGRRRSISCPSCNGLAEGNKLLAPVALAVGIDGSLYVGDFNYIRRIFPSRNVTSILELRNKEFKHSNNPAHKYYLAVDPVSGSLYVSDTNSRRIYRVKSLSGTKDLAGNSEVVAGTGEQCLPFDEARCGDGGKAIDATLMSPRGIAVDKNGLMYFVDATMIRKVDQNGIISTLLGSNDLTAVRPLSCDSSMDVAQVRLEWPTDLAVNPMDNSLYVLENNVILRITENHQVSIIAGRPMHCQVPGIDYSLSKLAIHSALESASAIAISHTGVLYITETDEKKINRLRQVTTNGEICLLAGAASDCDCKNDVNCNCYSGDDAYATDAILNSPSSLAVAPDGTIYIADLGNIRIRAVSKNKPVLNAFNQYEAASPGEQELYVFNADGIHQYTVSLVTGEYLYNFTYSTDNDVTELIDNNGNSLKIRRDSSGMPRHLLMPDNQIITLTVGTNGGLKVVSTQNLELGLMTYDGNTGLLATKSDETGWTTFYDYDHEGRLTNVTRPTGVVTSLHREMEKSITIDIENSNRDDDVTVITNLSSVEASYTVVQDQVRNSYQLCNNGTLRVMYANGMGISFHSEPHVLAGTITPTIGRCNISLPMENGLNSIEWRLRKEQIKGKVTIFGRKLRVHGRNLLSIDYDRNIRTEKIYDDHRKFTLRIIYDQVGRPFLWLPSSGLAAVNVSYFFNGRLAGLQRGAMSERTDIDKQGRIVSRMFADGKVWSYSYLDKSMVLLLQSQRQYIFEYDSSDRLLAVTMPSVARHSMSTHTSIGYIRNIYNPPESNASVIFDYSDDGRILKTSFLGTGRQVFYKYGKLSKLSEIVYDSTAVTFGYDETTGVLKMVNLQSGGFSCTIRYRKIGPLVDKQIYRFSEEGMVNARFDYTYHDNSFRIASIKPVISETPLPVDLYRYDEISGKVEHFGKFGVIYYDINQIITTAVMTLSKHFDTHGRIKEVQYEMFRSLMYWMTVQYDSMGRVIKRELKLGPYANTTKYTYDYDGDGQLQSVAVNDRPTWRYSYDLNGNLHLLNPGNSVRLMPLRYDLRDRITRLGDVQYKIDDDGYLCQRGSDIFEYNSKGLLTRAYNKASGWSVQYRYDGVGRRASYKTNLGHHLQYFYSDLHNPTRITHVYNHSNSEITSLYYDLQGHLFAMESSSGEEYYVASDNTGTPLAVFSINGLMIKQLQYTAYGEIYYDSNPDFQMVIGFHGGLYDPLTKLVHFTQRDYDVLAGRWTSPDYTMWKNVGKEPAPFNLYMFKSNNPLSSELDLKNYVTDVKSWLVMFGFQLSNIIPGFPRAKMYFVPPPYELSESQASENGQLITGVQQTTERHNQAFMALEGQVITKKLHASIREKAGHWFATTTPIIGKGIMFAIKEGRVTTGVSSIASEDSRKVASVLNNAYYLDKMHYSIEGKDTHYFVKIGSADGDLVTLGTTIGRKVLESGVNVTVSQPTLLVNGRTRRFTNIEFQYSTLLLSIRYGLTPDTLDEEKARVLDQARQRALGTAWAKEQQKARDGREGSRLWTEGEKQQLLSTGRVQGYEGYYVLPVEQYPELADSSSNIQFLRQNEMGKR

SEQ ID NO: 43672 - protein, 2774 aa, Artificial Sequence
  derived and/or modified sequence
MDVKDRRHRSLTRGRCGKECRYTSSSLDSEDCRVPTQKSYSSSETLKAYDHDSRMHYGNRVTDLIHRESDEFPRQGTNFTLAELGICEPSPHRSGYCSDMGILHQGYSLSTGSDADSDTEGGMSPEHAIRLWGRGIKSRRSSGLSSRENSALTLTDSDNENKSDDENGRPIPPTSSPSLLPSAQLPSSHNPPPVSCQMPLLDSNTSHQIMDTNPDEEFSPNSYLLRACSGPQQASSSGPPNHHSQSTLRPPLPPPHNHTLSHHHSSANSLNRNSLTNRRSQIHAPAPAPNDLATTPESVQLQDSWVLNSNVPLETRHFLFKTSSGSTPLFSSSSPGYPLTSGTVYTPPPRLLPRNTFSRKAFKLKKPSKYCSWKCAALSAIAAALLLAILLAYFIAMHLLGLNWQLQPADGHTFNNGIRTGLPGNDDVATMPSGGKVPWSLKNSSIDSGEAEVGRRVTQEVPPGVFWRSQIHISQPQFLKFNISLGKDALFGVYIRRGLPPSHAQYDFMERLDGKEKWSVVESPRERRSIQTLVQNEAVFVQYLDVGLWHLAFYNDGKDKEMVSFNTVVLDSVQDCPRNCHGNGECVSGVCHCFPGFLGADCAKAACPVLCSGNGQYSKGTCQCYSGWKGAECDVPMNQCIDPSCGGHGSCIDGNCVCSAGYKGEHCEEVDCLDPTCSSHGVCVNGECLCSPGWGGLNCELARVQCPDQCSGHGTYLPDTGLCSCDPNWMGPDCSVEVCSVDCGTHGVCIGGACRCEEGWTGAACDQRVCHPRCIEHGTCKDGKCECREGWNGEHCTIGRQTAGTETDGCPDLCNGNGRCTLGQNSWQCVCQTGWRGPGCNVAMETSCADNKDNEGDGLVDCLDPDCCLQSACQNSLLCRGSRDPLDIIQQGQTDWPAVKSFYDRIKLLAGKDSTHIIPGENPFNSSLVSLIRGQVVTTDGTPLVGVNVSFVKYPKYGYTITRQDGTFDLIANGGASLTLHFERAPFMSQERTVWLPWNSFYAMDTLVMKTEENSIPSCDLSGFVRPDPIIISSPLSTFFSAAPGQNPIVPETQVLHEEIELPGSNVKLRYLSSRTAGYKSLLKITMTQSTVPLNLIRVHLMVAVEGHLFQKSFQASPNLAYTFIWDKTDAYGQRVYGLSDAVVSVGFEYETCPSLILWEKRTALLQGFELDPSNLGGWSLDKHHILNVKSGILHKGTGENQFLTQQPAIITSIMGNGRRRSISCPSCNGLAEGNKLLAPVALAVGIDGSLYVGDFNYIRRIFPSRNVTSILELRNKEFKHSNNPAHKYYLAVDPVSGSLYVSDTNSRRIYRVKSLSGTKDLAGNSEVVAGTGEQCLPFDEARCGDGGKAIDATLMSPRGIAVDKNGLMYFVDATMIRKVDQNGIISTLLGSNDLTAVRPLSCDSSMDVAQVRLEWPTDLAVNPMDNSLYVLENNVILRITENHQVSIIAGRPMHCQVPGIDYSLSKLAIHSALESASAIAISHTGVLYITETDEKKINRLRQVTTNGEICLLAGAASDCDCKNDVNCNCYSGDDAYATDAILNSPSSLAVAPDGTIYIADLGNIRIRAVSKNKPVLNAFNQYEAASPGEQELYVFNADGIHQYTVSLVTGEYLYNFTYSTDNDVTELIDNNGNSLKIRRDSSGMPRHLLMPDNQIITLTVGTNGGLKVVSTQNLELGLMTYDGNTGLLATKSDETGWTTFYDYDHEGRLTNVTRPTGVVTSLHREMEKSITIDIENSNRDDDVTVITNLSSVEASYTVVQDQVRNSYQLCNNGTLRVMYANGMGISFHSEPHVLAGTITPTIGRCNISLPMENGLNSIEWRLRKEQIKGKVTIFGRKLRVHGRNLLSIDYDRNIRTEKIYDDHRKFTLRIIYDQVGRPFLWLPSSGLAAVNVSYFFNGRLAGLQRGAMSERTDIDKQGRIVSRMFADGKVWSYSYLDKSMVLLLQSQRQYIFEYDSSDRLLAVTMPSVARHSMSTHTSIGYIRNIYNPPESNASVIFDYSDDGRILKTSFLGTGRQVFYKYGKLSKLSEIVYDSTAVTFGYDETTGVLKMVNLQSGGFSCTIRYRKIGPLVDKQIYRFSEEGMVNARFDYTYHDNSFRIASIKPVISETPLPVDLYRYDEISGKVEHFGKFGVIYYDINQIITTAVMTLSKHFDTHGRIKEVQYEMFRSLMYWMTVQYDSMGRVIKRELKLGPYANTTKYTYDYDGDGQLQSVAVNDRPTWRYSYDLNGNLHLLNPGNSVRLMPLRYDLRDRITRLGDVQYKIDDDGYLCQRGSDIFEYNSKGLLTRAYNKASGWSVQYRYDGVGRRASYKTNLGHHLQYFYSDLHNPTRITHVYNHSNSEITSLYYDLQGHLFAMESSSGEEYYVASDNTGTPLAVFSINGLMIKQLQYTAYGEIYYDSNPDFQMVIGFHGGLYDPLTKLVHFTQRDYDVLAGRWTSPDYTMWKNVGKEPAPFNLYMFKSNNPLSSELDLKNYVTDVKSWLVMFGFQLSNIIPGFPRAKMYFVPPPYELSESQASENGQLITGVQQTTERHNQAFMALEGQVITKKLHASIREKAGHWFATTTPIIGKGIMFAIKEGRVTTGVSSIASEDSRKVASVLNNAYYLDKMHYSIEGKDTHYFVKIGSADGDLVTLGTTIGRKVLESGVNVTVSQPTLLVNGRTRRFTNIEFQYSTLLLSIRYGLTPDTLDEEKARVLDQARQRALGTAWAKEQQKARDGREGSRLWTEGEKQQLLSTGRVQGYEGYYVLPVEQYPELADSSSNIQFLRQNEMGKR

SEQ ID NO: 43673 - protein, 2773 aa, Artificial Sequence
  derived and/or modified sequence
MDVKDRRHRSLTRGRCGKECRYTSSSLDSEDCRVPTQKSYSSSETLKAYDHDSRMHYGNRVTDLIHRESDEFPRQGTNFTLAELGICEPSPHRSGYCSDMGILHQGYSLSTGSDADSDTEGGMSPEHAIRLWGRGIKSRRSSGLSSRENSALTLTDSDNENKSDDENGRPIPPTSSPSLLPSAQLPSSHNPPPVSCQMPLLDSNTSHQIMDTNPDEEFSPNSYLLRACSGPQQASSSGPPNHHSQSTLRPPLPPPHNHTLSHHHSSANSLNRNSLTNRRSQIHAPAPAPNDLATTPESVQLQDSWVLNSNVPLETRHFLFKTSSGSTPLFSSSSPGYPLTSGTVYTPPPRLLPRNTFSRKAFKLKKPSKYCSWKCAALSAIAAALLLAILLAYFIAMHLLGLNWQLQPADGHTFNNGIRTGLPGNDDVATMPSGGKVPWSLKNSSIDSGEAEVGRRVTQEVPPGVFWRSQIHISQPQFLKFNISLGKDALFGVYIRRGLPPSHAQYDFMERLDGKEKWSVVESPRERRSIQTLVQNEAVFVQYLDVGLWHLAFYNDGKDKEMVSFNTVVLDSVQDCPRNCHGNGECVSGVCHCFPGFLGADCAKAACPVLCSGNGQYSKGTCQCYSGWKGAECDVPMNQCIDPSCGGHGSCIDGNCVCSAGYKGEHCEEVDCLDPTCSSHGVCVNGECLCSPGWGGLNCELARVQCPDQCSGHGTYLPDTGLCSCDPNWMGPDCSVEVCSVDCGTHGVCIGGACRCEEGWTGAACDQRVCHPRCIEHGTCKDGKCECREGWNGEHCTIVRETIGGECYGCPDLCNGNGRCTLGQNSWQCVCQTGWRGPGCNVAMETSCADNKDNEGDGLVDCLDPDCCLQSACQNSLLCRGSRDPLDIIQQGQTDWPAVKSFYDRIKLLAGKDSTHIIPGENPFNSSLVSLIRGQVVTTDGTPLVGVNVSFVKYPKYGYTITRQDGTFDLIANGGASLTLHFERAPFMSQERTVWLPWNSFYAMDTLVMKTEENSIPSCDLSGFVRPDPIIISSPLSTFFSAAPGQNPIVPETQVLHEEIELPGSNVKLRYLSSRTAGYKSLLKITMTQSTVPLNLIRVHLMVAVEGHLFQKSFQASPNLAYTFIWDKTDAYGQRVYGLSDAVVSVGFEYETCPSLILWEKRTALLQGFELDPSNLGGWSLDKHHILNVKSGILHKGTGENQFLTQQPAIITSIMGNGRRRSISCPSCNGLAEGNKLLAPVALAVGIDGSLYVGDFNYIRRIFPSRNVTSILELRNKEFHNNNPAHKYYLAVDPVSGSLYVSDTNSRRIYRVKSLSGTKDLAGNSEVVAGTGEQCLPFDEARCGDGGKAIDATLMSPRGIAVDKNGLMYFVDATMIRKVDQNGIISTLLGSNDLTAVRPLSCDSSMDVAQVRLEWPTDLAVNPMDNSLYVLENNVILRITENHQVSIIAGRPMHCQVPGIDYSLSKLAIHSALESASAIAISHTGVLYITETDEKKINRLRQVTTNGEICLLAGAASDCDCKNDVNCNCYSGDDAYATDAILNSPSSLAVAPDGTIYIADLGNIRIRAVSKNKPVLNAFNQYEAASPGEQELYVFNADGIHQYTVSLVTGEYLYNFTYSTDNDVTELIDNNGNSLKIRRDSSGMPRHLLMPDNQIITLTVGTNGGLKVVSTQNLELGLMTYDGNTGLLATKSDETGWTTFYDYDHEGRLTNVTRPTGVVTSLHREMEKSITIDIENSNRDDDVTVITNLSSVEASYTVVQDQVRNSYQLCNNGTLRVMYANGMGISFHSEPHVLAGTITPTIGRCNISLPMENGLNSIEWRLRKEQIKGKVTIFGRKLRVHGRNLLSIDYDRNIRTEKIYDDHRKFTLRIIYDQVGRPFLWLPSSGLAAVNVSYFFNGRLAGLQRGAMSERTDIDKQGRIVSRMFADGKVWSYSYLDKSMVLLLQSQRQYIFEYDSSDRLLAVTMPSVARHSMSTHTSIGYIRNIYNPPESNASVIFDYSDDGRILKTSFLGTGRQVFYKYGKLSKLSEIVYDSTAVTFGYDETTGVLKMVNLQSGGFSCTIRYRKIGPLVDKQIYRFSEEGMVNARFDYTYHDNSFRIASIKPVISETPLPVDLYRYDEISGKVEHFGKFGVIYYDINQIITTAVMTLSKHFDTHGRIKEVQYEMFRSLMYWMTVQYDSMGRVIKRELKLGPYANTTKYTYDYDGDGQLQSVAVNDRPTWRYSYDLNGNLHLLNPGNSVRLMPLRYDLRDRITRLGDVQYKIDDDGYLCQRGSDIFEYNSKGLLTRAYNKASGWSVQYRYDGVGRRASYKTNLGHHLQYFYSDLHNPTRITHVYNHSNSEITSLYYDLQGHLFAMESSSGEEYYVASDNTGTPLAVFSINGLMIKQLQYTAYGEIYYDSNPDFQMVIGFHGGLYDPLTKLVHFTQRDYDVLAGRWTSPDYTMWKNVGKEPAPFNLYMFKSNNPLSSELDLKNYVTDVKSWLVMFGFQLSNIIPGFPRAKMYFVPPPYELSESQASENGQLITGVQQTTERHNQAFMALEGQVITKKLHASIREKAGHWFATTTPIIGKGIMFAIKEGRVTTGVSSIASEDSRKVASVLNNAYYLDKMHYSIEGKDTHYFVKIGSADGDLVTLGTTIGRKVLESGVNVTVSQPTLLVNGRTRRFTNIEFQYSTLLLSIRYGLTPDTLDEEKARVLDQARQRALGTAWAKEQQKARDGREGSRLWTEGEKQQLLSTGRVQGYEGYYVLPVEQYPELADSSSNIQFLRQNEMGKR

SEQ ID NO: 43674 - DNA, 7797 bp, Artificial Sequence
  derived and/or modified sequence
ggcagacccatcccccccaccagcagccccagcctgctgcccagcgcccagctgcccagcagccacaaccccccccccgtgagctgccagatgcccctgctggacagcaacaccagccaccagatcatggacaccaaccccgacgaggagttcagccccaacagctacctgctgagagcctgcagcggcccccagcaggccagcagcagcggcccccccaaccaccacagccagagcaccctgagaccccccctgccccccccccacaaccacaccctgagccaccaccacagcagcgccaacagcctgaacagaaacagcctgaccaacagaagaagccagatccacgcccccgcccccgcccccaacgacctggccaccacccccgagagcgtgcagctgcaggacagctgggtgctgaacagcaacgtgcccctggagaccagacacttcctgttcaagaccagcagcggcagcacccccctgttcagcagcagcagccccggctaccccctgaccagcggcaccgtgtacacccccccccccagactgctgcccagaaacaccttcagcagaaaggccttcaagctgaagaagcccagcaagtactgcagctggaagtgcgccgccctgagcgccatcgccgccgccctgctgctggccatcctgctggcctacttcatcgccatgcacctgctgggcctgaactggcagctgcagcccgccgacggccacaccttcaacaacggcatcagaaccggcctgcccggcaacgacgacgtggccaccatgcccagcggcggcaaggtgccctggagcctgaagaacagcagcatcgacagcggcgaggccgaggtgggcagaagagtgacccaggaggtgccccccggcgtgttctggagaagccagatccacatcagccagccccagttcctgaagttcaacatcagcctgggcaaggacgccctgttcggcgtgtacatcagaagaggcctgccccccagccacgcccagtacgacttcatggagagactggacggcaaggagaagtggagcgtggtggagagccccagagagagaagaagcatccagaccctggtgcagaacgaggccgtgttcgtgcagtacctggacgtgggcctgtggcacctggccttctacaacgacggcaaggacaaggagatggtgagcttcaacaccgtggtgctggacagcgtgcaggactgccccagaaactgccacggcaacggcgagtgcgtgagcggcgtgtgccactgcttccccggcttcctgggcgccgactgcgccaaggccgcctgccccgtgctgtgcagcggcaacggccagtacagcaagggcacctgccagtgctacagcggctggaagggcgccgagtgcgacgtgcccatgaaccagtgcatcgaccccagctgcggcggccacggcagctgcatcgacggcaactgcgtgtgcagcgccggctacaagggcgagcactgcgaggaggtggactgcctggaccccacctgcagcagccacggcgtgtgcgtgaacggcgagtgcctgtgcagccccggctggggcggcctgaactgcgagctggccagagtgcagtgccccgaccagtgcagcggccacggcacctacctgcccgacaccggcctgtgcagctgcgaccccaactggatgggccccgactgcagcgtggaggtgtgcagcgtggactgcggcacccacggcgtgtgcatcggcggcgcctgcagatgcgaggagggctggaccggcgccgcctgcgaccagagagtgtgccaccccagatgcatcgagcacggcacctgcaaggacggcaagtgcgagtgcagagagggctggaacggcgagcactgcaccatcgacggctgccccgacctgtgcaacggcaacggcagatgcaccctgggccagaacagctggcagtgcgtgtgccagaccggctggagaggccccggctgcaacgtggccatggagaccagctgcgccgacaacaaggacaacgagggcgacggcctggtggactgcctggaccccgactgctgcctgcagagcgcctgccagaacagcctgctgtgcagaggcagcagagaccccctggacatcatccagcagggccagaccgactggcccgccgtgaagagcttctacgacagaatcaagctgctggccggcaaggacagcacccacatcatccccggcgagaaccccttcaacagcagcctggtgagcctgatcagaggccaggtggtgaccaccgacggcacccccctggtgggcgtgaacgtgagcttcgtgaagtaccccaagtacggctacaccatcaccagacaggacggcaccttcgacctgatcgccaacggcggcgccagcctgaccctgcacttcgagagagcccccttcatgagccaggagagaaccgtgtggctgccctggaacagcttctacgccatggacaccctggtgatgaagaccgaggagaacagcatccccagctgcgacctgagcggcttcgtgagacccgaccccatcatcatcagcagccccctgagcaccttcttcagcgccgcccccggccagaaccccatcgtgcccgagacccaggtgctgcacgaggagatcgagctgcccggcagcaacgtgaagctgagatacctgagcagcagaaccgccggctacaagagcctgctgaagatcaccatgacccagagcaccgtgcccctgaacctgatcagagtgcacctgatggtggccgtggagggccacctgttccagaagagcttccaggccagccccaacctggcctacaccttcatctgggacaagaccgacgcctacggccagagagtgtacggcctgagcgacgccgtggtgagcgtgggcttcgagtacgagacctgccccagcctgatcctgtgggagaagagaaccgccctgctgcagggcttcgagctggaccccagcaacctgggcggctggagcctggacaagcaccacatcctgaacgtgaagagcggcatcctgcacaagggcaccggcgagaaccagttcctgacccagcagcccgccatcatcaccagcatcatgggcaacggcagaagaagaagcatcagctgccccagctgcaacggcctggccgagggcaacaagctgctggcccccgtggccctggccgtgggcatcgacggcagcctgtacgtgggcgacttcaactacatcagaagaatcttccccagcagaaacgtgaccagcatcctggagctgagaaacaaggagttcaagcacagcaacaaccccgcccacaagtactacctggccgtggaccccgtgagcggcagcctgtacgtgagcgacaccaacagcagaagaatctacagagtgaagagcctgagcggcaccaaggacctggccggcaacagcgaggtggtggccggcaccggcgagcagtgcctgcccttcgacgaggccagatgcggcgacggcggcaaggccatcgacgccaccctgatgagccccagaggcatcgccgtggacaagaacggcctgatgtacttcgtggacgccaccatgatcagaaaggtggaccagaacggcatcatcagcaccctgctgggcagcaacgacctgaccgccgtgagacccctgagctgcgacagcagcatggacgtggcccaggtgagactggagtggcccaccgacctggccgtgaaccccatggacaacagcctgtacgtgctggagaacaacgtgatcctgagaatcaccgagaaccaccaggtgagcatcatcgccggcagacccatgcactgccaggtgcccggcatcgactacagcctgagcaagctggccatccacagcgccctggagagcgccagcgccatcgccatcagccacaccggcgtgctgtacatcaccgagaccgacgagaagaagatcaacagactgagacaggtgaccaccaacggcgagatctgcctgctggccggcgccgccagcgactgcgactgcaagaacgacgtgaactgcaactgctacagcggcgacgacgcctacgccaccgacgccatcctgaacagccccagcagcctggccgtggcccccgacggcaccatctacatcgccgacctgggcaacatcagaatcagagccgtgagcaagaacaagcccgtgctgaacgccttcaaccagtacgaggccgccagccccggcgagcaggagctgtacgtgttcaacgccgacggcatccaccagtacaccgtgagcctggtgaccggcgagtacctgtacaacttcacctacagcaccgacaacgacgtgaccgagctgatcgacaacaacggcaacagcctgaagatcagaagagacagcagcggcatgcccagacacctgctgatgcccgacaaccagatcatcaccctgaccgtgggcaccaacggcggcctgaaggtggtgagcacccagaacctggagctgggcctgatgacctacgacggcaacaccggcctgctggccaccaagagcgacgagaccggctggaccaccttctacgactacgaccacgagggcagactgaccaacgtgaccagacccaccggcgtggtgaccagcctgcacagagagatggagaagagcatcaccatcgacatcgagaacagcaacagagacgacgacgtgaccgtgatcaccaacctgagcagcgtggaggccagctacaccgtggtgcaggaccaggtgagaaacagctaccagctgtgcaacaacggcaccctgagagtgatgtacgccaacggcatgggcatcagcttccacagcgagccccacgtgctggccggcaccatcacccccaccatcggcagatgcaacatcagcctgcccatggagaacggcctgaacagcatcgagtggagactgagaaaggagcagatcaagggcaaggtgaccatcttcggcagaaagctgagagtgcacggcagaaacctgctgagcatcgactacgacagaaacatcagaaccgagaagatctacgacgaccacagaaagttcaccctgagaatcatctacgaccaggtgggcagacccttcctgtggctgcccagcagcggcctggccgccgtgaacgtgagctacttcttcaacggcagactggccggcctgcagagaggcgccatgagcgagagaaccgacatcgacaagcagggcagaatcgtgagcagaatgttcgccgacggcaaggtgtggagctacagctacctggacaagagcatggtgctgctgctgcagagccagagacagtacatcttcgagtacgacagcagcgacagactgctggccgtgaccatgcccagcgtggccagacacagcatgagcacccacaccagcatcggctacatcagaaacatctacaacccccccgagagcaacgccagcgtgatcttcgactacagcgacgacggcagaatcctgaagaccagcttcctgggcaccggcagacaggtgttctacaagtacggcaagctgagcaagctgagcgagatcgtgtacgacagcaccgccgtgaccttcggctacgacgagaccaccggcgtgctgaagatggtgaacctgcagagcggcggcttcagctgcaccatcagatacagaaagatcggccccctggtggacaagcagatctacagattcagcgaggagggcatggtgaacgccagattcgactacacctaccacgacaacagcttcagaatcgccagcatcaagcccgtgatcagcgagacccccctgcccgtggacctgtacagatacgacgagatcagcggcaaggtggagcacttcggcaagttcggcgtgatctactacgacatcaaccagatcatcaccaccgccgtgatgaccctgagcaagcacttcgacacccacggcagaatcaaggaggtgcagtacgagatgttcagaagcctgatgtactggatgaccgtgcagtacgacagcatgggcagagtgatcaagagagagctgaagctgggcccctacgccaacaccaccaagtacacctacgactacgacggcgacggccagctgcagagcgtggccgtgaacgacagacccacctggagatacagctacgacctgaacggcaacctgcacctgctgaaccccggcaacagcgtgagactgatgcccctgagatacgacctgagagacagaatcaccagactgggcgacgtgcagtacaagatcgacgacgacggctacctgtgccagagaggcagcgacatcttcgagtacaacagcaagggcctgctgaccagagcctacaacaaggccagcggctggagcgtgcagtacagatacgacggcgtgggcagaagagccagctacaagaccaacctgggccaccacctgcagtacttctacagcgacctgcacaaccccaccagaatcacccacgtgtacaaccacagcaacagcgagatcaccagcctgtactacgacctgcagggccacctgttcgccatggagagcagcagcggcgaggagtactacgtggccagcgacaacaccggcacccccctggccgtgttcagcatcaacggcctgatgatcaagcagctgcagtacaccgcctacggcgagatctactacgacagcaaccccgacttccagatggtgatcggcttccacggcggcctgtacgaccccctgaccaagctggtgcacttcacccagagagactacgacgtgctggccggcagatggaccagccccgactacaccatgtggaagaacgtgggcaaggagcccgcccccttcaacctgtacatgttcaagagcaacaaccccctgagcagcgagctggacctgaagaactacgtgaccgacgtgaagagctggctggtgatgttcggcttccagctgagcaacatcatccccggcttccccagagccaagatgtacttcgtgccccccccctacgagctgagcgagagccaggccagcgagaacggccagctgatcaccggcgtgcagcagaccaccgagagacacaaccaggccttcatggccctggagggccaggtgatcaccaagaagctgcacgccagcatcagagagaaggccggccactggttcgccaccaccacccccatcatcggcaagggcatcatgttcgccatcaaggagggcagagtgaccaccggcgtgagcagcatcgccagcgaggacagcagaaaggtggccagcgtgctgaacaacgcctactacctggacaagatgcactacagcatcgagggcaaggacacccactacttcgtgaagatcggcagcgccgacggcgacctggtgaccctgggcaccaccatcggcagaaaggtgctggagagcggcgtgaacgtgaccgtgagccagcccaccctgctggtgaacggcagaaccagaagattcaccaacatcgagttccagtacagcaccctgctgctgagcatcagatacggcctgacccccgacaccctggacgaggagaaggccagagtgctggaccaggccagacagagagccctgggcaccgcctgggccaaggagcagcagaaggccagagacggcagagagggcagcagactgtggaccgagggcgagaagcagcagctgctgagcaccggcagagtgcagggctacgagggctactacgtgctgcccgtggagcagtaccccgagctggccgacagcagcagcaacatccagttcctgagacagaacgagatgggcaagagatag

SEQ ID NO: 43675 - DNA, 8325 bp, Artificial Sequence
  derived and/or modified sequence
atggacgtgaaggacagaagacacagaagcctgaccagaggcagatgcggcaaggagtgcagatacaccagcagcagcctggacagcgaggactgcagagtgcccacccagaagagctacagcagcagcgagaccctgaaggcctacgaccacgacagcagaatgcactacggcaacagagtgaccgacctgatccacagagagagcgacgagttccccagacagggcaccaacttcaccctggccgagctgggcatctgcgagcccagcccccacagaagcggctactgcagcgacatgggcatcctgcaccagggctacagcctgagcaccggcagcgacgccgacagcgacaccgagggcggcatgagccccgagcacgccatcagactgtggggcagaggcatcaagagcagaagaagcagcggcctgagcagcagagagaacagcgccctgaccctgaccgacagcgacaacgagaacaagagcgacgacgagaacggcagacccatcccccccaccagcagccccagcctgctgcccagcgcccagctgcccagcagccacaaccccccccccgtgagctgccagatgcccctgctggacagcaacaccagccaccagatcatggacaccaaccccgacgaggagttcagccccaacagctacctgctgagagcctgcagcggcccccagcaggccagcagcagcggcccccccaaccaccacagccagagcaccctgagaccccccctgccccccccccacaaccacaccctgagccaccaccacagcagcgccaacagcctgaacagaaacagcctgaccaacagaagaagccagatccacgcccccgcccccgcccccaacgacctggccaccacccccgagagcgtgcagctgcaggacagctgggtgctgaacagcaacgtgcccctggagaccagacacttcctgttcaagaccagcagcggcagcacccccctgttcagcagcagcagccccggctaccccctgaccagcggcaccgtgtacacccccccccccagactgctgcccagaaacaccttcagcagaaaggccttcaagctgaagaagcccagcaagtactgcagctggaagtgcgccgccctgagcgccatcgccgccgccctgctgctggccatcctgctggcctacttcatcgccatgcacctgctgggcctgaactggcagctgcagcccgccgacggccacaccttcaacaacggcatcagaaccggcctgcccggcaacgacgacgtggccaccatgcccagcggcggcaaggtgccctggagcctgaagaacagcagcatcgacagcggcgaggccgaggtgggcagaagagtgacccaggaggtgccccccggcgtgttctggagaagccagatccacatcagccagccccagttcctgaagttcaacatcagcctgggcaaggacgccctgttcggcgtgtacatcagaagaggcctgccccccagccacgcccagtacgacttcatggagagactggacggcaaggagaagtggagcgtggtggagagccccagagagagaagaagcatccagaccctggtgcagaacgaggccgtgttcgtgcagtacctggacgtgggcctgtggcacctggccttctacaacgacggcaaggacaaggagatggtgagcttcaacaccgtggtgctggacagcgtgcaggactgccccagaaactgccacggcaacggcgagtgcgtgagcggcgtgtgccactgcttccccggcttcctgggcgccgactgcgccaaggccgcctgccccgtgctgtgcagcggcaacggccagtacagcaagggcacctgccagtgctacagcggctggaagggcgccgagtgcgacgtgcccatgaaccagtgcatcgaccccagctgcggcggccacggcagctgcatcgacggcaactgcgtgtgcagcgccggctacaagggcgagcactgcgaggaggtggactgcctggaccccacctgcagcagccacggcgtgtgcgtgaacggcgagtgcctgtgcagccccggctggggcggcctgaactgcgagctggccagagtgcagtgccccgaccagtgcagcggccacggcacctacctgcccgacaccggcctgtgcagctgcgaccccaactggatgggccccgactgcagcgtggaggtgtgcagcgtggactgcggcacccacggcgtgtgcatcggcggcgcctgcagatgcgaggagggctggaccggcgccgcctgcgaccagagagtgtgccaccccagatgcatcgagcacggcacctgcaaggacggcaagtgcgagtgcagagagggctggaacggcgagcactgcaccatcggcagacagaccgccggcaccgagaccgacggctgccccgacctgtgcaacggcaacggcagatgcaccctgggccagaacagctggcagtgcgtgtgccagaccggctggagaggccccggctgcaacgtggccatggagaccagctgcgccgacaacaaggacaacgagggcgacggcctggtggactgcctggaccccgactgctgcctgcagagcgcctgccagaacagcctgctgtgcagaggcagcagagaccccctggacatcatccagcagggccagaccgactggcccgccgtgaagagcttctacgacagaatcaagctgctggccggcaaggacagcacccacatcatccccggcgagaaccccttcaacagcagcctggtgagcctgatcagaggccaggtggtgaccaccgacggcacccccctggtgggcgtgaacgtgagcttcgtgaagtaccccaagtacggctacaccatcaccagacaggacggcaccttcgacctgatcgccaacggcggcgccagcctgaccctgcacttcgagagagcccccttcatgagccaggagagaaccgtgtggctgccctggaacagcttctacgccatggacaccctggtgatgaagaccgaggagaacagcatccccagctgcgacctgagcggcttcgtgagacccgaccccatcatcatcagcagccccctgagcaccttcttcagcgccgcccccggccagaaccccatcgtgcccgagacccaggtgctgcacgaggagatcgagctgcccggcagcaacgtgaagctgagatacctgagcagcagaaccgccggctacaagagcctgctgaagatcaccatgacccagagcaccgtgcccctgaacctgatcagagtgcacctgatggtggccgtggagggccacctgttccagaagagcttccaggccagccccaacctggcctacaccttcatctgggacaagaccgacgcctacggccagagagtgtacggcctgagcgacgccgtggtgagcgtgggcttcgagtacgagacctgccccagcctgatcctgtgggagaagagaaccgccctgctgcagggcttcgagctggaccccagcaacctgggcggctggagcctggacaagcaccacatcctgaacgtgaagagcggcatcctgcacaagggcaccggcgagaaccagttcctgacccagcagcccgccatcatcaccagcatcatgggcaacggcagaagaagaagcatcagctgccccagctgcaacggcctggccgagggcaacaagctgctggcccccgtggccctggccgtgggcatcgacggcagcctgtacgtgggcgacttcaactacatcagaagaatcttccccagcagaaacgtgaccagcatcctggagctgagaaacaaggagttcaagcacagcaacaaccccgcccacaagtactacctggccgtggaccccgtgagcggcagcctgtacgtgagcgacaccaacagcagaagaatctacagagtgaagagcctgagcggcaccaaggacctggccggcaacagcgaggtggtggccggcaccggcgagcagtgcctgcccttcgacgaggccagatgcggcgacggcggcaaggccatcgacgccaccctgatgagccccagaggcatcgccgtggacaagaacggcctgatgtacttcgtggacgccaccatgatcagaaaggtggaccagaacggcatcatcagcaccctgctgggcagcaacgacctgaccgccgtgagacccctgagctgcgacagcagcatggacgtggcccaggtgagactggagtggcccaccgacctggccgtgaaccccatggacaacagcctgtacgtgctggagaacaacgtgatcctgagaatcaccgagaaccaccaggtgagcatcatcgccggcagacccatgcactgccaggtgcccggcatcgactacagcctgagcaagctggccatccacagcgccctggagagcgccagcgccatcgccatcagccacaccggcgtgctgtacatcaccgagaccgacgagaagaagatcaacagactgagacaggtgaccaccaacggcgagatctgcctgctggccggcgccgccagcgactgcgactgcaagaacgacgtgaactgcaactgctacagcggcgacgacgcctacgccaccgacgccatcctgaacagccccagcagcctggccgtggcccccgacggcaccatctacatcgccgacctgggcaacatcagaatcagagccgtgagcaagaacaagcccgtgctgaacgccttcaaccagtacgaggccgccagccccggcgagcaggagctgtacgtgttcaacgccgacggcatccaccagtacaccgtgagcctggtgaccggcgagtacctgtacaacttcacctacagcaccgacaacgacgtgaccgagctgatcgacaacaacggcaacagcctgaagatcagaagagacagcagcggcatgcccagacacctgctgatgcccgacaaccagatcatcaccctgaccgtgggcaccaacggcggcctgaaggtggtgagcacccagaacctggagctgggcctgatgacctacgacggcaacaccggcctgctggccaccaagagcgacgagaccggctggaccaccttctacgactacgaccacgagggcagactgaccaacgtgaccagacccaccggcgtggtgaccagcctgcacagagagatggagaagagcatcaccatcgacatcgagaacagcaacagagacgacgacgtgaccgtgatcaccaacctgagcagcgtggaggccagctacaccgtggtgcaggaccaggtgagaaacagctaccagctgtgcaacaacggcaccctgagagtgatgtacgccaacggcatgggcatcagcttccacagcgagccccacgtgctggccggcaccatcacccccaccatcggcagatgcaacatcagcctgcccatggagaacggcctgaacagcatcgagtggagactgagaaaggagcagatcaagggcaaggtgaccatcttcggcagaaagctgagagtgcacggcagaaacctgctgagcatcgactacgacagaaacatcagaaccgagaagatctacgacgaccacagaaagttcaccctgagaatcatctacgaccaggtgggcagacccttcctgtggctgcccagcagcggcctggccgccgtgaacgtgagctacttcttcaacggcagactggccggcctgcagagaggcgccatgagcgagagaaccgacatcgacaagcagggcagaatcgtgagcagaatgttcgccgacggcaaggtgtggagctacagctacctggacaagagcatggtgctgctgctgcagagccagagacagtacatcttcgagtacgacagcagcgacagactgctggccgtgaccatgcccagcgtggccagacacagcatgagcacccacaccagcatcggctacatcagaaacatctacaacccccccgagagcaacgccagcgtgatcttcgactacagcgacgacggcagaatcctgaagaccagcttcctgggcaccggcagacaggtgttctacaagtacggcaagctgagcaagctgagcgagatcgtgtacgacagcaccgccgtgaccttcggctacgacgagaccaccggcgtgctgaagatggtgaacctgcagagcggcggcttcagctgcaccatcagatacagaaagatcggccccctggtggacaagcagatctacagattcagcgaggagggcatggtgaacgccagattcgactacacctaccacgacaacagcttcagaatcgccagcatcaagcccgtgatcagcgagacccccctgcccgtggacctgtacagatacgacgagatcagcggcaaggtggagcacttcggcaagttcggcgtgatctactacgacatcaaccagatcatcaccaccgccgtgatgaccctgagcaagcacttcgacacccacggcagaatcaaggaggtgcagtacgagatgttcagaagcctgatgtactggatgaccgtgcagtacgacagcatgggcagagtgatcaagagagagctgaagctgggcccctacgccaacaccaccaagtacacctacgactacgacggcgacggccagctgcagagcgtggccgtgaacgacagacccacctggagatacagctacgacctgaacggcaacctgcacctgctgaaccccggcaacagcgtgagactgatgcccctgagatacgacctgagagacagaatcaccagactgggcgacgtgcagtacaagatcgacgacgacggctacctgtgccagagaggcagcgacatcttcgagtacaacagcaagggcctgctgaccagagcctacaacaaggccagcggctggagcgtgcagtacagatacgacggcgtgggcagaagagccagctacaagaccaacctgggccaccacctgcagtacttctacagcgacctgcacaaccccaccagaatcacccacgtgtacaaccacagcaacagcgagatcaccagcctgtactacgacctgcagggccacctgttcgccatggagagcagcagcggcgaggagtactacgtggccagcgacaacaccggcacccccctggccgtgttcagcatcaacggcctgatgatcaagcagctgcagtacaccgcctacggcgagatctactacgacagcaaccccgacttccagatggtgatcggcttccacggcggcctgtacgaccccctgaccaagctggtgcacttcacccagagagactacgacgtgctggccggcagatggaccagccccgactacaccatgtggaagaacgtgggcaaggagcccgcccccttcaacctgtacatgttcaagagcaacaaccccctgagcagcgagctggacctgaagaactacgtgaccgacgtgaagagctggctggtgatgttcggcttccagctgagcaacatcatccccggcttccccagagccaagatgtacttcgtgccccccccctacgagctgagcgagagccaggccagcgagaacggccagctgatcaccggcgtgcagcagaccaccgagagacacaaccaggccttcatggccctggagggccaggtgatcaccaagaagctgcacgccagcatcagagagaaggccggccactggttcgccaccaccacccccatcatcggcaagggcatcatgttcgccatcaaggagggcagagtgaccaccggcgtgagcagcatcgccagcgaggacagcagaaaggtggccagcgtgctgaacaacgcctactacctggacaagatgcactacagcatcgagggcaaggacacccactacttcgtgaagatcggcagcgccgacggcgacctggtgaccctgggcaccaccatcggcagaaaggtgctggagagcggcgtgaacgtgaccgtgagccagcccaccctgctggtgaacggcagaaccagaagattcaccaacatcgagttccagtacagcaccctgctgctgagcatcagatacggcctgacccccgacaccctggacgaggagaaggccagagtgctggaccaggccagacagagagccctgggcaccgcctgggccaaggagcagcagaaggccagagacggcagagagggcagcagactgtggaccgagggcgagaagcagcagctgctgagcaccggcagagtgcagggctacgagggctactacgtgctgcccgtggagcagtaccccgagctggccgacagcagcagcaacatccagttcctgagacagaacgagatgggcaagagatag

SEQ ID NO: 43676 - DNA, 8322 bp, Artificial Sequence
  derived and/or modified sequence
atggacgtgaaggacagaagacacagaagcctgaccagaggcagatgcggcaaggagtgcagatacaccagcagcagcctggacagcgaggactgcagagtgcccacccagaagagctacagcagcagcgagaccctgaaggcctacgaccacgacagcagaatgcactacggcaacagagtgaccgacctgatccacagagagagcgacgagttccccagacagggcaccaacttcaccctggccgagctgggcatctgcgagcccagcccccacagaagcggctactgcagcgacatgggcatcctgcaccagggctacagcctgagcaccggcagcgacgccgacagcgacaccgagggcggcatgagccccgagcacgccatcagactgtggggcagaggcatcaagagcagaagaagcagcggcctgagcagcagagagaacagcgccctgaccctgaccgacagcgacaacgagaacaagagcgacgacgagaacggcagacccatcccccccaccagcagccccagcctgctgcccagcgcccagctgcccagcagccacaaccccccccccgtgagctgccagatgcccctgctggacagcaacaccagccaccagatcatggacaccaaccccgacgaggagttcagccccaacagctacctgctgagagcctgcagcggcccccagcaggccagcagcagcggcccccccaaccaccacagccagagcaccctgagaccccccctgccccccccccacaaccacaccctgagccaccaccacagcagcgccaacagcctgaacagaaacagcctgaccaacagaagaagccagatccacgcccccgcccccgcccccaacgacctggccaccacccccgagagcgtgcagctgcaggacagctgggtgctgaacagcaacgtgcccctggagaccagacacttcctgttcaagaccagcagcggcagcacccccctgttcagcagcagcagccccggctaccccctgaccagcggcaccgtgtacacccccccccccagactgctgcccagaaacaccttcagcagaaaggccttcaagctgaagaagcccagcaagtactgcagctggaagtgcgccgccctgagcgccatcgccgccgccctgctgctggccatcctgctggcctacttcatcgccatgcacctgctgggcctgaactggcagctgcagcccgccgacggccacaccttcaacaacggcatcagaaccggcctgcccggcaacgacgacgtggccaccatgcccagcggcggcaaggtgccctggagcctgaagaacagcagcatcgacagcggcgaggccgaggtgggcagaagagtgacccaggaggtgccccccggcgtgttctggagaagccagatccacatcagccagccccagttcctgaagttcaacatcagcctgggcaaggacgccctgttcggcgtgtacatcagaagaggcctgccccccagccacgcccagtacgacttcatggagagactggacggcaaggagaagtggagcgtggtggagagccccagagagagaagaagcatccagaccctggtgcagaacgaggccgtgttcgtgcagtacctggacgtgggcctgtggcacctggccttctacaacgacggcaaggacaaggagatggtgagcttcaacaccgtggtgctggacagcgtgcaggactgccccagaaactgccacggcaacggcgagtgcgtgagcggcgtgtgccactgcttccccggcttcctgggcgccgactgcgccaaggccgcctgccccgtgctgtgcagcggcaacggccagtacagcaagggcacctgccagtgctacagcggctggaagggcgccgagtgcgacgtgcccatgaaccagtgcatcgaccccagctgcggcggccacggcagctgcatcgacggcaactgcgtgtgcagcgccggctacaagggcgagcactgcgaggaggtggactgcctggaccccacctgcagcagccacggcgtgtgcgtgaacggcgagtgcctgtgcagccccggctggggcggcctgaactgcgagctggccagagtgcagtgccccgaccagtgcagcggccacggcacctacctgcccgacaccggcctgtgcagctgcgaccccaactggatgggccccgactgcagcgtggaggtgtgcagcgtggactgcggcacccacggcgtgtgcatcggcggcgcctgcagatgcgaggagggctggaccggcgccgcctgcgaccagagagtgtgccaccccagatgcatcgagcacggcacctgcaaggacggcaagtgcgagtgcagagagggctggaacggcgagcactgcaccatcgtgagagagaccatcggcggcgagtgctacggctgccccgacctgtgcaacggcaacggcagatgcaccctgggccagaacagctggcagtgcgtgtgccagaccggctggagaggccccggctgcaacgtggccatggagaccagctgcgccgacaacaaggacaacgagggcgacggcctggtggactgcctggaccccgactgctgcctgcagagcgcctgccagaacagcctgctgtgcagaggcagcagagaccccctggacatcatccagcagggccagaccgactggcccgccgtgaagagcttctacgacagaatcaagctgctggccggcaaggacagcacccacatcatccccggcgagaaccccttcaacagcagcctggtgagcctgatcagaggccaggtggtgaccaccgacggcacccccctggtgggcgtgaacgtgagcttcgtgaagtaccccaagtacggctacaccatcaccagacaggacggcaccttcgacctgatcgccaacggcggcgccagcctgaccctgcacttcgagagagcccccttcatgagccaggagagaaccgtgtggctgccctggaacagcttctacgccatggacaccctggtgatgaagaccgaggagaacagcatccccagctgcgacctgagcggcttcgtgagacccgaccccatcatcatcagcagccccctgagcaccttcttcagcgccgcccccggccagaaccccatcgtgcccgagacccaggtgctgcacgaggagatcgagctgcccggcagcaacgtgaagctgagatacctgagcagcagaaccgccggctacaagagcctgctgaagatcaccatgacccagagcaccgtgcccctgaacctgatcagagtgcacctgatggtggccgtggagggccacctgttccagaagagcttccaggccagccccaacctggcctacaccttcatctgggacaagaccgacgcctacggccagagagtgtacggcctgagcgacgccgtggtgagcgtgggcttcgagtacgagacctgccccagcctgatcctgtgggagaagagaaccgccctgctgcagggcttcgagctggaccccagcaacctgggcggctggagcctggacaagcaccacatcctgaacgtgaagagcggcatcctgcacaagggcaccggcgagaaccagttcctgacccagcagcccgccatcatcaccagcatcatgggcaacggcagaagaagaagcatcagctgccccagctgcaacggcctggccgagggcaacaagctgctggcccccgtggccctggccgtgggcatcgacggcagcctgtacgtgggcgacttcaactacatcagaagaatcttccccagcagaaacgtgaccagcatcctggagctgagaaacaaggagttccacaacaacaaccccgcccacaagtactacctggccgtggaccccgtgagcggcagcctgtacgtgagcgacaccaacagcagaagaatctacagagtgaagagcctgagcggcaccaaggacctggccggcaacagcgaggtggtggccggcaccggcgagcagtgcctgcccttcgacgaggccagatgcggcgacggcggcaaggccatcgacgccaccctgatgagccccagaggcatcgccgtggacaagaacggcctgatgtacttcgtggacgccaccatgatcagaaaggtggaccagaacggcatcatcagcaccctgctgggcagcaacgacctgaccgccgtgagacccctgagctgcgacagcagcatggacgtggcccaggtgagactggagtggcccaccgacctggccgtgaaccccatggacaacagcctgtacgtgctggagaacaacgtgatcctgagaatcaccgagaaccaccaggtgagcatcatcgccggcagacccatgcactgccaggtgcccggcatcgactacagcctgagcaagctggccatccacagcgccctggagagcgccagcgccatcgccatcagccacaccggcgtgctgtacatcaccgagaccgacgagaagaagatcaacagactgagacaggtgaccaccaacggcgagatctgcctgctggccggcgccgccagcgactgcgactgcaagaacgacgtgaactgcaactgctacagcggcgacgacgcctacgccaccgacgccatcctgaacagccccagcagcctggccgtggcccccgacggcaccatctacatcgccgacctgggcaacatcagaatcagagccgtgagcaagaacaagcccgtgctgaacgccttcaaccagtacgaggccgccagccccggcgagcaggagctgtacgtgttcaacgccgacggcatccaccagtacaccgtgagcctggtgaccggcgagtacctgtacaacttcacctacagcaccgacaacgacgtgaccgagctgatcgacaacaacggcaacagcctgaagatcagaagagacagcagcggcatgcccagacacctgctgatgcccgacaaccagatcatcaccctgaccgtgggcaccaacggcggcctgaaggtggtgagcacccagaacctggagctgggcctgatgacctacgacggcaacaccggcctgctggccaccaagagcgacgagaccggctggaccaccttctacgactacgaccacgagggcagactgaccaacgtgaccagacccaccggcgtggtgaccagcctgcacagagagatggagaagagcatcaccatcgacatcgagaacagcaacagagacgacgacgtgaccgtgatcaccaacctgagcagcgtggaggccagctacaccgtggtgcaggaccaggtgagaaacagctaccagctgtgcaacaacggcaccctgagagtgatgtacgccaacggcatgggcatcagcttccacagcgagccccacgtgctggccggcaccatcacccccaccatcggcagatgcaacatcagcctgcccatggagaacggcctgaacagcatcgagtggagactgagaaaggagcagatcaagggcaaggtgaccatcttcggcagaaagctgagagtgcacggcagaaacctgctgagcatcgactacgacagaaacatcagaaccgagaagatctacgacgaccacagaaagttcaccctgagaatcatctacgaccaggtgggcagacccttcctgtggctgcccagcagcggcctggccgccgtgaacgtgagctacttcttcaacggcagactggccggcctgcagagaggcgccatgagcgagagaaccgacatcgacaagcagggcagaatcgtgagcagaatgttcgccgacggcaaggtgtggagctacagctacctggacaagagcatggtgctgctgctgcagagccagagacagtacatcttcgagtacgacagcagcgacagactgctggccgtgaccatgcccagcgtggccagacacagcatgagcacccacaccagcatcggctacatcagaaacatctacaacccccccgagagcaacgccagcgtgatcttcgactacagcgacgacggcagaatcctgaagaccagcttcctgggcaccggcagacaggtgttctacaagtacggcaagctgagcaagctgagcgagatcgtgtacgacagcaccgccgtgaccttcggctacgacgagaccaccggcgtgctgaagatggtgaacctgcagagcggcggcttcagctgcaccatcagatacagaaagatcggccccctggtggacaagcagatctacagattcagcgaggagggcatggtgaacgccagattcgactacacctaccacgacaacagcttcagaatcgccagcatcaagcccgtgatcagcgagacccccctgcccgtggacctgtacagatacgacgagatcagcggcaaggtggagcacttcggcaagttcggcgtgatctactacgacatcaaccagatcatcaccaccgccgtgatgaccctgagcaagcacttcgacacccacggcagaatcaaggaggtgcagtacgagatgttcagaagcctgatgtactggatgaccgtgcagtacgacagcatgggcagagtgatcaagagagagctgaagctgggcccctacgccaacaccaccaagtacacctacgactacgacggcgacggccagctgcagagcgtggccgtgaacgacagacccacctggagatacagctacgacctgaacggcaacctgcacctgctgaaccccggcaacagcgtgagactgatgcccctgagatacgacctgagagacagaatcaccagactgggcgacgtgcagtacaagatcgacgacgacggctacctgtgccagagaggcagcgacatcttcgagtacaacagcaagggcctgctgaccagagcctacaacaaggccagcggctggagcgtgcagtacagatacgacggcgtgggcagaagagccagctacaagaccaacctgggccaccacctgcagtacttctacagcgacctgcacaaccccaccagaatcacccacgtgtacaaccacagcaacagcgagatcaccagcctgtactacgacctgcagggccacctgttcgccatggagagcagcagcggcgaggagtactacgtggccagcgacaacaccggcacccccctggccgtgttcagcatcaacggcctgatgatcaagcagctgcagtacaccgcctacggcgagatctactacgacagcaaccccgacttccagatggtgatcggcttccacggcggcctgtacgaccccctgaccaagctggtgcacttcacccagagagactacgacgtgctggccggcagatggaccagccccgactacaccatgtggaagaacgtgggcaaggagcccgcccccttcaacctgtacatgttcaagagcaacaaccccctgagcagcgagctggacctgaagaactacgtgaccgacgtgaagagctggctggtgatgttcggcttccagctgagcaacatcatccccggcttccccagagccaagatgtacttcgtgccccccccctacgagctgagcgagagccaggccagcgagaacggccagctgatcaccggcgtgcagcagaccaccgagagacacaaccaggccttcatggccctggagggccaggtgatcaccaagaagctgcacgccagcatcagagagaaggccggccactggttcgccaccaccacccccatcatcggcaagggcatcatgttcgccatcaaggagggcagagtgaccaccggcgtgagcagcatcgccagcgaggacagcagaaaggtggccagcgtgctgaacaacgcctactacctggacaagatgcactacagcatcgagggcaaggacacccactacttcgtgaagatcggcagcgccgacggcgacctggtgaccctgggcaccaccatcggcagaaaggtgctggagagcggcgtgaacgtgaccgtgagccagcccaccctgctggtgaacggcagaaccagaagattcaccaacatcgagttccagtacagcaccctgctgctgagcatcagatacggcctgacccccgacaccctggacgaggagaaggccagagtgctggaccaggccagacagagagccctgggcaccgcctgggccaaggagcagcagaaggccagagacggcagagagggcagcagactgtggaccgagggcgagaagcagcagctgctgagcaccggcagagtgcagggctacgagggctactacgtgctgcccgtggagcagtaccccgagctggccgacagcagcagcaacatccagttcctgagacagaacgagatgggcaagagatag

SEQ ID NO: 43677 - DNA, 7797 bp, Artificial Sequence
  derived and/or modified sequence
ggccggcctattccgcctacaagcagtccaagccttctgccctctgcccagcttccaagttctcataatccccccccggttagctgccagatgcctcttttagactctaatacatcacaccagataatggataccaatccggacgaggagttttccccgaactcctatcttctgagagcttgttccggcccgcagcaagcaagctcaagtggccccccgaaccaccactcacagagcacattgagacccccattgcccccgccacacaaccatactttgtctcaccatcactcgtcggctaatagcttgaaccggaattcactgacgaacaggaggagtcagatccacgcccctgcacccgcccctaatgacctcgcaaccaccccagaatcggtgcaactgcaagattcctgggtcctgaactctaacgtaccacttgagacgaggcacttcctcttcaagacatctagcggcagcacacccctgttttcgtccagttcacctggatatcctctgacttccgggacagtgtatacccctcccccccgactcctccctcgcaacacattttcacgcaaggcattcaagctgaaaaaaccttctaagtactgcagttggaagtgtgcagctctttctgccatagctgcagcgctgttactagcaattctcctggcctacttcatagccatgcacttactgggtctgaattggcagctccagcctgcagacgggcatacattcaataatggtatcaggactggtttgcccggtaacgacgacgtagctacaatgccttccggtggtaaggtaccatggtcattaaaaaactcctccatcgatagtggcgaagctgaagttgggcgtagagtcactcaggaagttccaccaggggtcttctggaggagccagatccatatatcacagccgcagttcctcaagttcaacatctcactgggaaaggatgctctgtttggcgtgtatatccggcggggcctgcccccatctcatgctcagtacgattttatggagaggctcgacggaaaagagaaatggtcagtcgtggagtcgcctcgtgagagacgcagcattcagacccttgtgcagaatgaggccgtttttgtacagtatcttgacgtgggattgtggcatctcgcattctataacgatggaaaggataaggagatggtgagtttcaacaccgtggtgctggattccgtgcaggattgcccaaggaattgccacgggaacggagaatgcgtgagcggcgtatgccactgtttcccaggattcctgggcgccgattgcgcaaaagccgcatgccccgtcttatgctctgggaacgggcagtatagtaagggtacctgtcagtgttactccgggtggaagggggctgaatgtgacgtgccgatgaatcaatgtatcgatccgtcatgtggagggcatggcagctgtatcgatggtaactgtgtttgctctgctggatataaaggggagcactgtgaggaggttgattgtctggaccccacatgttccagccatggcgtgtgcgtcaatggcgagtgcctatgttcccccggttgggggggcctgaactgtgagctcgcccgggtgcaatgccccgaccaatgtagtgggcacggcacctacttaccagataccgggctgtgctcttgcgaccccaactggatgggccccgattgctctgtcgaggtgtgttccgtggactgtgggacccacggagtctgcatcgggggggcctgcagatgtgaagagggatggaccggcgcagcatgcgaccagcgggtgtgccaccccagatgcattgagcatggcacatgcaaggacggaaaatgtgaatgccgtgagggctggaacggcgagcattgtactatcgatggatgccctgacctgtgcaacggcaatggccggtgtacactgggacaaaactcatggcaatgtgtctgtcagaccggctggcgtggacctggatgtaatgtcgccatggagaccagttgcgcggataacaaggacaatgaaggtgatggtctcgtggactgtcttgatcctgactgctgcctgcagtctgcctgccagaattccctgctgtgtagagggtcaagggatccccttgatatcatccagcagggccaaaccgactggcctgctgtgaagtctttttatgatagaattaagctgctggccggcaaggattctacccacattataccaggagaaaacccatttaatagcagcctcgtgtctctgatccgcggccaagtggtaaccaccgatgggacaccgcttgtaggagttaacgtgtcttttgtgaagtatcctaaatacgggtacactattactaggcaagacggaacctttgatctcattgccaatggcggggcttctcttactctgcattttgagcgtgctccttttatgtctcaggagcggaccgtatggctaccatggaattcattttacgcgatggacacgctcgtcatgaaaacagaggagaactctatcccatcgtgtgatctgtctggcttcgtacgccccgatcccataatcatttcctcgccactttcaacattcttctccgcggctcccggacaaaatccgattgtgcctgaaacccaggtactgcacgaggaaatcgagctaccaggtagcaatgtcaagctgcgatacctgtcctctagaacagcaggatataagagccttctgaagataaccatgactcaaagcactgtgccactgaacctcattcgtgtgcatttaatggtggccgtggaagggcatctctttcagaaaagcttccaagcttcgcctaatctggcctatacgttcatttgggacaaaactgacgcgtacggccagcgagtctatggcctctcagacgcggtggtatctgtcggctttgagtatgagacctgcccctcactgatcctgtgggaaaaacggaccgcgctgctgcagggttttgagttagacccatctaacttgggcgggtggagtctggataaacaccacattctcaacgtgaaatctggcatattgcataaaggtacgggcgagaatcaattccttacccagcagcccgctattataacctccatcatgggcaatgggcgccgaaggtccatcagttgccctagctgcaatggccttgccgagggcaacaaattgctagcacccgttgctttagccgtgggtattgatgggtctctctatgtcggcgacttcaactacatacggcgtattttcccttcaaggaatgtgactagcatcctcgagctgaggaacaaagaatttaaacatagcaacaatcccgcgcacaagtactacctcgcggtggatcccgtaagcggtagcctctacgtatcagatacaaactcccgaagaatatatcgggtaaagagcctgtccggtactaaggaccttgctggaaactccgaggtcgtggctggcaccggagagcagtgcctcccatttgacgaggctaggtgtggagacggcggaaaagcgatcgatgctacgctaatgtcacctaggggcattgctgtggacaagaatggcttgatgtacttcgtggatgctaccatgattaggaaggtcgaccagaacggtattattagcacccttctgggcagcaatgacctaaccgccgtccgcccattgagctgtgacagctcaatggatgtggctcaagtgagattagaatggccaaccgacctcgccgtgaatcccatggacaatagcttgtacgtactcgagaacaatgtgatcttgcggatcacagaaaaccatcaagtctcgattatcgctggccgaccgatgcattgccaggttccggggatagactactctctgtctaaactcgctatccacagcgctctggaaagcgcgtctgccatcgccatctctcacaccggagttctatatattaccgagacagacgagaaaaaaattaaccgcctccgtcaggtcacaacgaacggcgagatatgcctgctcgctggtgcagcctccgattgtgattgcaagaatgatgttaactgcaattgttatagcggggatgatgcgtacgcaacagatgcaatactcaattctccaagttccttggccgtggctccggacggtacaatctatattgcagaccttggaaacatacggatccgtgccgtctcaaaaaacaaacctgtgttgaacgcttttaatcagtacgaggcggccagccccggggagcaggaattgtacgtctttaatgccgacgggatccatcagtacaccgtcagcctggtgacgggtgagtacctttataactttacatactccaccgacaatgatgttaccgaattaatcgacaacaatggtaattccctgaaaattaggcgcgatagctccggtatgcctcgccatctcctgatgcccgacaaccaaatcattacactgactgttggcactaacggcggactgaaagtggtttctacacagaacctggaactgggactaatgacttatgacgggaacacgggcctcttagcaactaagagcgatgagacgggctggaccactttctatgattatgatcacgaaggacgtctaaccaacgtcacacgtcccaccggcgtggtcacctctctccaccgtgagatggagaagtcaatcactattgatatcgaaaactctaacagggatgacgatgtgaccgtaataacaaaccttagctcagtggaggccagctacactgtagttcaggaccaggtgcggaatagctaccaactctgcaataacggcacactccgtgtgatgtatgccaatggtatgggaatctctttccactctgaaccccacgtactggctggaacaatcactccgaccattggccgctgtaacatatctttgcccatggaaaacgggctaaatagcattgagtggagactcaggaaggagcaaattaaagggaaggtcactatctttggtcgcaagttaagggttcatggccggaacctgctcagtatagattacgatcggaatattagaactgagaaaatatatgatgatcacagaaagtttacacttaggatcatctacgaccaggtcggtaggccctttttatggttgcccagctctggactcgccgcagttaacgtcagttatttctttaatggacgtttggctggactgcagcgcggcgctatgagtgagcggaccgacattgacaaacaggggaggatcgttagccgcatgttcgccgacggcaaagtctggtcttattcttacttagataaaagcatggtgctccttctgcagtcacagcggcagtacatcttcgagtatgactcctcagataggctccttgcagtcactatgccatccgtcgcaaggcattccatgagtacccatacctctataggatatatccggaatatttataaccctcctgagtcaaacgccagcgtcatcttcgactactctgatgatgggaggatcctcaaaacatctttcctagggacaggccggcaagtattctacaagtacggaaaactctcaaagctgtccgagattgtgtacgactccaccgctgtgacattcggctatgatgagactaccggcgtactgaaaatggtgaacctgcagtcgggcggtttctcttgcaccattagatatcggaagatcggccctctggtggacaaacagatttacaggttttcagaggagggcatggtgaacgctcggtttgattatacctaccacgataacagcttccggatagctagcataaagcctgtcatctccgagacccctctgccagttgacctctatcgctatgatgagatttcgggtaaagtggaacatttcggaaaatttggcgttatctattacgatatcaaccagataatcacaaccgcagtgatgaccctttcaaaacatttcgatacccacggcaggattaaggaggtgcagtatgagatgttcagatctctaatgtattggatgactgttcagtatgactccatgggcagagttataaagcgggagcttaagttaggcccctacgccaacacaaccaagtacacatacgactacgatggcgacgggcagttacagtccgtcgccgttaatgaccgccctacctggaggtactcctacgacctgaacggaaacttgcatctgttaaaccccggcaacagcgtgcggttgatgcctctacggtatgacctgcgagataggataactcgtctgggggacgtgcaatataagattgatgatgacggctacctttgccagcgtggaagcgacatcttcgagtacaattccaagggactcctcacgagagcttacaataaggcctcaggctggtctgtacagtacaggtacgacggtgtgggaagacgggctagctacaagacgaacctgggccatcacctgcagtatttttacagcgatctgcataaccccactagaatcacacatgtctacaaccattctaatagcgaaatcacctccctctactatgacttgcagggtcacttatttgccatggagagttcctctggcgaagagtattacgttgcctctgataacactgggacgcccctggctgttttttcgataaacggattgatgattaaacagctgcagtacacagcctacggcgagatatattacgacagcaatccagatttccagatggttattggctttcacggtggcctgtatgaccccttgacaaagctcgtgcatttcacacaaagagactatgatgtcctggcagggcggtggacctcacccgactatacaatgtggaagaacgtgggaaaggaacctgctccctttaatctgtacatgttcaagagcaataacccactgtctagcgaactggacctcaaaaattacgttacagatgtgaagagctggttggtgatgtttgggttccagttgtctaacattatccctggtttcccacgggctaaaatgtacttcgttccacccccatacgaactctctgagtcccaagcctccgaaaacgggcagctgatcaccggcgtacagcagacaacggagcggcacaatcaagcattcatggcattggaggggcaggtgattactaaaaagcttcatgcctctatccgcgagaaggccggacactggtttgctactacgacccctattattggaaaaggcattatgttcgccattaaagagggtcgggtgacaacaggggtttccagcattgcctcggaggatagccgtaaggtcgcatccgtcttgaataacgcctattatctggataaaatgcattacagtatcgaaggcaaagacactcactactttgtgaaaataggtagtgctgacggtgatctcgtgacactaggcaccacgataggacgaaaggttctggaaagcggtgtaaacgtgacagtgtctcaacccacacttttggttaatggtagaacaagacgattcaccaatatcgaattccagtattctacgttgttgttgtcaatcagatacggcttgacccctgatactctggatgaggagaaggctagagttctggaccaggcaaggcagcgcgccctggggactgcatgggctaaggaacagcagaaggcacgggatggccgggaggggagcagactgtggacagagggggaaaaacagcaactgctgtcgactggtcgagttcagggctatgaggggtactatgtcctcccggtcgagcagtatccagagctcgctgatagctccagcaacatccagttcctacgccagaatgaaatgggaaaacggtag

SEQ ID NO: 43678 - DNA, 8325 bp, Artificial Sequence
  derived and/or modified sequence
atggatgtcaaagatcgcaggcaccgctccctcacgcgggggcggtgcggtaaggagtgcagatacacctcttcgagtcttgattcggaagactgccgcgtaccaacacaaaagagctactccagcagcgagactctcaaggcttacgaccacgatagtcgcatgcactacgggaaccgcgtgaccgacctcattcatagagagtccgatgagttcccgaggcagggcacaaactttactttagccgaacttgggatttgcgagccatctccacacaggtcagggtattgcagcgacatgggtatccttcaccaggggtactcactgagtactggctccgacgccgattctgacacggagggggggatgagccccgaacatgccattcggctgtggggccgggggattaagagccggcggtcttccggactgtccagtcgggaaaattctgcccttacccttacagacagtgacaatgaaaacaaaagtgatgacgaaaatggccggccaatcccccctacctcctcaccgagcttgctcccctccgcccagcttccgagttctcataacccaccccccgtttcatgccagatgcctcttcttgactcgaacacgagccatcagattatggataccaacccggatgaggaattctctcccaattcttacctgctgcgcgcatgtagcggcccgcagcaggcttcttcgagtggcccacctaaccatcatagccagagcactctgcggccccccctaccgcctccacacaaccatacgcttagtcaccatcacagttcagcgaatagcctaaaccggaattccctgacaaatagaaggtcccagatccacgcgccagccccagcacctaatgatctggccaccaccccagaatcagtgcagctgcaggacagctgggtccttaactccaatgtgcctctcgagactcgacatttcttgttcaagaccagctcgggttccacacccctgtttagttcctctagccccggctatcccttaacgagcggcacagtttatactcccccaccaaggcttctcccaaggaacacctttagccgcaaggccttcaaacttaagaagccctcaaaatattgctcttggaaatgcgccgccttgtcggccatagctgccgcactgctgcttgccattttgctggcctattttattgccatgcacctgctggggctgaactggcagctgcagcctgcagacggacatacatttaacaatggcatcaggaccggcctccccggaaacgatgatgtggctacaatgccctctggggggaaggtcccttggtcccttaagaactcaagcatcgacagtggcgaggctgaagtcgggcgacgtgtaacccaggaagtgcccccaggcgtcttttggcgctcacagatacacatctcacagccacagttcctgaagttcaatatctccctgggcaaagatgccctgttcggagtctacatccgtagagggctgcccccaagccatgcccagtatgacttcatggaaagactcgatgggaaggagaaatggtcagttgtggaatcaccacgagaacgaagatccatccagacgcttgtgcagaatgaagctgtcttcgtgcagtacctggacgttggtctatggcatttggccttctacaatgatggcaaagataaagaaatggtaagtttcaacacagtcgtgctggacagcgttcaagactgtccgcgtaattgccatggaaatggagagtgcgtgagcggggtctgtcactgtttccccggattccttggggcagactgcgccaaagccgcttgtccagtcctatgtagcggcaacggacaatattccaaaggcacgtgtcagtgttactccggttggaagggagctgaatgcgatgtccccatgaaccagtgcatcgacccaagctgcggaggccacggctcatgcatcgatggaaactgcgtctgcagcgccgggtataagggggaacattgcgaagaagtggactgcctggatccaacatgttcttcacacggggtttgcgtaaatggcgagtgcttgtgctctccagggtggggaggtctgaattgcgaattagcaagagtgcagtgcccagaccaatgtagcgggcatgggacttacctgcctgatactggtctgtgctcttgtgatccgaactggatgggacccgactgctctgttgaggtgtgcagtgtcgattgtggaacccatggtgtctgcatagggggtgcttgcagatgtgaggaaggctggaccggcgctgcctgtgaccaaagggtctgtcacccgagatgcatcgagcacgggacatgcaaagatgggaagtgtgagtgtcgagaaggctggaatggggaacattgcacaattggacggcagaccgcgggcaccgaaaccgacgggtgccctgacttatgcaatgggaacggtcgatgcacattaggccagaattcatggcaatgcgtatgtcaaacgggatggcggggccccggctgtaatgttgcaatggagacctcatgcgccgataataaggataatgagggggacggcctggtggattgtcttgatcccgactgttgcctgcagtccgcctgccagaatagcttgttgtgtagaggctcacgggacccgctggatattattcagcaggggcaaacagactggcctgctgttaaaagtttctatgacagaattaaacttttagcaggcaaggatagcactcacataattcctggcgagaaccccttcaacagtagcttggtgagtcttatccggggccaagtcgtgaccaccgatggtactccccttgttggcgtcaatgtgagctttgttaaatatcctaaatacggatatacaatcaccagacaggacggtacctttgacctcatcgctaacggaggcgcctccctaaccctgcactttgagagagcccctttcatgagtcaagagaggactgtttggcttccctggaacagcttctatgctatggatactcttgtcatgaaaacagaagaaaattcaatcccatcgtgtgatctctctgggtttgtgagaccagatcccatcatcatttcttcacccctctcaacattttttagcgctgctccaggccagaatcccattgtccctgaaacccaggtgctccacgaagaaatcgaactccctggcagtaacgtgaaattgcggtacttgtcctctagaactgctggctataaaagtctcctgaagatcacaatgacacagagtaccgtaccactgaacctgattagagttcacctcatggtcgctgtcgagggtcatctgtttcagaagagcttccaagcatcgccaaatctggcatacacctttatttgggataaaacagacgcatatggccagagagtatacggtctcagcgacgcggtggtgtccgttggtttcgaatatgaaacctgtccttctctcattctgtgggagaaacggacagccctgttacagggcttcgagcttgaccctagcaacctgggtggatggagtttggacaagcaccacattctgaatgtgaaatcaggaatactgcacaaaggcacgggcgagaatcagtttctcacgcaacagccggccatcatcacatctattatgggcaatgggaggaggagaagcattagttgccctagctgtaacggattagctgaaggcaataaattgctggcgcctgtcgcgttagcagtcgggatcgacgggtccctctatgtcggagatttcaattatattagacgcatcttcccatcacgaaacgtgacaagtattctggaactgaggaacaaagagttcaaacacagcaacaatcccgcacataaatactatttagcagtggatcctgtatccgggtctttgtacgtgtccgataccaactctaggcgtatataccgggtgaagtcactgtctggtaccaaagacctcgccgggaactctgaggtcgtggctggtactggagaacaatgcttaccctttgatgaggctagatgtggtgacggaggcaaggctatcgatgcaacactcatgagcccacggggcatagccgtggataaaaatggtctaatgtattttgtggacgcaactatgatacgaaaggtcgatcagaacgggattatcagtacactactgggctccaacgatttgacagccgtcaggcctttgagttgtgacagctcgatggatgtggctcaggttcggctggagtggcctacagacctggctgtgaatcccatggacaattcgctatatgtgttagagaataacgttattttgcgcattactgagaaccaccaggtctccatcatagctgggaggccaatgcattgccaggtacccggaatagactacagtctgagcaagctcgctatacattctgcactggagagcgcctctgctatcgctatctctcacaccggagtgctctacatcactgaaaccgatgaaaagaagatcaaccgtcttagacaggtgaccaccaatggagagatttgcctactggccggtgcagccagcgattgcgactgcaaaaatgatgtgaattgtaactgttatagtggggacgacgcctatgccactgacgcgattctcaatagcccctcttcgctcgctgtagcgccagacggaaccatttatatagctgacctcggcaacatccgcataagggctgtgagcaagaataagcctgtgctgaatgcctttaatcagtacgaggccgcctcccccggggaacaggaactgtacgtatttaacgcggatggcattcatcagtacaccgtatcgttggtcacaggagaatatctatacaacttcacttatagcaccgataacgatgtgacagagctcattgataataacggcaacagcttgaagattaggcgcgattcctccggcatgccaagacaccttctcatgcccgacaaccagatcattacgctgacagtgggcaccaatggcggcctgaaggtagtctccacgcaaaacctggaacttggcctcatgacttatgacgggaacactggcctactagcgacaaagtcagacgagaccggttggacaactttctatgattacgatcatgagggcaggcttacaaatgtgactagaccaacaggcgttgtgacatccctccacagggagatggagaaaagcattacaatcgacatcgagaactctaatagagacgacgacgtgaccgttattacaaacctgagctccgtggaagccagttacaccgtagtacaggaccaggtcaggaactcttaccagctttgcaacaacggcacactccgcgtaatgtacgctaacggaatggggatcagctttcattctgagccccacgttctggctggtaccattacccccacaatcgggaggtgcaatatcagccttccaatggagaacggcttaaattctatcgagtggagattacggaaagagcagataaagggcaaagttacaatcttcggacggaagctccgcgtacacgggagaaatctgctaagtatcgactatgatcgaaacatccgcacagagaagatctatgacgatcaccgtaaatttacactccgtataatttacgatcaggtcggcagacccttcttgtggcttccatccagtgggctggccgccgtgaatgtgagctattttttcaacgggcgcttggcaggactccaaagaggtgccatgtcggagcggacagatattgataaacagggccgcatagtttcgaggatgttcgctgacgggaaagtttggagctatagctacctcgacaagagcatggtgttgctgctgcagtcacagcgccaatacatcttcgagtacgacagtagcgacagattgctggccgttactatgccaagtgtggcccgccattcaatgtccacccacacaagtatcggatacattaggaacatttataatccgcctgagtccaacgctagtgtgattttcgactacagcgatgacgggcgcattcttaagacatccttcctgggtacaggacgtcaagttttctacaaatacggaaaacttagtaagctaagcgagatcgtgtatgactcgacagcagtcacttttgggtatgatgagaccacgggggtgttgaagatggtcaatctgcaatctggcgggttttcttgcacaatacgttaccgaaagattgggccactggttgataaacagatttatcgcttcagcgaagaggggatggtcaacgcgcggttcgattacacataccacgataatagcttccgcatagcatcgattaaaccagtcataagtgaaaccccactgcccgtggacttatataggtacgatgagattagcggcaaagtggagcacttcggtaaattcggagtgatctattacgatattaaccaaatcataaccacagccgttatgaccctcagcaagcatttcgatacgcacgggcggataaaagaagtacagtacgaaatgtttaggagcctcatgtactggatgactgtgcagtatgattctatgggacgggtgatcaagcgagagttgaagctgggaccctatgccaacaccacaaagtacacctatgactacgacggagatggccagctgcagagcgtcgctgtcaatgaccgcccaacatggcgctattcatatgatctgaatggaaatctccatttgttgaaccccgggaactccgtccggcttatgcctctacgctatgacctcagagatagaattactcgcctgggtgacgtgcagtacaaaattgacgatgacggttatctgtgccaaagagggtccgacatcttcgagtataattcgaaggggctgctgacaagagcatataacaaggcgtcaggctggtcagttcagtacagatacgatggtgtaggtcggcgcgctagttataagacaaatttaggccaccacctgcagtatttctatagcgacctgcataaccctacccgaattactcacgtatacaatcactctaattctgagataacgagtctgtactacgaccttcaaggacacctgtttgccatggaatccagcagtggtgaagagtattatgtggcatcagataacactggaacaccgctcgcagtgttctcaataaacggtcttatgataaagcagctgcagtacaccgcctatggggagatttactacgatagcaatcctgacttccagatggtgattggctttcatggcgggctctatgacccccttacaaagctagttcacttcacccagagggactacgatgtcctggccggccggtggaccagtccagattataccatgtggaaaaacgtcggtaaggagccggccccgtttaatctctatatgtttaaaagcaacaatccactctcgtctgagttagacctgaaaaactacgtgaccgatgtgaagagttggttagtgatgtttggatttcagctcagcaacatcatccctgggtttccgagggcaaagatgtattttgttccaccaccttacgaacttagtgagtcccaggctagcgagaatgggcagctcataactggcgtgcagcagactaccgagaggcataatcaggcttttatggccttagaggggcaggtcatcactaagaaactccacgctagcatcagagaaaaagctggccactggttcgccaccacaaccccaatcatcgggaaggggatcatgttcgctataaaagagggtcgcgtaactaccggcgtgagctcaattgcctcagaggacagccgaaaagtcgcatctgtcctgaataacgcctattatctggataagatgcactattcgatcgaggggaaggacacgcattactttgtcaaaatcggctcagctgatggcgacctcgtgaccctcggcaccaccatcggacggaaggttctggaaagtggcgtcaatgttacggtgtcacaacctaccctgctggttaatggacgcactcggcgtttcaccaatatcgagtttcagtatagcactctgttattgtccattcgatacggactgactcccgacacactggacgaggagaaggcgcgtgttcttgatcaggccagacagcgggcgctgggaacggcctgggcaaaggaacaacagaaggctcgcgatggacgagagggttcacggctctggactgagggggagaagcaacaactcctgagcactggaagagtgcagggctatgagggttactacgtgctgcccgtagagcaatacccagaattggcggactcttcatccaacatacaattcctcagacagaatgagatggggaaacgatag

SEQ ID NO: 43679 - DNA, 8322 bp, Artificial Sequence
  derived and/or modified sequence
atggacgtaaaagatcggagacatcggtccctaacaaggggcaggtgcgggaaggagtgtagatacacatccagcagtctggactccgaagattgtcgagtgccgacccagaagtcctacagctcctctgagaccctaaaagcttacgatcacgatagtcgaatgcattacggaaaccgcgttaccgatctaatccatcgcgagagcgatgaattcccacgacaggggacaaacttcaccttagccgagctaggtatctgtgagccctccccacacagatcaggatactgtagtgatatggggatccttcaccagggttactccctgtccactggatctgatgctgacagcgacactgagggtggaatgtctccagaacatgccattcggctctggggtcgcgggatcaaaagtcggcgcagttctgggttgagctcccgcgagaactctgcacttacccttaccgattctgataacgaaaacaaatcggatgatgagaatggacggccgattccccccacaagttcacctagcctactgccatcagcccaactcccttcctctcacaatcctccacccgtctcctgtcaaatgccactcttggacagtaatacttcccaccagatcatggacaccaaccctgacgaggaattcagtcctaatagctacctgctgagggcttgttcgggaccccagcaagcatcctccagtgggccaccaaaccaccacagtcagtcaaccctgaggccaccactcccccctccccacaaccacacactcagtcatcaccactcatccgccaactctctgaaccgcaattcattgaccaatcggcggagccagatccacgctcccgctccagcaccgaacgaccttgctaccacacccgagtcagtgcagcttcaggacagttgggtactgaactctaacgtgcccctcgaaacaagacactttctttttaaaaccagcagcgggagtactcctttgttttctagttcctcaccaggctatcccctgacaagtgggaccgtatacacccctccccctaggctcttgccacgtaatacctttagccggaaagcttttaagctcaagaagccatcgaagtattgcagctggaaatgtgcagctctcagcgctatcgctgccgcactgttgctcgcaattttgcttgcctacttcatcgcgatgcatttgctgggtttgaactggcagttgcagccagcagatgggcacactttcaacaacggcatccggacagggctgccagggaatgacgacgtggctacgatgccgtcaggcggtaaagtgccatggtctctgaaaaattcatcaatcgattcaggcgaagcagaggtcggtagaagggtcacccaggaggtcccccctggggtgttctggaggtcccaaattcacatttcacaaccccagtttttgaaatttaacatttcactcggaaaggacgccctgttcggcgtctatatccggagaggcttgccgccttcgcacgcccaatacgactttatggaacgactcgacggaaaggagaagtggtctgtggtggagagccctagagagcgaaggtcaatacagacattggtccaaaacgaggccgtctttgtgcagtatctggatgtgggcctttggcatctggctttttacaatgatggaaaagacaaagagatggtgtctttcaacaccgtcgtcttggatagcgtgcaggactgtccgcgcaattgccacgggaacggcgaatgtgtgtctggcgtttgccattgttttcccggcttcctgggggctgattgcgccaaagcggcatgccccgtcctttgtagcgggaatggccaatattctaagggtacctgccagtgttattcaggctggaaaggagccgaatgcgacgtccctatgaaccagtgcattgacccgtcttgtggaggtcatggttcctgtatagatggcaactgtgtgtgcagcgctgggtataaaggtgaacactgcgaggaagtcgactgcttggatcctacctgctctagccacggcgtctgcgtaaatggcgaatgtctttgctcccctggttgggggggtcttaactgtgagctggctcgtgttcagtgccccgaccaatgtagcgggcatgggacttaccttcctgacacaggactctgttcttgcgatccaaactggatgggccccgactgttctgttgaagtgtgttccgttgattgcggcacccatggtgtttgcattggcggcgcctgtcggtgtgaggagggttggacaggtgccgcctgtgatcagagagtctgccatcctagatgtatagaacacggtacttgtaaggatgggaaatgcgaatgtcgggaaggatggaacggggagcattgcactattgtgcgagagacaattggtggggagtgctacgggtgccccgatctctgcaacggcaacgggaggtgtacgcttgggcaaaattcctggcagtgtgtttgccagacaggttggcgcggacccggatgtaacgttgccatggagacttcctgtgccgataacaaggacaacgaaggcgacggtctcgtggactgtctagaccctgattgctgccttcagtcagcttgtcagaactccctcttatgtcgaggatcacgcgacccattggatattatccagcagggacaaaccgattggccggccgtgaaaagcttttacgaccggatcaagctgctagctggcaaggactccacgcatataatcccaggagagaacccattcaactcttcacttgtttccttgatccggggtcaagttgttaccacggatggcacacctctggtcggagtcaacgtctcattcgtcaaataccctaagtacggatacacaattactcgtcaggacggtaccttcgatctgatcgcgaatggcggtgctagcctgacgctgcacttcgagcgggctccctttatgagccaggagcggaccgtatggcttccctggaatagtttctacgctatggatacgctggtgatgaaaactgaggagaatagcataccttcttgcgacctgagtggttttgtacgcccagatccaatcattatttcttcaccactcagcactttctttagcgccgctccgggacaaaatcccattgtgcccgaaactcaggtgttgcatgaagagatcgaacttcctggtagtaatgtcaaactgcgttacttaagcagtagaactgcgggatacaaatccctgttgaagattacgatgacacaatctacagttccactgaatctgataagagttcatctcatggtggccgttgaaggccacctattccaaaagtcatttcaggcaagcccaaatctggcctacaccttcatctgggacaaaaccgacgcatacggacagcgcgtttatgggctgtccgatgccgtcgtgagcgtcggcttcgaatacgaaacatgcccctcattaatcttgtgggagaagagaactgctctgttgcagggtttcgaactggacccctctaatctgggcggctggagcctagataagcatcatatccttaacgtgaaaagcggtattctgcacaaaggcaccggcgagaatcagttcttaacccagcagcccgcgattatcacatccatcatgggcaatgggaggaggagatctatctcatgcccgtcctgcaatggacttgccgagggcaataaactcctggcgccagtagcccttgccgtagggatcgatggaagcttgtatgttggggactttaactacattcgccggattttcccgagcaggaatgtgacctccattctggagcttcgcaacaaagagttccataacaataaccctgcccacaagtactatctcgctgtggatcccgtcagcgggagtctttatgtttcagacaccaatagccgtagaatctatagggtgaaaagcctatcgggaacaaaagatctcgccggcaattccgaagtagtggctgggacaggagagcagtgtttaccattcgacgaggcccggtgcggtgacggcgggaaggccattgatgctactctgatgagcccccgcggaatagcagttgataagaacggtctgatgtattttgtggatgcgaccatgatcaggaaggtggatcagaatggtatcatatcaaccctcctgggcagcaatgacctaacggctgtacgtccactttcctgcgacagctctatggacgtagctcaggtgaggctagagtggcctaccgatctcgctgtcaatcccatggataacagcctgtatgtgttggaaaataacgttatcctgagaatcaccgaaaaccaccaggtttccatcatagccggaagacctatgcattgtcaggttccaggcatcgactacagtctatctaaattggctatccatagtgcactggaatccgccagcgcgattgccatatctcacaccggggtgttgtatatcactgagaccgacgagaaaaagattaaccggctgaggcaggtgaccaccaatggggagatctgtcttctggccggagctgcttctgattgtgactgcaaaaatgatgtgaactgcaactgctatagtggcgatgatgcttatgcgaccgacgccattctgaactccccaagcagcctagctgttgcgccggatgggaccatctacattgctgacttaggaaacatcaggattagggccgtctctaaaaacaaacctgtgctaaatgcctttaaccagtatgaagccgcctcgcccggcgaacaggagctctatgtcttcaatgccgacgggattcaccagtacacggtgagtttggtgacaggggaatatctgtataacttcacttactcaacagacaacgatgtaaccgagctgatcgacaataatggtaatagcttgaagataaggcgagacagcagcggtatgcccagacatctgttgatgccagacaatcagatcatcacattgacagttggtaccaacggcggtctcaaggtagttagtactcagaacctggaacttggactgatgacctacgatggtaataccggtctgctcgctacgaagtccgacgagacgggctggacgacattctatgactacgaccatgaaggccggttaactaatgtgacacggccaaccggcgtggtaacctcactgcaccgagagatggagaaatcgattacaattgacattgagaatagtaatcgggacgatgatgtgacagtgattacaaatctgtcctcagtagaagcgtcatacacggtcgtacaggaccaggtgcggaactcgtaccaactgtgtaacaatgggactctccgggtcatgtacgccaatggaatgggtatctcatttcacagcgaaccccatgttcttgccggcacaatcactcccaccattggccggtgcaatattagtctgcctatggagaatggtctgaactcgatcgaatggagactccgtaaggaacagattaaaggcaaagtgactatcttcggccggaagctgcgggtgcacggcaggaacctcctgtccattgactacgatcgtaacatccggacggagaaaatctacgatgatcacagaaagtttactttgcgaatcatatacgatcaggtggggcgccccttcctgtggttaccctccagcgggttggccgcggtgaacgtgtcttacttcttcaacggtagactcgcagggctgcagaggggggcaatgtctgagaggaccgacattgacaaacaggggcgcatcgtgtctcgtatgtttgccgacggaaaagtgtggtcctacagctatctcgacaaaagcatggtactgcttcttcagtcacaacgccagtacatttttgagtacgattctagtgaccgcttactggccgtcacaatgccttctgtggccaggcactccatgtctacacatacctcaattggatacatccggaacatctacaatccacccgagagcaacgcttccgttatctttgattactccgacgacggacggatcctgaagacttcattcttaggcaccggacgacaggtcttctacaagtacggcaagctcagcaagctttccgagattgtgtacgactctactgctgtaactttcggatacgacgaaaccaccggggtgttaaaaatggttaatctgcagagtggaggtttcagctgtacaatcagatatcgcaagatcggacctctggtggacaaacagatctacaggttctccgaggagggaatggtcaacgccaggttcgattatacctatcacgacaattcatttagaattgcctccattaaaccagtaatttccgaaacgcctctgccagttgacctgtatagatacgacgaaatcagtggaaaggtcgaacacttcggcaagttcggagttatctattacgacatcaaccagattattactaccgccgtgatgacgctatctaagcacttcgatacccacggacgaatcaaggaggtccaatatgagatgtttcgttccctgatgtactggatgacagttcaatacgattctatgggaagggtgatcaaacgcgaactgaagcttggcccttatgcgaacacaaccaaatatacatacgactacgacggggacggccagctgcaaagcgttgcggttaacgaccgccctacatggcggtattcgtatgatctaaatgggaatctgcaccttctaaaccctgggaattctgtgcggctgatgcccttaagatacgacctgagggataggatcacccggctcggcgacgtgcagtataaaatcgatgacgacggctacctgtgtcagcgcggatcagacatttttgaatataactctaaaggccttcttaccagggcatacaataaggcttctggatggtccgtgcaataccggtatgatggggtgggaagacgggctagttacaaaacaaacctgggccaccatttacaatatttctactccgatcttcacaatccaacccggattacacatgtatacaatcatagcaactcagaaatcacttctctttattacgatctgcaggggcatctttttgcaatggagagctcttcgggggaggaatattatgtcgcttcagataacacagggacccctcttgccgtctttagtatcaacggtctgatgataaaacagctccagtatacagcttacggtgagatctactacgactctaaccccgattttcagatggtgatcggctttcatggcggcctgtatgaccccctgaccaaactcgtgcattttacacagagggattacgacgtactcgccggccggtggaccagcccggattatactatgtggaagaacgtgggtaaagagccagcaccattcaatttgtatatgtttaagagcaataaccctctcagctctgaactggatcttaagaattatgtcacagatgttaagagctggctcgtgatgttcgggtttcaactcagtaatatcattccaggtttcccccgcgctaaaatgtattttgttccaccaccgtacgagctctctgaatcacaggccagtgagaacggccagttgatcaccggcgtgcagcagaccactgagcgacacaatcaggcctttatggctctggagggacaggtcatcactaaaaagcttcatgcctctattcgcgaaaaggcagggcactggttcgcaacaacaacacctatcatcggcaaagggattatgtttgctattaaagaaggccgtgttacaaccggcgtgtctagcatcgcctcagaagacagtaggaaggtggcctcagtgctgaataatgcctactacctggacaaaatgcactatagcattgaaggcaaagacacccattacttcgtgaagatcggcagcgcagatggcgacctagtgacccttggtacgacaattggcagaaaggtgctcgagtcgggggtgaacgtaactgtttctcagccaaccctgctggtgaatggacgtactagacgttttacaaatatcgaatttcagtattccactttgttgctatctatcagatacgggctgacccctgatacattggacgaagaaaaggctagagtactggaccaggccagacagagagccttgggaacagcgtgggccaaggagcaacagaaagccagggacggacgcgaaggaagcaggctctggaccgagggcgagaagcaacagttgttgtctacgggcagggtccagggttacgaagggtactatgtgctcccagtggaacagtatccagaactcgctgacagctcatctaatattcagttcttgaggcagaacgagatgggaaagcggtag

SEQ ID NO: 43680 - DNA, 7797 bp, Artificial Sequence
  derived and/or modified sequence
ggccggcccatcccccccaccagcagccccagcctgctgcccagcgcccagctgcccagcagccacaaccccccacctgtgtcctgccagatgcccctgctggacagcaacaccagccaccagatcatggacaccaacccagatgaggagttcagccccaacagctacctgctgcgggcctgcagcggcccccagcaggccagcagcagcggcccccccaaccaccacagccagagcaccctgcggccccccctgcccccaccccacaaccacaccctgagccaccaccacagcagcgccaacagcctgaacagaaacagcctgaccaacagaagaagccagatccacgccccagccccagccccaaatgacctggccaccaccccagagagcgtgcagctgcaggacagctgggtgctgaacagcaatgtgcccctggagaccaggcacttcctgttcaagaccagcagcggcagcacccccctcttcagcagcagcagccctggctaccccctgaccagcggcaccgtgtacaccccaccaccccggctgctgcccaggaacaccttcagcaggaaggccttcaagctgaagaagcccagcaagtactgctcctggaagtgtgccgccctgagcgccatcgccgccgccctgctgctggccatcctgctggcctacttcatcgccatgcacctgctgggcctgaactggcagctgcagcctgcagatggccacaccttcaacaacggcatcagaacaggcctgcctggaaatgatgatgtggccaccatgcccagcggcggcaaggtgccctggagcctgaagaacagcagcattgattctggagaggccgaggtgggccggcgggtgacccaggaggtgcccccaggagtcttctggaggagccagatccacatcagccagccccagttcctgaagttcaacatcagcctgggcaaggatgccctgtttggagtgtacatcagaagaggcctgccccccagccacgcccagtatgacttcatggagcggctggatggcaaggagaagtggagcgtggtggagagcccccgggagcggcgcagcatccagaccctggtgcagaatgaagctgtgtttgtgcagtacctggatgtgggcctgtggcacctggccttctacaatgatggcaaggacaaggagatggtgtccttcaacacagtggtgctggacagcgtgcaggactgccccaggaactgccacggcaatggagaatgtgtgtctggagtgtgccactgcttccctggcttcctgggcgctgactgtgccaaggccgcctgccctgtgctgtgcagcggaaatggccagtacagcaagggcacctgccagtgctacagcggctggaagggagcagaatgtgatgtgcccatgaaccagtgcatcgaccccagctgtggcggccacggcagctgcattgatggcaactgtgtgtgcagcgctggctacaagggggagcactgtgaggaggtggactgcctggaccccacctgcagcagccatggagtgtgtgtgaatggagagtgcctgtgcagccctggctggggcggcctgaactgtgagctggcccgggtgcagtgcccagaccagtgcagcggccacggcacctacctgcctgacaccggcctgtgcagctgtgaccccaactggatgggccctgactgcagcgtggaggtgtgcagcgtggactgtggcacccatggagtgtgcattggaggagcctgccgctgtgaggagggctggacaggagctgcctgtgaccagagggtgtgccacccccgctgcatcgagcacggcacctgcaaggatggaaaatgtgaatgtcgggagggctggaatggagagcactgcaccattgatggctgcccagacctgtgcaatggaaatggccgctgcaccctgggccagaacagctggcagtgtgtgtgccagacaggctggaggggccctggctgcaatgtggccatggagaccagctgtgccgacaacaaggacaatgaaggagatggcctggtggactgcctggaccctgactgctgcctgcagagcgcctgccagaacagcctgctgtgccggggcagccgggaccccctggacatcatccagcagggccagacagactggccagctgtgaagagcttctatgaccgcatcaagctgctggccggcaaggacagcacccacatcatccctggagagaaccccttcaacagcagcctggtgtccctcatccggggccaggtggtgaccacagatggcacccccctggtgggcgtgaatgtgtcctttgtgaagtaccccaagtatggctacaccatcacccggcaggacggcacctttgacctgattgccaatggaggagccagcctgaccctgcactttgagcgggcccccttcatgagccaggagaggacagtgtggctgccctggaacagcttctacgccatggacaccctggtgatgaagacagaagaaaattccatccccagctgtgacctgagcggctttgtgcggccagaccccatcatcatcagcagccccctgagcaccttcttctctgctgcccctggccagaaccccatcgtgcctgagacccaggtgctgcacgaggagattgagctgcccggcagcaatgtgaagctgcgctacctgagcagcaggacagctggctacaagagcctgctgaagatcaccatgacccagagcacagtgcccctgaacctgatccgggtgcacctgatggtggccgtggagggccacctgttccagaagagcttccaggccagccccaacctggcctacaccttcatctgggacaagacagatgcctacggccagagggtgtatggcctgagtgatgctgtggtgtctgtgggctttgaatatgagacctgccccagcctcatcctgtgggagaagaggacagccctgctgcagggctttgagctggaccccagcaacctgggcggctggagcctggacaagcaccacatcctgaatgtgaagagcggcatcctgcacaagggcaccggggagaaccagttcctgacccagcagcctgccatcatcaccagcatcatgggaaatggaagaagaagaagcatcagctgccccagctgcaatggcctggccgagggcaacaagctgctggcccctgtggccctggccgtgggcattgatggcagcctgtatgtgggggacttcaactacatccgccgcatcttccccagcagaaatgtgaccagcatcctggagctgaggaacaaggagttcaagcacagcaacaacccagcccacaagtactacctggccgtggaccctgtgtctggcagcctgtatgtgtctgacaccaacagccgccgcatctacagagtgaagagcctgagcggcaccaaggacctggccggcaacagcgaggtggtggccggcaccggggagcagtgcctgccctttgatgaggcccgctgtggagatggcggcaaggccattgatgccaccctgatgagcccccggggcattgctgtggacaagaatggcctgatgtactttgtggatgccaccatgatcaggaaggtggaccagaatggcatcatcagcaccctgctgggcagcaatgacctgacagctgtgcggcccctgagctgtgacagctccatggatgtggcccaggtgcggctggagtggcccacagacctggccgtgaaccccatggacaacagcctgtatgtgctggagaacaacgtcatcctgcgcatcacagagaaccaccaggtgtccatcatcgccggccggcccatgcactgccaggtgcccggcatcgactacagcctgagcaagctggccatccacagcgccctggagagcgccagcgccatcgccatcagccacactggagtgctgtacatcacagaaacagatgagaagaagatcaaccggctgcggcaggtgaccaccaatggagagatctgcctgctggccggggccgccagtgactgtgactgcaagaatgatgtgaactgcaactgctacagcggagatgatgcctatgccacagatgccatcctgaacagccccagcagcctggccgtggccccagatggcaccatctacatcgctgacctgggcaacatccgcatccgggctgtgtccaagaacaagcctgtgctgaatgccttcaaccagtatgaagctgccagccctggagagcaggagctgtatgtgttcaatgctgatggcatccaccagtacacagtgtccctggtgactggagagtacctgtacaacttcacctacagcacagacaatgatgtgacagagctgattgacaacaacggcaacagcctgaagatcagaagagacagcagcggcatgcccaggcacctgctgatgccagacaaccagatcatcaccctgactgtgggcaccaacggcggcctgaaggtggtgtccacccagaacctggagctgggcctgatgacctatgatggcaacacaggcctgctggccaccaagagtgatgagaccggctggaccaccttctatgactatgaccacgagggccgcctgaccaacgtgacccggcccactggagtggtgaccagcctgcaccgggagatggagaagagcatcaccattgatattgagaacagcaacagagatgatgatgtgaccgtcatcaccaacctgagctctgtggaggccagctacacagtggtgcaggaccaggtgagaaattcctaccagctgtgcaacaacggcaccctgcgggtgatgtatgccaacggcatgggcatctccttccacagcgagccccacgtgctggccggcaccatcacccccaccatcggccgctgcaacatcagcctgcccatggagaatggcctgaacagcattgagtggaggctgaggaaggagcagatcaagggcaaggtgaccatctttggaaggaagctgcgggtgcacggcaggaacctgctgagcattgattatgacaggaacatcagaacagagaagatctatgatgaccacaggaagttcaccctgcgcatcatctatgaccaggtgggccggcccttcctgtggctgcccagcagcggcctggccgctgtgaatgtgtcctacttcttcaacggccgcctggccggcctgcagagaggagccatgtctgagaggacagacatcgacaagcagggcagaattgtgtccaggatgtttgctgatggcaaggtgtggagctacagctacctggacaagtccatggtgctgctgctgcagagccagaggcagtacatctttgaatatgacagcagtgaccggctgctggccgtgaccatgcccagcgtggcccggcacagcatgagcacccacaccagcatcggctacatccggaacatctacaaccccccagagagcaatgccagcgtcatctttgactacagtgatgatggccgcatcctgaagaccagcttcctgggcaccggccggcaggtgttctacaagtatggcaagctgagcaagctgtctgaaattgtgtatgacagcacagctgtgaccttcggctatgatgagaccaccggggtgctgaagatggtgaacctgcagagcggcggcttcagctgcaccatccgctacaggaagattggccccctggtggacaagcagatctaccgcttcagcgaggagggcatggtgaatgccaggtttgactacacctaccatgacaacagcttccgcatcgccagcatcaagcctgtgatcagcgagacccccctgcctgtggacctgtaccgctatgatgagatcagcggcaaggtggagcactttgggaagtttggagtcatctactatgacatcaaccagatcatcaccacagctgtgatgaccctgagcaagcactttgacacccacggccgcatcaaggaggtgcagtatgagatgttccgcagcctgatgtactggatgacagtgcagtatgacagcatgggccgggtcatcaagcgggagctgaagctgggcccctatgccaacaccaccaagtacacctatgactatgatggagatggccagctgcagagcgtggccgtgaatgaccggcccacctggagatacagctatgacctgaatggaaacctgcacctgctgaaccctggcaacagcgtgcggctgatgcccctgcgctatgacctgcgggaccgcatcacccggctgggagatgtgcagtacaagattgatgatgatggctacctgtgccagaggggcagtgacatctttgagtacaacagcaagggcctgctgacccgggcctacaacaaggccagcggctggagcgtgcagtaccgctatgatggagtgggcagaagagccagctacaagaccaacctgggccaccacctgcagtacttctacagcgacctgcacaaccccacccgcatcacccacgtgtacaaccacagcaacagcgagatcaccagcctgtactatgacctgcagggccacctgtttgccatggagagcagcagtggagaggagtactacgtggccagtgacaacacaggcacccccctggccgtgttcagcatcaatggcctgatgatcaagcagctgcagtacacagcctacggggagatctactatgacagcaacccagacttccagatggtgattggcttccacggcggcctgtatgaccccctgaccaagctggtgcacttcacccagagggactatgatgtgctggccggccgctggaccagcccagactacaccatgtggaagaatgtgggcaaggagcccgcccccttcaacctgtacatgttcaagagcaacaaccccctgagcagcgagctggacctgaagaactacgtgacagatgtgaagtcctggctggtgatgtttggcttccagctgagcaacatcatccctggcttcccccgggccaagatgtactttgtgcccccaccctatgagctgtctgagagccaggcctctgaaaatggccagctgatcaccggggtgcagcagaccacagagcggcacaaccaggccttcatggccctggagggccaggtgatcaccaagaagctgcacgccagcatccgggagaaggccggccactggtttgccaccaccacccccatcatcggcaagggcatcatgtttgccatcaaggagggccgggtgaccactggagtgagcagcatcgccagcgaggacagcaggaaggtggcctctgtgctgaacaatgcctactacctggacaagatgcactacagcattgagggcaaggacacccactactttgtgaagattggcagcgcagatggagacctggtgaccctgggcaccaccatcggcaggaaggtgctggagagcggcgtgaatgtgacagtgtcccagcccaccctgctggtgaatggaagaacaagacgcttcaccaacatcgagttccagtacagcaccctgctgctgagcatccgctatggcctgaccccagacaccctggatgaggagaaggcccgggtgctggaccaggcccggcagagggccctgggcacagcctgggccaaggagcagcagaaggccagagatggccgggagggcagccggctgtggacagaaggagagaagcagcagctgctgagcacaggccgggtgcagggctatgagggctactacgtgctgcctgtggagcagtacccagagctggccgacagcagcagcaacatccagttcctgcggcagaatgagatgggcaagaggtag

SEQ ID NO: 43681 - DNA, 8325 bp, Artificial Sequence
  derived and/or modified sequence
atggatgtgaaggaccggcggcacaggagcctgacccggggccgctgtgggaaggaatgtcgctacaccagcagcagcctggacagcgaggactgccgggtgcccacccagaagagctacagcagcagcgagaccctgaaggcctatgaccatgacagcaggatgcactacggcaacagagtgacagacctgatccaccgggagagtgatgagttcccccggcagggcaccaacttcaccctggccgagctgggcatctgtgagcccagcccccacaggagcggctactgcagcgacatgggcatcctgcaccagggctacagcctgagcactggaagtgatgctgacagcgacacagaaggaggcatgagccctgagcacgccatccggctgtggggccggggcatcaagagcagaagaagcagcggcctgagcagccgggagaacagcgccctgaccctgacagacagcgacaatgaaaacaagagtgatgatgaaaatggccggcccatcccccccaccagcagccccagcctgctgcccagcgcccagctgcccagcagccacaaccccccacctgtgtcctgccagatgcccctgctggacagcaacaccagccaccagatcatggacaccaacccagatgaggagttcagccccaacagctacctgctgcgggcctgcagcggcccccagcaggccagcagcagcggcccccccaaccaccacagccagagcaccctgcggccccccctgcccccaccccacaaccacaccctgagccaccaccacagcagcgccaacagcctgaacagaaacagcctgaccaacagaagaagccagatccacgccccagccccagccccaaatgacctggccaccaccccagagagcgtgcagctgcaggacagctgggtgctgaacagcaatgtgcccctggagaccaggcacttcctgttcaagaccagcagcggcagcacccccctcttcagcagcagcagccctggctaccccctgaccagcggcaccgtgtacaccccaccaccccggctgctgcccaggaacaccttcagcaggaaggccttcaagctgaagaagcccagcaagtactgctcctggaagtgtgccgccctgagcgccatcgctgctgccctgctgctggccatcctgctggcctacttcatcgccatgcacctgctgggcctgaactggcagctgcagcctgcagatggccacaccttcaacaacggcatcagaacaggcctgcctggaaatgatgatgtggccaccatgcccagcggcggcaaggtgccctggagcctgaagaacagcagcattgacagcggggaggccgaggtgggcagaagagtgacccaggaggtgcccccaggagtcttctggaggagccagatccacatcagccagccccagttcctgaagttcaacatcagcctgggcaaggatgccctgtttggagtgtacatccggcggggcctgccccccagccacgcccagtatgacttcatggagcggctggatggcaaggagaagtggagcgtggtggagagcccccgggagaggaggagcatccagaccctggtgcagaatgaggccgtgtttgtgcagtacctggatgtgggcctgtggcacctggccttctacaatgatggcaaggacaaggagatggtgtccttcaacacagtggtgctggacagcgtgcaggactgccccaggaactgccacggcaatggagaatgtgtgtctggagtgtgccactgcttccctggcttcctgggcgctgactgtgccaaggccgcctgccctgtgctgtgcagcggaaatggccagtacagcaagggcacctgccagtgctacagcggctggaagggagcagaatgtgatgtgcccatgaaccagtgcatcgaccccagctgtggcggccacggcagctgcattgatggcaactgtgtgtgcagcgctggctacaagggggagcactgtgaggaggtggactgcctggaccccacctgcagcagccacggcgtgtgtgtgaatggagaatgtctgtgcagccctggctggggcggcctgaactgtgagctggcccgggtgcagtgcccagaccagtgcagcggccacggcacctacctgcctgacaccggcctgtgcagctgtgaccccaactggatgggccctgactgcagcgtggaggtgtgcagcgtggactgtggcacccacggcgtgtgcatcggcggggcctgccgctgtgaggagggctggacaggagctgcctgtgaccagagggtgtgccacccccgctgcattgaacatggcacctgcaaggatggaaaatgtgagtgccgggagggctggaatggagagcactgcaccatcggccggcagacagctggaacagaaacagatggctgcccagacctgtgcaatggaaatggccgctgcaccctgggccagaacagctggcagtgtgtgtgccagacaggctggaggggccctggctgcaatgtggccatggagaccagctgtgccgacaacaaggacaatgaaggagatggcctggtggactgcctggaccctgactgctgcctgcagagcgcctgccagaacagcctgctgtgccggggcagccgggaccccctggacatcatccagcagggccagacagactggccagctgtgaagagcttctatgaccgcatcaagctgctggccggcaaggacagcacccacatcatccctggagagaaccccttcaacagcagcctggtgtccctcatccggggccaggtggtgaccacagatggcacccccctggtgggcgtgaatgtgtcctttgtgaagtaccccaagtatggctacaccatcacccggcaggacggcacctttgacctgattgccaatggaggagccagcctgaccctgcactttgagcgggcccccttcatgagccaggagaggacagtgtggctgccctggaacagcttctacgccatggacaccctggtgatgaagacagaagaaaattccatccccagctgtgacctgagcggctttgtgcggccagaccccatcatcatcagcagccccctgagcaccttcttctctgctgcccctggccagaaccccatcgtgcctgagacccaggtgctgcacgaggagattgagctgcccggcagcaatgtgaagctgcgctacctgagcagcaggacagctggctacaagagcctgctgaagatcaccatgacccagagcacagtgcccctgaacctgatccgggtgcacctgatggtggccgtggagggccacctgttccagaagagcttccaggccagccccaacctggcctacaccttcatctgggacaagacagatgcctacggccagagggtgtatggcctgagtgatgctgtggtgtctgtgggctttgaatatgagacctgccccagcctcatcctgtgggagaagaggacagccctgctgcagggctttgagctggaccccagcaacctgggcggctggagcctggacaagcaccacatcctgaatgtgaagagcggcatcctgcacaagggcaccggggagaaccagttcctgacccagcagcctgccatcatcaccagcatcatgggaaatggaagaagaagaagcatcagctgccccagctgcaatggcctggccgagggcaacaagctgctggcccctgtggccctggccgtgggcattgatggcagcctgtatgtgggggacttcaactacatccgccgcatcttccccagcagaaatgtgaccagcatcctggagctgaggaacaaggagttcaagcacagcaacaacccagcccacaagtactacctggccgtggaccctgtgtctggcagcctgtatgtgtctgacaccaacagccgccgcatctacagagtgaagagcctgagcggcaccaaggacctggccggcaacagcgaggtggtggccggcaccggggagcagtgcctgccctttgatgaggcccgctgtggagatggcggcaaggccattgatgccaccctgatgagcccccggggcattgctgtggacaagaatggcctgatgtactttgtggatgccaccatgatcaggaaggtggaccagaatggcatcatcagcaccctgctgggcagcaatgacctgacagctgtgcggcccctgagctgtgacagctccatggatgtggcccaggtgcggctggagtggcccacagacctggccgtgaaccccatggacaacagcctgtatgtgctggagaacaacgtcatcctgcgcatcacagagaaccaccaggtgtccatcatcgccggccggcccatgcactgccaggtgcccggcatcgactacagcctgagcaagctggccatccacagcgccctggagagcgccagcgccatcgccatcagccacactggagtgctgtacatcacagaaacagatgagaagaagatcaaccggctgcggcaggtgaccaccaatggagagatctgcctgctggccggggccgccagtgactgtgactgcaagaatgatgtgaactgcaactgctacagcggagatgatgcctatgccacagatgccatcctgaacagccccagcagcctggccgtggccccagatggcaccatctacatcgctgacctgggcaacatccgcatccgggctgtgtccaagaacaagcctgtgctgaatgccttcaaccagtatgaagctgccagccctggagagcaggagctgtatgtgttcaatgctgatggcatccaccagtacacagtgtccctggtgactggagagtacctgtacaacttcacctacagcacagacaatgatgtgacagagctgattgacaacaacggcaacagcctgaagatcagaagagacagcagcggcatgcccaggcacctgctgatgccagacaaccagatcatcaccctgactgtgggcaccaacggcggcctgaaggtggtgtccacccagaacctggagctgggcctgatgacctatgatggcaacacaggcctgctggccaccaagagtgatgagaccggctggaccaccttctatgactatgaccacgagggccgcctgaccaacgtgacccggcccactggagtggtgaccagcctgcaccgggagatggagaagagcatcaccattgatattgagaacagcaacagagatgatgatgtgaccgtcatcaccaacctgagctctgtggaggccagctacacagtggtgcaggaccaggtgagaaattcctaccagctgtgcaacaacggcaccctgcgggtgatgtatgccaacggcatgggcatctccttccacagcgagccccacgtgctggccggcaccatcacccccaccatcggccgctgcaacatcagcctgcccatggagaatggcctgaacagcattgagtggaggctgaggaaggagcagatcaagggcaaggtgaccatctttggaaggaagctgcgggtgcacggcaggaacctgctgagcattgattatgacaggaacatcagaacagagaagatctatgatgaccacaggaagttcaccctgcgcatcatctatgaccaggtgggccggcccttcctgtggctgcccagcagcggcctggccgctgtgaatgtgtcctacttcttcaacggccgcctggccggcctgcagagaggagccatgtctgagaggacagacatcgacaagcagggcagaattgtgtccaggatgtttgctgatggcaaggtgtggagctacagctacctggacaagtccatggtgctgctgctgcagagccagaggcagtacatctttgaatatgacagcagtgaccggctgctggccgtgaccatgcccagcgtggcccggcacagcatgagcacccacaccagcatcggctacatccggaacatctacaaccccccagagagcaatgccagcgtcatctttgactacagtgatgatggccgcatcctgaagaccagcttcctgggcaccggccggcaggtgttctacaagtatggcaagctgagcaagctgtctgaaattgtgtatgacagcacagctgtgaccttcggctatgatgagaccaccggggtgctgaagatggtgaacctgcagagcggcggcttcagctgcaccatccgctacaggaagattggccccctggtggacaagcagatctaccgcttcagcgaggagggcatggtgaatgccaggtttgactacacctaccatgacaacagcttccgcatcgccagcatcaagcctgtgatcagcgagacccccctgcctgtggacctgtaccgctatgatgagatcagcggcaaggtggagcactttgggaagtttggagtcatctactatgacatcaaccagatcatcaccacagctgtgatgaccctgagcaagcactttgacacccacggccgcatcaaggaggtgcagtatgagatgttccgcagcctgatgtactggatgacagtgcagtatgacagcatgggccgggtcatcaagcgggagctgaagctgggcccctatgccaacaccaccaagtacacctatgactatgatggagatggccagctgcagagcgtggccgtgaatgaccggcccacctggagatacagctatgacctgaatggaaacctgcacctgctgaaccctggcaacagcgtgcggctgatgcccctgcgctatgacctgcgggaccgcatcacccggctgggagatgtgcagtacaagattgatgatgatggctacctgtgccagaggggcagtgacatctttgagtacaacagcaagggcctgctgacccgggcctacaacaaggccagcggctggagcgtgcagtaccgctatgatggagtgggcagaagagccagctacaagaccaacctgggccaccacctgcagtacttctacagcgacctgcacaaccccacccgcatcacccacgtgtacaaccacagcaacagcgagatcaccagcctgtactatgacctgcagggccacctgtttgccatggagagcagcagtggagaggagtactacgtggccagtgacaacacaggcacccccctggccgtgttcagcatcaatggcctgatgatcaagcagctgcagtacacagcctacggggagatctactatgacagcaacccagacttccagatggtgattggcttccacggcggcctgtatgaccccctgaccaagctggtgcacttcacccagagggactatgatgtgctggccggccgctggaccagcccagactacaccatgtggaagaatgtgggcaaggagcccgcccccttcaacctgtacatgttcaagagcaacaaccccctgagcagcgagctggacctgaagaactacgtgacagatgtgaagtcctggctggtgatgtttggcttccagctgagcaacatcatccctggcttcccccgggccaagatgtactttgtgcccccaccctatgagctgtctgagagccaggcctctgaaaatggccagctgatcaccggggtgcagcagaccacagagcggcacaaccaggccttcatggccctggagggccaggtgatcaccaagaagctgcacgccagcatccgggagaaggccggccactggtttgccaccaccacccccatcatcggcaagggcatcatgtttgccatcaaggagggccgggtgaccactggagtgagcagcatcgccagcgaggacagcaggaaggtggcctctgtgctgaacaatgcctactacctggacaagatgcactacagcattgagggcaaggacacccactactttgtgaagattggcagcgcagatggagacctggtgaccctgggcaccaccatcggcaggaaggtgctggagagcggcgtgaatgtgacagtgtcccagcccaccctgctggtgaatggaagaacaagacgcttcaccaacatcgagttccagtacagcaccctgctgctgagcatccgctatggcctgaccccagacaccctggatgaggagaaggcccgggtgctggaccaggcccggcagagggccctgggcacagcctgggccaaggagcagcagaaggccagagatggccgggagggcagccggctgtggacagaaggagagaagcagcagctgctgagcacaggccgggtgcagggctatgagggctactacgtgctgcctgtggagcagtacccagagctggccgacagcagcagcaacatccagttcctgcggcagaatgagatgggcaagaggtag

SEQ ID NO: 43682 - DNA, 8322 bp, Artificial Sequence
  derived and/or modified sequence
atggatgtgaaggaccggcggcacaggagcctgacccggggccgctgtgggaaggaatgtcgctacaccagcagcagcctggacagcgaggactgccgggtgcccacccagaagagctacagcagcagcgagaccctgaaggcctatgaccatgacagcaggatgcactacggcaacagagtgacagacctgatccaccgggagagtgatgagttcccccggcagggcaccaacttcaccctggccgagctgggcatctgtgagcccagcccccacaggagcggctactgcagcgacatgggcatcctgcaccagggctacagcctgagcactggaagtgatgctgacagcgacacagaaggaggcatgagccctgagcacgccatccggctgtggggccggggcatcaagagcagaagaagcagcggcctgagcagccgggagaacagcgccctgaccctgacagacagcgacaatgaaaacaagagtgatgatgaaaatggccggcccatcccccccaccagcagccccagcctgctgcccagcgcccagctgcccagcagccacaaccccccacctgtgtcctgccagatgcccctgctggacagcaacaccagccaccagatcatggacaccaacccagatgaggagttcagccccaacagctacctgctgcgggcctgcagcggcccccagcaggccagcagcagcggcccccccaaccaccacagccagagcaccctgcggccccccctgcccccaccccacaaccacaccctgagccaccaccacagcagcgccaacagcctgaacagaaacagcctgaccaacagaagaagccagatccacgccccagccccagccccaaatgacctggccaccaccccagagagcgtgcagctgcaggacagctgggtgctgaacagcaatgtgcccctggagaccaggcacttcctgttcaagaccagcagcggcagcacccccctcttcagcagcagcagccctggctaccccctgaccagcggcaccgtgtacaccccaccaccccggctgctgcccaggaacaccttcagcaggaaggccttcaagctgaagaagcccagcaagtactgctcctggaagtgtgccgccctgagcgccatcgctgctgccctgctgctggccatcctgctggcctacttcatcgccatgcacctgctgggcctgaactggcagctgcagcctgcagatggccacaccttcaacaacggcatcagaacaggcctgcctggaaatgatgatgtggccaccatgcccagcggcggcaaggtgccctggagcctgaagaacagcagcattgacagcggggaggccgaggtgggcagaagagtgacccaggaggtgcccccaggagtcttctggaggagccagatccacatcagccagccccagttcctgaagttcaacatcagcctgggcaaggatgccctgtttggagtgtacatccggcggggcctgccccccagccacgcccagtatgacttcatggagcggctggatggcaaggagaagtggagcgtggtggagagcccccgggagaggaggagcatccagaccctggtgcagaatgaggccgtgtttgtgcagtacctggatgtgggcctgtggcacctggccttctacaatgatggcaaggacaaggagatggtgtccttcaacacagtggtgctggacagcgtgcaggactgccccaggaactgccacggcaatggagaatgtgtgtctggagtgtgccactgcttccctggcttcctgggcgctgactgtgccaaggccgcctgccctgtgctgtgcagcggaaatggccagtacagcaagggcacctgccagtgctacagcggctggaagggagcagaatgtgatgtgcccatgaaccagtgcatcgaccccagctgtggcggccacggcagctgcattgatggcaactgtgtgtgcagcgctggctacaagggggagcactgtgaggaggtggactgcctggaccccacctgcagcagccacggcgtgtgtgtgaatggagaatgtctgtgcagccctggctggggcggcctgaactgtgagctggcccgggtgcagtgcccagaccagtgcagcggccacggcacctacctgcctgacaccggcctgtgcagctgtgaccccaactggatgggccctgactgcagcgtggaggtgtgcagcgtggactgtggcacccacggcgtgtgcatcggcggggcctgccgctgtgaggagggctggacaggagctgcctgtgaccagagggtgtgccacccccgctgcattgaacatggcacctgcaaggatggaaaatgtgagtgccgggagggctggaatggagagcactgcaccatcgtgcgggagaccatcggcggggagtgctacggctgcccagacctgtgcaatggaaatggccgctgcaccctgggccagaacagctggcagtgtgtgtgccagacaggctggaggggccctggctgcaatgtggccatggagaccagctgtgccgacaacaaggacaatgaaggagatggcctggtggactgcctggaccctgactgctgcctgcagagcgcctgccagaacagcctgctgtgccggggcagccgggaccccctggacatcatccagcagggccagacagactggccagctgtgaagagcttctatgaccgcatcaagctgctggccggcaaggacagcacccacatcatccctggagagaaccccttcaacagcagcctggtgtccctcatccggggccaggtggtgaccacagatggcacccccctggtgggcgtgaatgtgtcctttgtgaagtaccccaagtatggctacaccatcacccggcaggacggcacctttgacctgattgccaatggaggagccagcctgaccctgcactttgagcgggcccccttcatgagccaggagaggacagtgtggctgccctggaacagcttctacgccatggacaccctggtgatgaagacagaagaaaattccatccccagctgtgacctgagcggctttgtgcggccagaccccatcatcatcagcagccccctgagcaccttcttctctgctgcccctggccagaaccccatcgtgcctgagacccaggtgctgcacgaggagattgagctgcccggcagcaatgtgaagctgcgctacctgagcagcaggacagctggctacaagagcctgctgaagatcaccatgacccagagcacagtgcccctgaacctgatccgggtgcacctgatggtggccgtggagggccacctgttccagaagagcttccaggccagccccaacctggcctacaccttcatctgggacaagacagatgcctacggccagagggtgtatggcctgagtgatgctgtggtgtctgtgggctttgaatatgagacctgccccagcctcatcctgtgggagaagaggacagccctgctgcagggctttgagctggaccccagcaacctgggcggctggagcctggacaagcaccacatcctgaatgtgaagagcggcatcctgcacaagggcaccggggagaaccagttcctgacccagcagcctgccatcatcaccagcatcatgggaaatggaagaagaagaagcatcagctgccccagctgcaatggcctggccgagggcaacaagctgctggcccctgtggccctggccgtgggcattgatggcagcctgtatgtgggggacttcaactacatccgccgcatcttccccagcagaaatgtgaccagcatcctggagctgaggaacaaggagttccacaacaacaacccagcccacaagtactacctggccgtggaccctgtgtctggcagcctgtatgtgtctgacaccaacagccgccgcatctacagagtgaagagcctgagcggcaccaaggacctggccggcaacagcgaggtggtggccggcactggagagcagtgcctgccctttgatgaggcccgctgtggagatggcggcaaggccattgatgccaccctgatgagcccccggggcattgctgtggacaagaatggcctgatgtactttgtggatgccaccatgatcaggaaggtggaccagaatggcatcatcagcaccctgctgggcagcaatgacctgacagctgtgcggcccctgagctgtgacagctccatggatgtggcccaggtgcggctggagtggcccacagacctggccgtgaaccccatggacaacagcctgtatgtgctggagaacaacgtcatcctgcgcatcacagagaaccaccaggtgtccatcatcgccggccggcccatgcactgccaggtgcccggcatcgactacagcctgagcaagctggccatccacagcgccctggagagcgccagcgccatcgccatcagccacactggagtgctgtacatcacagaaacagatgagaagaagatcaaccggctgcggcaggtgaccaccaacggggagatctgcctgctggccggggccgccagtgactgtgactgcaagaatgatgtgaactgcaactgctacagcggagatgatgcctatgccacagatgccatcctgaacagccccagcagcctggccgtggccccagatggcaccatctacatcgctgacctgggcaacatccgcatccgggctgtgtccaagaacaagcctgtgctgaatgccttcaaccagtatgaggccgccagccctggagagcaggagctgtatgtgttcaatgctgatggcatccaccagtacacagtgtccctggtgactggagagtacctgtacaacttcacctacagcacagacaatgatgtgacagagctgattgacaacaatggaaacagcctgaagatccggcgggacagcagcggcatgcccaggcacctgctgatgccagacaaccagatcatcaccctgactgtgggcaccaatggaggcctgaaggtggtgtccacccagaacctggagctgggcctgatgacctatgatggcaacacaggcctgctggccaccaagagtgatgaaacaggctggaccaccttctatgactatgaccacgagggccgcctgaccaacgtgacccggcccaccggggtggtgaccagcctgcaccgggagatggagaagagcatcaccatcgacatcgagaacagcaacagagatgatgatgtgaccgtcatcaccaacctgagctctgtggaggccagctacacagtggtgcaggaccaggtgaggaacagctaccagctgtgcaacaacggcaccctgcgggtgatgtatgccaacggcatgggcatctccttccacagcgagccccacgtgctggccggcaccatcacccccaccatcggccgctgcaacatcagcctgcccatggagaatggcctgaacagcattgagtggaggctgaggaaggagcagatcaagggcaaggtgaccatcttcggcaggaagctgcgggtgcatggaagaaacctgctgagcattgattatgacaggaacatcagaacagagaagatctatgatgaccacaggaagttcaccctgcgcatcatctatgaccaggtgggccggcccttcctgtggctgcccagcagcggcctggccgctgtgaatgtgtcctacttcttcaacggccgcctggccggcctgcagagaggagccatgtctgagaggacagacatcgacaagcagggccgcatcgtgtccaggatgtttgctgatggcaaggtgtggagctacagctacctggacaagtccatggtgctgctgctgcagagccagaggcagtacatctttgaatatgacagcagtgaccggctgctggccgtgaccatgcccagcgtggcccggcacagcatgagcacccacaccagcatcggctacatccggaacatctacaaccccccagagagcaatgccagcgtcatctttgactacagtgatgatggccgcatcctgaagaccagcttcctgggcaccggccggcaggtgttctacaagtatggcaagctgagcaagctgtctgagatcgtgtatgacagcacagctgtgaccttcggctatgatgagaccactggagtgctgaagatggtgaacctgcagagcggcggcttcagctgcaccatccgctacaggaagattggccccctggtggacaagcagatctaccgcttcagcgaggagggcatggtgaatgccaggtttgactacacctaccatgacaacagcttcagaattgccagcatcaagcctgtgatcagcgagacccccctgcctgtggacctgtaccgctatgatgagatcagcggcaaggtggagcactttgggaagtttggagtcatctactatgacatcaaccagatcatcaccacagctgtgatgaccctgagcaagcactttgacacccacggccgcatcaaggaggtgcagtatgagatgttccgcagcctgatgtactggatgacagtgcagtatgacagcatgggccgggtcatcaagcgggagctgaagctgggcccctatgccaacaccaccaagtacacctatgactatgatggagatggccagctgcagagcgtggccgtgaatgaccggcccacctggagatacagctatgacctgaatggaaacctgcacctgctgaaccctggcaacagcgtgcggctgatgcccctgcgctatgacctgcgggaccgcatcacccggctgggagatgtgcagtacaagattgatgatgatggctacctgtgccagaggggcagtgacatctttgagtacaacagcaagggcctgctgacccgggcctacaacaaggccagcggctggagcgtgcagtaccgctatgatggagtgggccggcgggccagctacaagaccaacctgggccaccacctgcagtacttctacagcgacctgcacaaccccacccgcatcacccacgtgtacaaccacagcaacagcgagatcaccagcctgtactatgacctgcagggccacctgtttgccatggagagcagcagcggggaggagtactacgtggccagtgacaacacaggcacccccctggccgtgttcagcatcaatggcctgatgatcaagcagctgcagtacacagcctatggagagatctactatgacagcaacccagacttccagatggtgattggcttccatggaggcctgtatgaccccctgaccaagctggtgcacttcacccagagggactatgatgtgctggccggccgctggaccagcccagactacaccatgtggaagaatgtgggcaaggagcccgcccccttcaacctgtacatgttcaagagcaacaaccccctgagcagcgagctggacctgaagaactacgtgacagatgtgaagtcctggctggtgatgtttggcttccagctgagcaacatcatccctggcttcccccgggccaagatgtactttgtgcccccaccctatgagctgtctgagagccaggcctctgaaaatggccagctgatcactggagtgcagcagaccacagagcggcacaaccaggccttcatggccctggagggccaggtgatcaccaagaagctgcacgccagcatccgggagaaggccggccactggtttgccaccaccacccccatcatcggcaagggcatcatgtttgccatcaaggagggccgggtgaccaccggggtgagcagcatcgccagcgaggacagcaggaaggtggcctctgtgctgaacaatgcctactacctggacaagatgcactacagcattgagggcaaggacacccactactttgtgaagattggcagcgcagatggagacctggtgaccctgggcaccaccatcggcaggaaggtgctggagagcggcgtgaatgtgacagtgtcccagcccaccctgctggtgaatggccgcacccggcgcttcaccaacatcgagttccagtacagcaccctgctgctgagcatccgctatggcctgaccccagacaccctggatgaggagaaggcccgggtgctggaccaggcccggcagagggccctgggcacagcctgggccaaggagcagcagaaggccagagatggccgggagggcagccggctgtggacagaaggagagaagcagcagctgctgagcacaggccgggtgcagggctatgagggctactacgtgctgcctgtggagcagtacccagagctggccgacagcagcagcaacatccagttcctgcggcagaatgagatgggcaagaggtag

SEQ ID NO: 43683 - DNA, 9144 bp, Artificial Sequence
  derived and/or modified sequence
ggtcgtcccattccacctacatcctcgcctagtctcctcccatctgctcagctgcctagctcccataatcctccaccagttagctgccagatgccattgctagacagcaacacctcccatcaaatcatggacaccaaccctgatgaggaattctcccccaattcatacctgctcagagcatgctcagggccccagcaagcctccagcagtggccctccgaaccaccacagccagtcgactctgaggccccctctcccaccccctcacaaccacacgctgtcccatcaccactcgtccgccaactccctcaacaggaactcactgaccaatcggcggagtcagatccacgccccggccccagcgcccaatgacctggccaccacaccagagtccgttcagcttcaggacagctgggtgctaaacagcaacgtgccactggagacccggcacttcctcttcaagacctcctcggggagcacacccttgttcagcagctcttccccgggataccctttgacctcaggaacggtttacacgcccccgccccgcctgctgcccaggaatactttctccaggaaggctttcaagctgaagaagccctccaaatactgcagctggaaatgtgctgccctctccgccattgccgcggccctcctcttggctattttgctggcgtatttcatagcaatgcatctgctcggactcaattggcaactccagcctgcagatgggcacacctttaacaatgggataaggaccggcttaccaggaaacgatgatgtggcaacaatgccatctggaggcaaagtgccctggtcgttgaaaaacagcagcatagacagtggtgaagcagaagttggtcggcgggtaacacaagaagtcccaccaggggtgttttggaggtcacaaattcacatcagtcagccccagttcttaaagttcaacatctccctcgggaaggacgctctctttggtgtttacataagaagaggacttccaccatctcatgcccagtatgacttcatggaacgtctggacgggaaggagaagtggagtgtggttgagtctcccagggaacgccggagcatacagaccttggttcagaatgaagccgtgtttgtgcagtacctggatgtgggcctgtggcatctggccttctacaatgatggaaaagacaaagagatggtttccttcaatactgttgtcctagattcagtgcaggactgtccacgtaactgccatgggaatggtgaatgtgtgtccggggtgtgtcactgtttcccaggatttctaggagcagactgtgctaaagctgcctgccctgtcctgtgcagtgggaatggacaatattctaaagggacgtgccagtgctacagcggctggaaaggtgcagagtgcgacgtgcccatgaatcagtgcatcgatccttcctgcgggggccacggctcctgcattgatgggaactgtgtctgctctgctggctacaaaggcgagcactgtgaggaagttgattgcttggatcccacctgctccagccacggagtctgtgtgaatggagaatgcctgtgcagccctggctggggtggtctgaactgtgagctggcgagggtccagtgcccagaccagtgcagtgggcatggcacgtacctgcctgacacgggcctctgcagctgcgatcccaactggatgggtcccgactgctctgttgaagtgtgctcagtagactgtggcactcacggcgtctgcatcgggggagcctgccgctgtgaagagggctggacaggcgcagcgtgtgaccagcgcgtgtgccacccccgctgcattgagcacgggacctgtaaagatggcaaatgtgaatgccgagagggctggaatggtgaacactgcaccattgatggctgccctgacttgtgcaacggtaacgggagatgcacactgggtcagaacagctggcagtgtgtctgccagaccggctggagagggcccggatgcaacgttgccatggaaacttcctgtgctgataacaaggataatgagggagatggcctggtggattgtttggaccctgactgctgcctgcagtcagcctgtcagaacagcctgctctgccgggggtcccgggacccactggacatcattcagcagggccagacggattggcccgcagtgaagtccttctatgaccgtatcaagctcttggcaggcaaggatagcacccacatcattcctggagagaaccctttcaacagcagcttggtttctctcatccgaggccaagtagtaactacagatggaactcccctggtcggtgtgaacgtgtcttttgtcaagtacccaaaatacggctacaccatcacccgccaggatggcacgttcgacctgatcgcaaatggaggtgcttccttgactctacactttgagcgagccccgttcatgagccaggagcgcactgtgtggctgccgtggaacagcttttacgccatggacaccctggtgatgaagaccgaggagaactccatccccagctgtgacctcagtggctttgtccggcctgatccaatcatcatctcctccccactgtccaccttctttagtgctgcccctgggcagaatcccatcgtgcctgagacccaggttcttcatgaagaaatcgagctccctggttccaatgtgaaacttcgctatctgagctctagaactgcagggtacaagtcactgctgaagatcaccatgacccagtccacagtgcccctgaacctcattagggttcacctgatggtggctgtcgaggggcatctcttccagaagtcattccaggcttctcccaacctggcctacaccttcatctgggacaagacagatgcgtatggccaaagggtgtatggactctcagatgctgttgtgtctgtcgggtttgaatatgagacctgtcccagtctaattctctgggagaaaaggacagccctccttcagggattcgagctggacccctccaacctcggtggctggtccctagacaaacaccacatcctcaatgttaaaagtggaatcctacacaaaggcactggggaaaaccagttcctgacccagcagcctgccatcatcaccagcatcatgggcaatggtcgccgccggagcatttcctgtcccagctgcaacggccttgctgaaggcaacaagctgctggccccagtggctctggctgttggaatcgatgggagcctctatgtgggtgacttcaattacatccgacgcatctttccctctcgaaatgtgaccagcatcttggagttacgaaataaagagtttaaacatagcaacaacccagcacacaagtactacttggcagtggaccccgtgtccggctcgctctacgtgtccgacaccaacagcaggagaatctaccgcgtcaagtctctgagtggaaccaaagacctggctgggaattcggaagttgtggcagggacgggagagcagtgtctaccctttgatgaagcccgctgcggggatggagggaaggccatagatgcaaccctgatgagcccgagaggtattgcagtagacaagaatgggctcatgtactttgtcgatgccaccatgatccggaaggttgaccagaatggaatcatctccaccctgctgggctccaatgacctcactgccgtccggccgctgagctgtgattccagcatggatgtagcccaggttcgtctggagtggccaacagaccttgctgtcaatcccatggataactccttgtatgttctagagaacaatgtcatccttcgaatcaccgagaaccaccaagtcagcatcattgcgggacgccccatgcactgccaagttcctggcattgactactcactcagcaaactagccattcactctgccctggagtcagccagtgccattgccatttctcacactggggtcctctacatcactgagacagatgagaagaagattaaccgtctacgccaggtaacaaccaacggggagatctgccttttagctggggcagcctcggactgcgactgcaaaaacgatgtcaattgcaactgctattcaggagatgatgcctacgcgactgatgccatcttgaattccccatcatccttagctgtagctccagatggtaccatttacattgcagaccttggaaatattcggatcagggcggtcagcaagaacaagcctgttcttaatgccttcaaccagtatgaggctgcatcccccggagagcaggagttatatgttttcaacgctgatggcatccaccaatacactgtgagcctggtgacaggggagtacttgtacaatttcacatatagtactgacaatgatgtcactgaattgattgacaataatgggaattccctgaagatccgtcgggacagcagtggcatgccccgtcacctgctcatgcctgacaaccagatcatcaccctcaccgtgggcaccaatggaggcctcaaagtcgtgtccacacagaacctggagcttggtctcatgacctatgatggcaacactgggctcctggccaccaagagcgatgaaacaggatggacgactttctatgactatgaccacgaaggccgcctgaccaacgtgacgcgccccacgggggtggtaaccagtctgcaccgggaaatggagaaatctattaccattgacattgagaactccaaccgtgatgatgacgtcactgtcatcaccaacctctcttcagtagaggcctcctacacagtggtacaagatcaagttcggaacagctaccagctctgtaataatggtaccctgagggtgatgtatgctaatgggatgggtatcagcttccacagcgagccccatgtcctagcgggcaccatcacccccaccattggacgctgcaacatctccctgcctatggagaatggcttaaactccattgagtggcgcctaagaaaggaacagattaaaggcaaagtcaccatctttggcaggaagctccgggtccatggaagaaatctcttgtccattgactatgatcgaaatattcggactgaaaagatctatgatgaccaccggaagttcaccctgaggatcatttatgaccaggtgggccgccccttcctctggctgcccagcagcgggctggcagctgtcaacgtgtcatacttcttcaatgggcgcctggctgggcttcagcgtggggccatgagcgagaggacagacatcgacaagcaaggccgcatcgtgtcccgcatgttcgctgacgggaaagtgtggagctactcctaccttgacaagtccatggtcctcctgcttcagagccaacgtcagtatatatttgagtatgactcctctgaccgcctccttgccgtcaccatgcccagcgtggcccggcacagcatgtccacacacacctccatcggctacatccgtaatatttacaacccgcctgaaagcaatgcttcggtcatctttgactacagtgatgacggccgcatcctgaagacctcctttttgggcaccggacgccaggtgttctacaagtatgggaaactctccaagttatcagagattgtctacgacagtaccgccgtcaccttcgggtatgacgagaccactggtgtcttgaagatggtcaacctccaaagtgggggcttctcctgcaccatcaggtaccggaagattggccccctggtggacaagcagatctacaggttctccgaggaaggcatggtcaatgccaggtttgactacacctatcatgacaacagcttccgcatcgcaagcatcaagcccgtcataagtgagactcccctccccgttgacctctaccgctatgatgagatttctggcaaggtggaacactttggtaagtttggagtcatctattatgacatcaaccagatcatcaccactgccgtgatgaccctcagcaaacacttcgacacccatgggcggatcaaggaggtccagtatgagatgttccggtccctcatgtactggatgacggtgcaatatgacagcatgggcagggtgatcaagagggagctaaaactggggccctatgccaataccacgaagtacacctatgactacgatggggacgggcagctccagagcgtggccgtcaatgaccgcccgacctggcgctacagctatgaccttaatgggaatctccacttactgaacccaggcaacagtgtgcgcctcatgcccttgcgctatgacctccgggatcggataaccagactcggggatgtgcagtacaaaattgacgacgatggctatctgtgccagagagggtctgacatcttcgaatacaattccaagggcctcctaacaagagcctacaacaaggccagcgggtggagtgtccagtaccgctatgatggcgtaggacggcgggcttcctacaagaccaacctgggccaccacctgcagtacttctactctgacctccacaacccgacgcgcatcacccatgtctacaatcactccaactcggagattacctcactgtactacgacctccagggccacctctttgccatggagagcagcagtggggaggagtactatgttgcctctgataacacagggactcctctggctgtgttcagcatcaacggcctcatgatcaaacagctgcagtacacggcctatggggagatttattatgactccaaccccgacttccagatggtcattggcttccatgggggactctatgaccccctgaccaagctggtccacttcactcagcgtgattatgatgtgctggcaggacgatggacctccccagactataccatgtggaaaaacgtgggcaaggagccggccccctttaacctgtatatgttcaagagcaacaatcctctcagcagtgagctagatttgaagaactacgtgacagatgtgaaaagctggcttgtgatgtttggatttcagcttagcaacatcattcctggcttcccgagagccaaaatgtatttcgtgcctcctccctatgaattgtcagagagtcaagcaagtgagaatggacagctcattacaggtgtccaacagacaacagagagacataaccaggccttcatggctctggaaggacaggtcattactaaaaagctccacgccagcatccgagagaaagcaggtcactggtttgccaccaccacgcccatcattggcaaaggcatcatgtttgccatcaaagaagggcgggtgaccacgggcgtgtccagcatcgccagcgaagatagccgcaaggtggcatctgtgctgaacaacgcctactacctggacaagatgcactacagcatcgagggcaaggacacccactactttgtgaagattggctcagccgatggcgacctggtcacactaggcaccaccatcggccgcaaggtgctagagagcggggtgaacgtgaccgtgtcccagcccacgctgctggtcaacggcaggactcgaaggttcacgaacattgagttccagtactccacgctgctgctcagcatccgctatggcctcacccccgacaccctggacgaagagaaggcccgcgtcctggaccaggcgagacagagggccctgggcacggcctgggccaaggagcagcagaaagccagggacgggagagaggggagccgcctgtggactgagggcgagaagcagcagcttctgagcaccgggcgcgtgcaagggtacgagggatattacgtgcttcccgtggagcaatacccagagcttgcagacagtagcagcaacatccagtttttaagacagaatgagatgggaaagaggtaacaaaataatctgctgccattccttgtctgaatggctcagcaggagtaactgttatctcctctcctaaggagatgaagacctaacaggggcactgcggctgggctgctttaggagaccaagtggcaagaaagctcacattttttgagttcaaatgctactgtccaagcgagaagtccctcatcctgaagtagactaaagcccggctgaaaattccgaggaaaacaaaacaaacgaatgaatgaacagacacacacaatgttccaagttcccctaaaatatgacccacttgttctgggtctacgcagaaaagagacgcaaagtgtccaaaaggaacaaaagaacaaaaacgaataagcaaagaagaaaacaaacaaaaacaaaacaaaacaaacacacggaccaataaacaaagaagcgaagataagaaagaaggcctcatatccaattacctcactcattcacatgtgagcgacacgcagacatccgcgagggccagcgtcaccagaccagctgcgggacaaaccactcagactgcttgtaggacaaatacttctgacattttcgtttaagcaaatacaggtgcatttaaaacacgactttgggggtgatttgtgtgtagcgcctggggaggggggataaaagaggaggagtgagcactggaaatactttttaaagaaaaaaaaacatgagggaataaaagaaattcctatcaaaaatcaaagtgaaataataccatccagcacttaactctcaggtcccaactaagtctggcctgagctaatttatttgagcgcagagtgtaaaatttaattcaaaatggtggctataatcactacagataaatttcatactcttttgtctttggagattccattgtggacagtaatacgcagttacagggtgtagtctgtttagattccgtagttcgtgggtatcagtttcggtagaggtgcagcatcgtgacacttttgctaacaggtaccacttctgatcaccctgtacatacatgagccgaaaggcacaatcactgtttcagatttaaaattattagtgtgtttgtttggtccagaaactgagacaatcacatgacagtcaccacgaggagagaaaatttaaaaaataaaaataaaaacaaaaaaaattttaaaaattaaaaaaacaaaaataaagtctaataagaactttggtacaggaacttttttgtaatatacatgtatgaattgttcatcgagtttttatattaattttaatttgctgctaagcaaagactagggacaggcaaagataatttatggcaaagtgtttaaattgtttatacataaataaagtctctaaaactcctgtgga

SEQ ID NO: 43684 - DNA, 8550 bp, Artificial Sequence
  derived and/or modified sequence
cttttctgaaaacatcagcattctgccatatctggaataatggatgtaaaggaccggcgacaccgctctttgaccagaggacgctgtggcaaagagtgtcgctacacaagctcctctctggacagtgaggactgccgcgtgcccacacagaaatcctacagctccagtgagactctgaaggcctatgaccatgacagcaggatgcactatggaaaccgagtcacagacctcatccaccgggagtcagatgagtttcctagacaaggaaccaacttcacccttgccgaactgggcatctgtgagccctccccacaccgaagcggctactgctccgacatggggatccttcaccagggctactcccttagcacagggtctgacgccgactccgacaccgagggagggatgtctccagaacacgccatcagactgtggggcagagggataaaatccaggcgcagttccggcctgtccagtcgtgaaaactcggcccttaccctgactgactctgacaacgaaaacaaatcagatgatgagaacggtcgtcccattccacctacatcctcgcctagtctcctcccatctgctcagctgcctagctcccataatcctccaccagttagctgccagatgccattgctagacagcaacacctcccatcaaatcatggacaccaaccctgatgaggaattctcccccaattcatacctgctcagagcatgctcagggccccagcaagcctccagcagtggccctccgaaccaccacagccagtcgactctgaggccccctctcccaccccctcacaaccacacgctgtcccatcaccactcgtccgccaactccctcaacaggaactcactgaccaatcggcggagtcagatccacgccccggccccagcgcccaatgacctggccaccacaccagagtccgttcagcttcaggacagctgggtgctaaacagcaacgtgccactggagacccggcacttcctcttcaagacctcctcggggagcacacccttgttcagcagctcttccccgggataccctttgacctcaggaacggtttacacgcccccgccccgcctgctgcccaggaatactttctccaggaaggctttcaagctgaagaagccctccaaatactgcagctggaaatgtgctgccctctccgccattgccgcggccctcctcttggctattttgctggcgtatttcatagcaatgcatctgctcggactcaattggcaactccagcctgcagatgggcacacctttaacaatgggataaggaccggcttaccaggaaacgatgatgtggcaacaatgccatctggaggcaaagtgccctggtcgttgaaaaacagcagcatagacagtggtgaagcagaagttggtcggcgggtaacacaagaagtcccaccaggggtgttttggaggtcacaaattcacatcagtcagccccagttcttaaagttcaacatctccctcgggaaggacgctctctttggtgtttacataagaagaggacttccaccatctcatgcccagtatgacttcatggaacgtctggacgggaaggagaagtggagtgtggttgagtctcccagggaacgccggagcatacagaccttggttcagaatgaagccgtgtttgtgcagtacctggatgtgggcctgtggcatctggccttctacaatgatggaaaagacaaagagatggtttccttcaatactgttgtcctagattcagtgcaggactgtccacgtaactgccatgggaatggtgaatgtgtgtccggggtgtgtcactgtttcccaggatttctaggagcagactgtgctaaagctgcctgccctgtcctgtgcagtgggaatggacaatattctaaagggacgtgccagtgctacagcggctggaaaggtgcagagtgcgacgtgcccatgaatcagtgcatcgatccttcctgcgggggccacggctcctgcattgatgggaactgtgtctgctctgctggctacaaaggcgagcactgtgaggaagttgattgcttggatcccacctgctccagccacggagtctgtgtgaatggagaatgcctgtgcagccctggctggggtggtctgaactgtgagctggcgagggtccagtgcccagaccagtgcagtgggcatggcacgtacctgcctgacacgggcctctgcagctgcgatcccaactggatgggtcccgactgctctgttgaagtgtgctcagtagactgtggcactcacggcgtctgcatcgggggagcctgccgctgtgaagagggctggacaggcgcagcgtgtgaccagcgcgtgtgccacccccgctgcattgagcacgggacctgtaaagatggcaaatgtgaatgccgagagggctggaatggtgaacactgcaccattggtaggcaaacggcaggcaccgaaacagatggctgccctgacttgtgcaacggtaacgggagatgcacactgggtcagaacagctggcagtgtgtctgccagaccggctggagagggcccggatgcaacgttgccatggaaacttcctgtgctgataacaaggataatgagggagatggcctggtggattgtttggaccctgactgctgcctgcagtcagcctgtcagaacagcctgctctgccgggggtcccgggacccactggacatcattcagcagggccagacggattggcccgcagtgaagtccttctatgaccgtatcaagctcttggcaggcaaggatagcacccacatcattcctggagagaaccctttcaacagcagcttggtttctctcatccgaggccaagtagtaactacagatggaactcccctggtcggtgtgaacgtgtcttttgtcaagtacccaaaatacggctacaccatcacccgccaggatggcacgttcgacctgatcgcaaatggaggtgcttccttgactctacactttgagcgagccccgttcatgagccaggagcgcactgtgtggctgccgtggaacagcttttacgccatggacaccctggtgatgaagaccgaggagaactccatccccagctgtgacctcagtggctttgtccggcctgatccaatcatcatctcctccccactgtccaccttctttagtgctgcccctgggcagaatcccatcgtgcctgagacccaggttcttcatgaagaaatcgagctccctggttccaatgtgaaacttcgctatctgagctctagaactgcagggtacaagtcactgctgaagatcaccatgacccagtccacagtgcccctgaacctcattagggttcacctgatggtggctgtcgaggggcatctcttccagaagtcattccaggcttctcccaacctggcctacaccttcatctgggacaagacagatgcgtatggccaaagggtgtatggactctcagatgctgttgtgtctgtcgggtttgaatatgagacctgtcccagtctaattctctgggagaaaaggacagccctccttcagggattcgagctggacccctccaacctcggtggctggtccctagacaaacaccacatcctcaatgttaaaagtggaatcctacacaaaggcactggggaaaaccagttcctgacccagcagcctgccatcatcaccagcatcatgggcaatggtcgccgccggagcatttcctgtcccagctgcaacggccttgctgaaggcaacaagctgctggccccagtggctctggctgttggaatcgatgggagcctctatgtgggtgacttcaattacatccgacgcatctttccctctcgaaatgtgaccagcatcttggagttacgaaataaagagtttaaacatagcaacaacccagcacacaagtactacttggcagtggaccccgtgtccggctcgctctacgtgtccgacaccaacagcaggagaatctaccgcgtcaagtctctgagtggaaccaaagacctggctgggaattcggaagttgtggcagggacgggagagcagtgtctaccctttgatgaagcccgctgcggggatggagggaaggccatagatgcaaccctgatgagcccgagaggtattgcagtagacaagaatgggctcatgtactttgtcgatgccaccatgatccggaaggttgaccagaatggaatcatctccaccctgctgggctccaatgacctcactgccgtccggccgctgagctgtgattccagcatggatgtagcccaggttcgtctggagtggccaacagaccttgctgtcaatcccatggataactccttgtatgttctagagaacaatgtcatccttcgaatcaccgagaaccaccaagtcagcatcattgcgggacgccccatgcactgccaagttcctggcattgactactcactcagcaaactagccattcactctgccctggagtcagccagtgccattgccatttctcacactggggtcctctacatcactgagacagatgagaagaagattaaccgtctacgccaggtaacaaccaacggggagatctgccttttagctggggcagcctcggactgcgactgcaaaaacgatgtcaattgcaactgctattcaggagatgatgcctacgcgactgatgccatcttgaattccccatcatccttagctgtagctccagatggtaccatttacattgcagaccttggaaatattcggatcagggcggtcagcaagaacaagcctgttcttaatgccttcaaccagtatgaggctgcatcccccggagagcaggagttatatgttttcaacgctgatggcatccaccaatacactgtgagcctggtgacaggggagtacttgtacaatttcacatatagtactgacaatgatgtcactgaattgattgacaataatgggaattccctgaagatccgtcgggacagcagtggcatgccccgtcacctgctcatgcctgacaaccagatcatcaccctcaccgtgggcaccaatggaggcctcaaagtcgtgtccacacagaacctggagcttggtctcatgacctatgatggcaacactgggctcctggccaccaagagcgatgaaacaggatggacgactttctatgactatgaccacgaaggccgcctgaccaacgtgacgcgccccacgggggtggtaaccagtctgcaccgggaaatggagaaatctattaccattgacattgagaactccaaccgtgatgatgacgtcactgtcatcaccaacctctcttcagtagaggcctcctacacagtggtacaagatcaagttcggaacagctaccagctctgtaataatggtaccctgagggtgatgtatgctaatgggatgggtatcagcttccacagcgagccccatgtcctagcgggcaccatcacccccaccattggacgctgcaacatctccctgcctatggagaatggcttaaactccattgagtggcgcctaagaaaggaacagattaaaggcaaagtcaccatctttggcaggaagctccgggtccatggaagaaatctcttgtccattgactatgatcgaaatattcggactgaaaagatctatgatgaccaccggaagttcaccctgaggatcatttatgaccaggtgggccgccccttcctctggctgcccagcagcgggctggcagctgtcaacgtgtcatacttcttcaatgggcgcctggctgggcttcagcgtggggccatgagcgagaggacagacatcgacaagcaaggccgcatcgtgtcccgcatgttcgctgacgggaaagtgtggagctactcctaccttgacaagtccatggtcctcctgcttcagagccaacgtcagtatatatttgagtatgactcctctgaccgcctccttgccgtcaccatgcccagcgtggcccggcacagcatgtccacacacacctccatcggctacatccgtaatatttacaacccgcctgaaagcaatgcttcggtcatctttgactacagtgatgacggccgcatcctgaagacctcctttttgggcaccggacgccaggtgttctacaagtatgggaaactctccaagttatcagagattgtctacgacagtaccgccgtcaccttcgggtatgacgagaccactggtgtcttgaagatggtcaacctccaaagtgggggcttctcctgcaccatcaggtaccggaagattggccccctggtggacaagcagatctacaggttctccgaggaaggcatggtcaatgccaggtttgactacacctatcatgacaacagcttccgcatcgcaagcatcaagcccgtcataagtgagactcccctccccgttgacctctaccgctatgatgagatttctggcaaggtggaacactttggtaagtttggagtcatctattatgacatcaaccagatcatcaccactgccgtgatgaccctcagcaaacacttcgacacccatgggcggatcaaggaggtccagtatgagatgttccggtccctcatgtactggatgacggtgcaatatgacagcatgggcagggtgatcaagagggagctaaaactggggccctatgccaataccacgaagtacacctatgactacgatggggacgggcagctccagagcgtggccgtcaatgaccgcccgacctggcgctacagctatgaccttaatgggaatctccacttactgaacccaggcaacagtgtgcgcctcatgcccttgcgctatgacctccgggatcggataaccagactcggggatgtgcagtacaaaattgacgacgatggctatctgtgccagagagggtctgacatcttcgaatacaattccaagggcctcctaacaagagcctacaacaaggccagcgggtggagtgtccagtaccgctatgatggcgtaggacggcgggcttcctacaagaccaacctgggccaccacctgcagtacttctactctgacctccacaacccgacgcgcatcacccatgtctacaatcactccaactcggagattacctcactgtactacgacctccagggccacctctttgccatggagagcagcagtggggaggagtactatgttgcctctgataacacagggactcctctggctgtgttcagcatcaacggcctcatgatcaaacagctgcagtacacggcctatggggagatttattatgactccaaccccgacttccagatggtcattggcttccatgggggactctatgaccccctgaccaagctggtccacttcactcagcgtgattatgatgtgctggcaggacgatggacctccccagactataccatgtggaaaaacgtgggcaaggagccggccccctttaacctgtatatgttcaagagcaacaatcctctcagcagtgagctagatttgaagaactacgtgacagatgtgaaaagctggcttgtgatgtttggatttcagcttagcaacatcattcctggcttcccgagagccaaaatgtatttcgtgcctcctccctatgaattgtcagagagtcaagcaagtgagaatggacagctcattacaggtgtccaacagacaacagagagacataaccaggccttcatggctctggaaggacaggtcattactaaaaagctccacgccagcatccgagagaaagcaggtcactggtttgccaccaccacgcccatcattggcaaaggcatcatgtttgccatcaaagaagggcgggtgaccacgggcgtgtccagcatcgccagcgaagatagccgcaaggtggcatctgtgctgaacaacgcctactacctggacaagatgcactacagcatcgagggcaaggacacccactactttgtgaagattggctcagccgatggcgacctggtcacactaggcaccaccatcggccgcaaggtgctagagagcggggtgaacgtgaccgtgtcccagcccacgctgctggtcaacggcaggactcgaaggttcacgaacattgagttccagtactccacgctgctgctcagcatccgctatggcctcacccccgacaccctggacgaagagaaggcccgcgtcctggaccaggcgagacagagggccctgggcacggcctgggccaaggagcagcagaaagccagggacgggagagaggggagccgcctgtggactgagggcgagaagcagcagcttctgagcaccgggcgcgtgcaagggtacgagggatattacgtgcttcccgtggagcaatacccagagcttgcagacagtagcagcaacatccagtttttaagacagaatgagatgggaaagaggtaacaaaataatctgctgccattccttgtctgaatggctcagcaggagtaactgttatctcctctcctaaggagatgaagacctaacaggggcactgcggctgggctgctttaggagaccaagtggcaagaaagctcacattttttgagttcaaatgctactgtccaagcgagaagtccctcatcctga

SEQ ID NO: 43685 - DNA, 8322 bp, Artificial Sequence
  derived and/or modified sequence
atggatgtaaaggaccggcgacaccgctctttgaccagaggacgctgtggcaaagagtgtcgctacacaagctcctctctggacagtgaggactgccgcgtgcccacacagaaatcctacagctccagtgagactctgaaggcctatgaccatgacagcaggatgcactatggaaaccgagtcacagacctcatccaccgggagtcagatgagtttcctagacaaggaaccaacttcacccttgccgaactgggcatctgtgagccctccccacaccgaagcggctactgctccgacatggggatccttcaccagggctactcccttagcacagggtctgacgccgactccgacaccgagggagggatgtctccagaacacgccatcagactgtggggcagagggataaaatccaggcgcagttccggcctgtccagtcgtgaaaactcggcccttaccctgactgactctgacaacgaaaacaaatcagatgatgagaacggtcgtcccattccacctacatcctcgcctagtctcctcccatctgctcagctgcctagctcccataatcctccaccagttagctgccagatgccattgctagacagcaacacctcccatcaaatcatggacaccaaccctgatgaggaattctcccccaattcatacctgctcagagcatgctcagggccccagcaagcctccagcagtggccctccgaaccaccacagccagtcgactctgaggccccctctcccaccccctcacaaccacacgctgtcccatcaccactcgtccgccaactccctcaacaggaactcactgaccaatcggcggagtcagatccacgccccggccccagcgcccaatgacctggccaccacaccagagtccgttcagcttcaggacagctgggtgctaaacagcaacgtgccactggagacccggcacttcctcttcaagacctcctcggggagcacacccttgttcagcagctcttccccgggataccctttgacctcaggaacggtttacacgcccccgccccgcctgctgcccaggaatactttctccaggaaggctttcaagctgaagaagccctccaaatactgcagctggaaatgtgctgccctctccgccattgccgcggccctcctcttggctattttgctggcgtatttcatagcaatgcatctgctcggactcaattggcaactccagcctgcagatgggcacacctttaacaatgggataaggaccggcttaccaggaaacgatgatgtggcaacaatgccatctggaggcaaagtgccctggtcgttgaaaaacagcagcatagacagtggtgaagcagaagttggtcggcgggtaacacaagaagtcccaccaggggtgttttggaggtcacaaattcacatcagtcagccccagttcttaaagttcaacatctccctcgggaaggacgctctctttggtgtttacataagaagaggacttccaccatctcatgcccagtatgacttcatggaacgtctggacgggaaggagaagtggagtgtggttgagtctcccagggaacgccggagcatacagaccttggttcagaatgaagccgtgtttgtgcagtacctggatgtgggcctgtggcatctggccttctacaatgatggaaaagacaaagagatggtttccttcaatactgttgtcctagattcagtgcaggactgtccacgtaactgccatgggaatggtgaatgtgtgtccggggtgtgtcactgtttcccaggatttctaggagcagactgtgctaaagctgcctgccctgtcctgtgcagtgggaatggacaatattctaaagggacgtgccagtgctacagcggctggaaaggtgcagagtgcgacgtgcccatgaatcagtgcatcgatccttcctgcgggggccacggctcctgcattgatgggaactgtgtctgctctgctggctacaaaggcgagcactgtgaggaagttgattgcttggatcccacctgctccagccacggagtctgtgtgaatggagaatgcctgtgcagccctggctggggtggtctgaactgtgagctggcgagggtccagtgcccagaccagtgcagtgggcatggcacgtacctgcctgacacgggcctctgcagctgcgatcccaactggatgggtcccgactgctctgttgaagtgtgctcagtagactgtggcactcacggcgtctgcatcgggggagcctgccgctgtgaagagggctggacaggcgcagcgtgtgaccagcgcgtgtgccacccccgctgcattgagcacgggacctgtaaagatggcaaatgtgaatgccgagagggctggaatggtgaacactgcaccattgtgagagaaaccattggtggggagtgctatggctgccctgacttgtgcaacggtaacgggagatgcacactgggtcagaacagctggcagtgtgtctgccagaccggctggagagggcccggatgcaacgttgccatggaaacttcctgtgctgataacaaggataatgagggagatggcctggtggattgtttggaccctgactgctgcctgcagtcagcctgtcagaacagcctgctctgccgggggtcccgggacccactggacatcattcagcagggccagacggattggcccgcagtgaagtccttctatgaccgtatcaagctcttggcaggcaaggatagcacccacatcattcctggagagaaccctttcaacagcagcttggtttctctcatccgaggccaagtagtaactacagatggaactcccctggtcggtgtgaacgtgtcttttgtcaagtacccaaaatacggctacaccatcacccgccaggatggcacgttcgacctgatcgcaaatggaggtgcttccttgactctacactttgagcgagccccgttcatgagccaggagcgcactgtgtggctgccgtggaacagcttttacgccatggacaccctggtgatgaagaccgaggagaactccatccccagctgtgacctcagtggctttgtccggcctgatccaatcatcatctcctccccactgtccaccttctttagtgctgcccctgggcagaatcccatcgtgcctgagacccaggttcttcatgaagaaatcgagctccctggttccaatgtgaaacttcgctatctgagctctagaactgcagggtacaagtcactgctgaagatcaccatgacccagtccacagtgcccctgaacctcattagggttcacctgatggtggctgtcgaggggcatctcttccagaagtcattccaggcttctcccaacctggcctacaccttcatctgggacaagacagatgcgtatggccaaagggtgtatggactctcagatgctgttgtgtctgtcgggtttgaatatgagacctgtcccagtctaattctctgggagaaaaggacagccctccttcagggattcgagctggacccctccaacctcggtggctggtccctagacaaacaccacatcctcaatgttaaaagtggaatcctacacaaaggcactggggaaaaccagttcctgacccagcagcctgccatcatcaccagcatcatgggcaatggtcgccgccggagcatttcctgtcccagctgcaacggccttgctgaaggcaacaagctgctggccccagtggctctggctgttggaatcgatgggagcctctatgtgggtgacttcaattacatccgacgcatctttccctctcgaaatgtgaccagcatcttggagttacgaaataaagagtttcataacaacaacccagcacacaagtactacttggcagtggaccccgtgtccggctcgctctacgtgtccgacaccaacagcaggagaatctaccgcgtcaagtctctgagtggaaccaaagacctggctgggaattcggaagttgtggcagggacgggagagcagtgtctaccctttgatgaagcccgctgcggggatggagggaaggccatagatgcaaccctgatgagcccgagaggtattgcagtagacaagaatgggctcatgtactttgtcgatgccaccatgatccggaaggttgaccagaatggaatcatctccaccctgctgggctccaatgacctcactgccgtccggccgctgagctgtgattccagcatggatgtagcccaggttcgtctggagtggccaacagaccttgctgtcaatcccatggataactccttgtatgttctagagaacaatgtcatccttcgaatcaccgagaaccaccaagtcagcatcattgcgggacgccccatgcactgccaagttcctggcattgactactcactcagcaaactagccattcactctgccctggagtcagccagtgccattgccatttctcacactggggtcctctacatcactgagacagatgagaagaagattaaccgtctacgccaggtaacaaccaacggggagatctgccttttagctggggcagcctcggactgcgactgcaaaaacgatgtcaattgcaactgctattcaggagatgatgcctacgcgactgatgccatcttgaattccccatcatccttagctgtagctccagatggtaccatttacattgcagaccttggaaatattcggatcagggcggtcagcaagaacaagcctgttcttaatgccttcaaccagtatgaggctgcatcccccggagagcaggagttatatgttttcaacgctgatggcatccaccaatacactgtgagcctggtgacaggggagtacttgtacaatttcacatatagtactgacaatgatgtcactgaattgattgacaataatgggaattccctgaagatccgtcgggacagcagtggcatgccccgtcacctgctcatgcctgacaaccagatcatcaccctcaccgtgggcaccaatggaggcctcaaagtcgtgtccacacagaacctggagcttggtctcatgacctatgatggcaacactgggctcctggccaccaagagcgatgaaacaggatggacgactttctatgactatgaccacgaaggccgcctgaccaacgtgacgcgccccacgggggtggtaaccagtctgcaccgggaaatggagaaatctattaccattgacattgagaactccaaccgtgatgatgacgtcactgtcatcaccaacctctcttcagtagaggcctcctacacagtggtacaagatcaagttcggaacagctaccagctctgtaataatggtaccctgagggtgatgtatgctaatgggatgggtatcagcttccacagcgagccccatgtcctagcgggcaccatcacccccaccattggacgctgcaacatctccctgcctatggagaatggcttaaactccattgagtggcgcctaagaaaggaacagattaaaggcaaagtcaccatctttggcaggaagctccgggtccatggaagaaatctcttgtccattgactatgatcgaaatattcggactgaaaagatctatgatgaccaccggaagttcaccctgaggatcatttatgaccaggtgggccgccccttcctctggctgcccagcagcgggctggcagctgtcaacgtgtcatacttcttcaatgggcgcctggctgggcttcagcgtggggccatgagcgagaggacagacatcgacaagcaaggccgcatcgtgtcccgcatgttcgctgacgggaaagtgtggagctactcctaccttgacaagtccatggtcctcctgcttcagagccaacgtcagtatatatttgagtatgactcctctgaccgcctccttgccgtcaccatgcccagcgtggcccggcacagcatgtccacacacacctccatcggctacatccgtaatatttacaacccgcctgaaagcaatgcttcggtcatctttgactacagtgatgacggccgcatcctgaagacctcctttttgggcaccggacgccaggtgttctacaagtatgggaaactctccaagttatcagagattgtctacgacagtaccgccgtcaccttcgggtatgacgagaccactggtgtcttgaagatggtcaacctccaaagtgggggcttctcctgcaccatcaggtaccggaagattggccccctggtggacaagcagatctacaggttctccgaggaaggcatggtcaatgccaggtttgactacacctatcatgacaacagcttccgcatcgcaagcatcaagcccgtcataagtgagactcccctccccgttgacctctaccgctatgatgagatttctggcaaggtggaacactttggtaagtttggagtcatctattatgacatcaaccagatcatcaccactgccgtgatgaccctcagcaaacacttcgacacccatgggcggatcaaggaggtccagtatgagatgttccggtccctcatgtactggatgacggtgcaatatgacagcatgggcagggtgatcaagagggagctaaaactggggccctatgccaataccacgaagtacacctatgactacgatggggacgggcagctccagagcgtggccgtcaatgaccgcccgacctggcgctacagctatgaccttaatgggaatctccacttactgaacccaggcaacagtgtgcgcctcatgcccttgcgctatgacctccgggatcggataaccagactcggggatgtgcagtacaaaattgacgacgatggctatctgtgccagagagggtctgacatcttcgaatacaattccaagggcctcctaacaagagcctacaacaaggccagcgggtggagtgtccagtaccgctatgatggcgtaggacggcgggcttcctacaagaccaacctgggccaccacctgcagtacttctactctgacctccacaacccgacgcgcatcacccatgtctacaatcactccaactcggagattacctcactgtactacgacctccagggccacctctttgccatggagagcagcagtggggaggagtactatgttgcctctgataacacagggactcctctggctgtgttcagcatcaacggcctcatgatcaaacagctgcagtacacggcctatggggagatttattatgactccaaccccgacttccagatggtcattggcttccatgggggactctatgaccccctgaccaagctggtccacttcactcagcgtgattatgatgtgctggcaggacgatggacctccccagactataccatgtggaaaaacgtgggcaaggagccggccccctttaacctgtatatgttcaagagcaacaatcctctcagcagtgagctagatttgaagaactacgtgacagatgtgaaaagctggcttgtgatgtttggatttcagcttagcaacatcattcctggcttcccgagagccaaaatgtatttcgtgcctcctccctatgaattgtcagagagtcaagcaagtgagaatggacagctcattacaggtgtccaacagacaacagagagacataaccaggccttcatggctctggaaggacaggtcattactaaaaagctccacgccagcatccgagagaaagcaggtcactggtttgccaccaccacgcccatcattggcaaaggcatcatgtttgccatcaaagaagggcgggtgaccacgggcgtgtccagcatcgccagcgaagatagccgcaaggtggcatctgtgctgaacaacgcctactacctggacaagatgcactacagcatcgagggcaaggacacccactactttgtgaagattggctcagccgatggcgacctggtcacactaggcaccaccatcggccgcaaggtgctagagagcggggtgaacgtgaccgtgtcccagcccacgctgctggtcaacggcaggactcgaaggttcacgaacattgagttccagtactccacgctgctgctcagcatccgctatggcctcacccccgacaccctggacgaagagaaggcccgcgtcctggaccaggcgagacagagggccctgggcacggcctgggccaaggagcagcagaaagccagggacgggagagaggggagccgcctgtggactgagggcgagaagcagcagcttctgagcaccgggcgcgtgcaagggtacgagggatattacgtgcttcccgtggagcaatacccagagcttgcagacagtagcagcaacatccagtttttaagacagaatgagatgggaaagaggtaa

SEQ ID NO: 43686 - DNA, 7797 bp, Artificial Sequence
  derived and/or modified sequence
ggccggcccatcccccccaccagcagccccagcctgctgcccagcgcccagctgccttcttctcataacccccctccagtgtcatgtcaaatgcccctcctcgattcgaacacatcacaccagatcatggacactaatcctgacgaagaattcagtcccaatagctaccttctcagagcttgcagcggacctcagcaggcctctagtagcgggccgccgaatcatcactcgcagtctaccctgcggcctccactgcctcctccacataaccacacactcagtcaccaccacagttccgcgaactccttgaatcgtaattccttaaccaacaggagaagccagatccatgcccctgctcctgcccccaacgacttggcaactacccctgaatccgtgcagttgcaggacagttgggtgctgaactccaacgtcccccttgaaactcgtcactttctcttcaaaacatcatctggtagcacacccctcttttcctcttcttccccgggctaccctctgacatcaggaactgtttatacacccccgcccaggctactgcctcgcaacactttctcacgcaaggccttcaagttgaaaaaaccctccaagtattgcagctggaaatgcgccgcactctccgcaatcgccgctgccttgctgctcgctatcctcctggcctactttattgccatgcatctcctcggcctaaattggcaattacagccagcagacggacacacattcaataatggaattcgaaccgggcttcctgggaacgacgacgttgctaccatgccctcgggcggtaaagtgccctggtccctgaagaattccagtatagacagtggcgaggccgaggtcgggcgacgcgtaacacaagaggtgccccccggcgtgttttggagaagccagattcatatttcccagccccagtttctcaagtttaacatctcccttggcaaagacgcactctttggagtttatatcaggagggggttaccaccaagtcacgcacagtatgatttcatggaacgtctggacgggaaggaaaagtggtccgtcgtcgagtcccctcgcgagaggcggtctatccagacgttggtgcaaaatgaggcggtgttcgtgcagtacctggacgtcggtttgtggcacttagccttctacaacgatgggaaggataaggagatggtgagtttcaacacagtcgttttagattctgttcaagattgccccaggaactgtcacggcaacggcgagtgcgtaagcggcgtgtgtcactgtttccccggatttctcggcgctgattgcgccaaagcagcttgtccagtattgtgtagtggaaatggacagtatagcaagggaacctgccagtgctacagcgggtggaaaggtgccgagtgtgacgtgccaatgaatcagtgcatagacccctcttgcggcggacatggttcctgcattgatggaaactgtgtgtgctccgctggatataagggggaacactgcgaagaagtcgattgcttggatccaacttgttcttcacatggggtgtgcgtaaacggggaatgcctgtgcagcccaggttggggcggtttgaactgtgaacttgcccgcgtacagtgccctgaccaatgttcagggcacggtacgtacctgccagacacaggcttgtgttcctgcgatccaaattggatgggccctgattgcagcgtggaggtgtgctccgttgattgcgggacacatggcgtgtgtatcggtggcgcatgccgttgtgaggaggggtggaccggagcggcttgcgaccagagggtgtgccatccacgctgtatcgaacacgggacttgcaaagatggcaagtgtgagtgccgggagggctggaacggagagcattgtacaatcgacggatgcccggatctctgtaatggaaacggtcggtgcacccttggtcagaactcatggcaatgcgtgtgccagaccggatggcgggggcccggttgcaacgtggccatggagacaagttgtgcggataacaaagataatgagggggacggcctggtggattgccttgacccagattgttgtctgcagtctgcctgtcagaatagtctcctgtgtagaggttccagagaccctctagacatcatacagcagggccagactgactggcccgcagtgaagtcattttacgacagaattaaactacttgctgggaaagattcaacccatattattcccggggagaatccctttaacagttcactggtctcccttatacggggtcaggtagtcacaactgatggtacacccctagtgggtgtcaatgtgtcgttcgttaagtaccctaagtatggatatactatcaccaggcaggacgggaccttcgacctgatcgccaatggaggcgcttcactgaccctgcatttcgagcgggctcccttcatgagccaggagaggaccgtctggttgccttggaacagtttctatgcgatggacacactggtgatgaagaccgaggaaaatagtatcccatcatgcgatctctctgggtttgtccgacccgaccctatcatcatttctagccccctgtcaacgtttttctccgccgcccccggccagaaccccatcgtccccgagacccaggtactacacgaggagatagagctgcccgggtccaacgtcaagttgcgctacctcagtagccgcacggccggctataaatcattgctaaagatcactatgactcagtcgacggttcccctcaaccttatccgcgtgcacctgatggtcgcggttgaaggtcatctgtttcagaaatcctttcaggcctcacccaaccttgcttatacatttatttgggataagactgacgcctacggacagcgcgtttatggcttgtccgacgcagtggtaagtgtgggatttgagtatgagacctgtcctagcctcattctgtgggagaagcggacagctttacttcagggctttgagttagacccgtcaaacctcggcggttggtcactggataaacaccacattctaaatgtgaaaagcgggatcctgcataagggcactggcgagaatcagtttctgacccagcaaccggcgattatcacaagcatcatgggcaatgggagacggagaagcataagctgcccttcatgcaatggattggccgaggggaacaaacttctcgctcccgttgcactggctgtgggaatcgatgggtccctctacgtcggagatttcaattacatccgtcgcatctttccctcacgcaatgtcacatcaattctagaactcaggaacaaggagtttaaacattccaataacccagctcacaagtactatctcgcagttgaccccgtctctggtagtctgtacgtgagtgataccaattctagacgtatctaccgggttaagtcactttcaggaaccaaggacctcgctggaaattccgaggtggtggccggtaccggggagcagtgcttaccctttgatgaggcaagatgtggtgacggcggcaaggcaattgacgctaccttaatgtcaccacggggaattgctgttgacaaaaatggccttatgtacttcgttgatgctaccatgattcggaaagttgaccagaatggtatcattagcaccctgttaggctccaacgatctaactgcagtccggccgctcagttgcgatagcagcatggatgtcgcgcaagtgcgtctggagtggccaacagacttggccgtcaacccgatggataattcattgtatgtcctcgaaaacaacgtgatcctgcgcattactgagaatcaccaagtgtccatcatcgccggccggcctatgcactgtcaggtgccggggattgattactcactcagcaagctggccattcattcagctctggagagtgcctccgccatagcgatcagccatacaggcgtgctttacataacagagacagacgagaagaaaattaatcgattgcggcaggtcaccaccaacggggaaatttgcctgcttgccggcgcggcgagcgactgtgactgtaaaaatgacgtgaactgtaactgttactccggtgacgacgcatatgccactgatgctatccttaattcgccgtcttcactcgctgtggcgcccgatgggacaatctatatcgccgaccttggaaatattcgcatacgcgctgtgtcaaagaataaaccggtcctgaacgcgtttaaccagtacgaggccgcttcccctggcgagcaagaactgtacgtctttaatgccgacggcattcaccagtacactgtgtccttggttacgggggaatatctgtacaactttacctattcaaccgacaatgacgttaccgagctgattgacaataatgggaatagtttaaagatcaggagagattcctctgggatgcccagacatttactgatgccagacaatcagattattaccctgaccgtcggaacaaacggcggcctgaaggtggtatctacacagaacctggagttgggcttgatgacttacgatggaaataccggactgctggccacaaaatccgacgagacggggtggactacgttttacgattatgaccatgagggtcgccttaccaacgtaaccaggcctactggcgtagtgacaagcctgcacagggaaatggagaaatcgatcaccattgatatcgaaaatagtaatagagatgatgacgtcaccgtgatcacaaatctgtcctctgtcgaggcttcatatacggtcgtgcaggatcaggtccggaacagctatcaactatgcaacaatggtacccttagagtcatgtatgccaatggaatggggatttctttccattctgagcctcatgttttggctggcactattactccaacaatcggtagatgtaacattagcctgcccatggaaaatggactgaacagtatcgaatggcgcctcagaaaagagcagatcaagggaaaggtcaccatttttggcagaaagctcagggtgcacgggaggaacctgctgtccattgattacgacagaaacatccgcaccgaaaaaatttatgacgatcaccgcaaatttaccctgcggattatttacgatcaggtgggtcgcccctttctctggctcccatcctctggcctggcagcagttaatgtgtcctatttctttaatgggagactggctgggttgcagcgtggtgcgatgagcgaacgcactgatatcgataaacaaggacggatcgtgtcaaggatgtttgcagacgggaaggtctggtcgtattcatatctcgacaagtcaatggtactcctcctgcaatcccagaggcaatacatttttgaatacgactcatcagaccgcctgttggctgttaccatgccctctgtggcgagacattcaatgagtacccacacatcaatcgggtatattcgcaacatttacaacccgcctgagagcaacgcctccgtcatctttgactattctgacgatggccggatcttgaagactagctttctgggaaccggacgccaagttttctacaagtatggcaaactctctaaattgtctgagattgtatacgactccacagcagtcacatttggctatgatgagactaccggggtcctgaagatggttaacctgcagagcggcgggttttcatgcaccatccgctatcgaaagattggcccacttgtggataagcagatctatagattctccgaggagggtatggtaaacgcacggttcgattacacttaccacgataattccttccggattgcatcaattaaaccagtgatttctgagacacccctcccagtggatctctaccgttatgatgaaatctctgggaaagtcgagcattttgggaagttcggagtgatctactacgatattaatcagatcattacaacagctgtgatgaccctcagcaaacattttgatacacacggaaggatcaaagaagtacagtacgagatgtttaggagcctgatgtactggatgacagtgcagtacgattcaatgggacgggttatcaaaagagaattgaaattgggtccatatgccaacacgacgaagtacacttatgactacgacggagatggacagcttcagtctgtggccgtcaacgatcgaccaacatggcggtacagttacgatctgaatgggaatctgcacctgctgaacccaggaaattcggtacgcctgatgccgctccgttacgatctgagggatcggattacaagactcggggatgtgcagtacaaaattgacgatgacggttatctctgccaaagaggatccgacatctttgaatacaacagtaagggtcttttgacccgcgcatataataaggccagtggttggagcgtccagtacagatatgacggcgtgggcagacgagcgtcctacaagacgaacctggggcaccacctgcaatacttttactccgatctacacaatcctactcgtatcacccacgtgtacaatcactctaactctgagattaccagcttgtattatgacctgcagggacatctgtttgccatggagtcatcttccggcgaggagtactacgtggccagtgacaacactggaactcctttggccgtgttctccattaacggactcatgatcaagcagctccagtacacagcctatggcgaaatttactatgactcaaatcctgactttcagatggtgatcgggttccatggcggtctttatgatcctttaactaaactggtccacttcactcagcgggactacgatgtcctggctggccgctggacaagccctgattacactatgtggaaaaatgtggggaaagagccagcaccgtttaacctctatatgtttaaatccaacaaccctttgtctagtgagctggatctcaagaattatgtaactgacgtgaagtcctggttggtcatgtttggttttcagctgagcaatattatacccgggtttccaagggctaaaatgtatttcgttcctcccccttacgaattgtcagagagccaggcaagcgaaaacggccagcttataacgggagtacagcaaacaaccgagagacataaccaggcgttcatggccctggaagggcaggtgattacgaaaaagctgcacgcaagcatacgagagaaagcgggccattggtttgccacaacaacaccaataatcggaaagggcatcatgtttgcaattaaagaaggcagagtgacgactggggtgagctcaatcgcgagcgaagactcacgcaaagttgcatcagtgcttaacaatgcctactacttggacaagatgcattattccatagagggtaaagatacccactacttcgtaaagataggaagtgccgacggtgatttggttactttgggcaccactattgggagaaaagtcctggaaagcggcgtgaatgttacagtgagtcagcctactctgctggttaatgggcgcactcggaggtttaccaacatcgaatttcagtactcaacactgctcttatcaatcaggtacggtttgacaccagacacgcttgatgaggaaaaggccagggtgttggaccaggcccgccaacgggcattgggaaccgcatgggccaaggagcagcagaaggcgagggatggaagggaagggtcacggttgtggactgagggggagaagcagcaactgctgtcaacaggcagggtgcagggctatgaagggtactacgtgctgcccgtagaacagtaccccgagctcgctgactctagctccaatatccaatttctgcgccagaacgagatggggaagaggtag

SEQ ID NO: 43687 - DNA, 8325 bp, Artificial Sequence
  derived and/or modified sequence
atggacgtgaaggaccggcggcaccggagcctgacccggggccggtgcgggaaggaatgtcgctacacttcctctagccttgattccgaagattgccgggttcccacccagaaaagttactcatcctccgaaaccttgaaagcttatgatcatgacagcagaatgcactacggcaacagagttaccgatttgatccaccgcgagagtgatgagttcccccggcaagggacgaattttacattggccgagctgggtatttgcgagccttcgcctcatcgaagtggatattgcagtgacatgggaatactgcaccaggggtattccctatcgaccggctctgatgcagacagtgataccgagggtggcatgagccccgagcatgccataaggctgtggggtagggggatcaagagcagaagatcctctggtttgtctagtcgagagaactccgccctgacccttacagatagtgacaatgagaacaaaagtgatgacgagaacggaagacccattccccccacttcatcgcctagcctcctgcccagcgcccagcttccatccagccataacccaccccccgtttcctgtcaaatgccactgctggattcgaacacaagtcatcagatcatggacaccaaccccgatgaagaattcagtccaaatagctaccttttgagggcatgcagcggacctcagcaggctagcagttccgggccgcctaaccaccacagccagagtactctgaggccccccctcccgcccccgcacaatcataccctcagtcatcatcactccagtgctaacagtctgaaccgcaactctttgaccaatagaaggtcccaaatccacgcaccagcgccagctcctaatgatctggctacaacacctgagtcggtacagctacaggatagctgggtgcttaattccaatgtaccattggagactcgccacttcctgtttaagacctctagcggctccactccgcttttttctagctccagcccaggctatccattgaccagcggcacggtgtatacacctccacccagactcctgccacggaatactttctctcggaaagcgttcaagctgaaaaagccttctaaatactgttcctggaagtgtgcagctctgagcgctattgcagccgcccttttattggcaattctcctggcatatttcattgccatgcacttgttaggactgaactggcagctgcagccagctgacggccacactttcaataacggaattcgtacaggcttacctggcaacgacgatgtagctacaatgccttctggggggaaagtcccctggtccctgaaaaactccagcattgattcaggcgaagcagaggtgggaagacgagtgacccaggaggtgccacctggagttttttggcggtcccagatccacatatctcagccgcagtttctcaagttcaacatttccctcggaaaagatgccttgtttggagtttacatccggcggggactgcccccctcacatgcccagtacgattttatggagagactggacggcaaggaaaaatggagcgtggtggagagtcccagggagagaagatctatccagacattggtgcagaatgaagccgtctttgtgcaatacctggatgtcggcctttggcaccttgccttttacaacgatggcaaggataaggagatggtgtcatttaacacggtggtgctggactccgtgcaggactgccctcgtaactgccacggcaacggagagtgcgtctcgggcgtctgccactgcttcccaggattcttgggtgcggattgtgccaaagctgcctgcccagtgctatgttcaggaaacggacagtattccaaggggacctgccagtgctatagcggttggaaaggcgcggaatgtgatgtacctatgaatcagtgcatcgaccccagttgtggcggccacggatcatgcattgacggaaattgcgtgtgcagtgccggttacaaaggagagcattgtgaggaagtggactgcctcgacccgacatgttcatcccatggcgtgtgtgtgaatggggaatgtctctgttccccgggctggggcggcctcaactgtgagctagctcgcgtgcagtgtcctgatcagtgtagtggtcacggaacatatttacccgacaccggactgtgcagctgtgacccaaactggatggggcctgattgctctgtcgaggtgtgctccgttgattgtggaactcacggcgtgtgcatcgggggagcgtgccgatgtgaggagggctggactggcgcggcctgcgaccagcgcgtgtgtcatccccgttgtatagaacacggcacctgcaaggacggcaaatgtgagtgtagagaaggatggaatggcgaacactgcaccatcgggcggcagaccgctggaactgaaactgatgggtgtccggacttgtgtaacggcaatggacggtgcaccctgggtcagaattcttggcagtgcgtgtgccaaaccgggtggagaggccctggctgtaacgtggcgatggaaacaagctgcgccgacaataaggacaatgagggagacggactcgtggattgtttggatcccgattgttgtttgcagagtgcttgccagaactcactgttatgccgaggatcccgagacccgctcgacattattcagcagggacagacagactggcctgccgtcaagtctttctatgatcggatcaaacttctggctggtaaagattccacccacatcattcccggagagaacccatttaacagtagcttagtgtcactgatccgcgggcaggtggtcactacggatggcacacccttggtgggcgtgaacgtatccttcgtgaaatacccaaaatatggatacacaataacccgacaagatggtacctttgatcttattgcaaacgggggagcatcacttactctccacttcgaaagggccccatttatgtcccaggagcggaccgtatggctcccttggaattcattttatgcaatggacactctagtgatgaaaaccgaggagaactctatcccctcatgtgatctgtccggatttgttagacctgacccaattatcattagttcccctctatccaccttctttagtgcagccccaggccagaatcccatcgttcccgagactcaggtccttcacgaggaaatagagctgcccggttccaacgtgaagctgcggtatttgtcctcccggacagcgggctataagtctcttctgaagataactatgactcagtctactgttcccttgaatcttatacgtgtgcacttgatggtggcagtggaaggacacttatttcagaagtctttccaggctagtcctaatttggcttacacctttatatgggataagacagacgcatacggccagcgagtatatgggctgagcgacgctgtagtatccgtgggcttcgaatatgagacctgtcctagcctaatcctgtgggaaaagcgcactgctctcttgcagggctttgagctggaccccagcaacctcggcgggtggtctttggataaacatcacatcctaaatgtgaagtccgggattctccacaagggcaccggcgagaatcagttcctcactcaacagcccgcgatcatcacctcaattatgggaaatggccgccgccgctccatcagctgcccaagttgcaacgggctggctgagggaaacaagttactggcacccgtggcgctggcagtcggcatcgacgggagcctttacgtcggagactttaattacattaggcgcatttttccctctcgcaacgtgaccagcatcttggagctcagaaataaggaattcaagcactctaacaaccccgcccacaaatactacctcgctgtagatcccgtgtcaggaagtctgtacgtgagcgatacgaactctcgacgtatttatcgggtcaagtcgttgtcagggacaaaggacttagcaggcaatagcgaggtcgtcgctggaaccggggagcaatgtctcccattcgacgaggctagatgcggcgatggcggtaaggctattgatgccaccctgatgtcaccgagagggattgccgtcgacaagaacgggctgatgtattttgtggatgctaccatgatccggaaagtggatcagaatggcatcataagtactctcctggggtccaacgaccttaccgcggttcggcctctgtcctgcgattcgagcatggacgtagcccaggtgagactagagtggccaacggatttggctgtgaaccccatggacaattcactttatgtactcgaaaacaacgtcattctgcgaatcaccgagaaccaccaagttagcataatcgccggacgaccgatgcattgccaggtaccaggtatcgattacagtctttcgaaactcgccattcacagcgccctagaatccgccagtgctattgcaatttcacacactggcgtcctgtacatcacagaaacagatgagaagaaaatcaaccgcctgcgacaagtgacgacaaatggcgaaatttgtcttcttgccggagcagcttcagactgcgactgtaaaaatgatgtcaattgcaactgttactcaggcgacgacgcttatgccaccgacgctatcctgaatagccctagcagcctggcagtggctccagatggcaccatttatatcgcagatttagggaacattcggatcagagcagtctcgaagaacaaacctgtactaaacgcttttaatcaatacgaggcagcttctcccggtgaacaagaactctacgttttcaacgctgatggcatacatcagtacactgtttcactagttacgggcgaatatctatacaatttcacatattcaaccgataatgacgtgactgaactaattgataataacggcaatagtctgaagatccggcgggattctagcggaatgccacggcacctcttgatgccagataaccagataatcaccctgacagttggcaccaatggcggcctgaaggttgtatcaacccaaaacctggagttaggcttaatgacatatgacggcaatacgggattgctcgcaacaaagtcggatgagaccgggtggactacattctacgattatgaccatgaggggcgactcactaacgtgactcgcccaacaggcgtcgtcacctctctgcaccgggaaatggaaaagtctatcacaatcgatattgaaaacagcaacagagatgacgacgtgacagtgataacaaatctcagttctgttgaggcttcatacacggttgtccaagaccaagttcgaaacagctatcaattgtgcaacaatgggaccctaagggtcatgtacgctaacggaatgggaatttcatttcactccgaacctcacgtgctagccgggaccattacacccacaattggcaggtgcaatatctctttgccaatggaaaatgggctgaatagtatcgagtggcggttgaggaaagagcaaatcaagggcaaagtaaccattttcggacggaagttgcgggtccatgggcgcaacctcttatctatcgactatgaccgcaacatacgcactgaaaagatttacgacgaccatagaaagttcacacttcggattatttatgatcaggtgggaagaccgttcctgtggctgccatccagtggcctggccgctgttaatgtgtcgtacttctttaacggccggctggccgggttgcagcgcggcgccatgagcgaaaggaccgatatcgacaaacaaggacggatagtgtctcggatgtttgccgatgggaaggtatggagctacagctacctagataagagtatggtcctcctgctccaatctcaacgtcagtatatctttgagtatgattcctccgatcgtcttttggcggtgactatgccatcagtcgcacgccattcaatgtcgacacacacaagtataggatacatcagaaacatttataatccacctgagagtaatgcctccgtgatttttgactactctgatgatggccgaattctgaaaacaagcttcctcgggacgggccgccaggtcttctataaatacggaaaactgtccaagttgagtgagattgtttatgactctactgcggttacatttggttacgatgagaccaccggcgtgctcaaaatggtgaacctgcagagtggtgggtttagctgcacaattcggtacaggaagataggaccattggtggacaaacaaatctatcgcttcagcgaggagggtatggtcaacgcccgcttcgactacacctaccatgacaatagtttcagaatagcatcaatcaagccagttatctcagagactccactacccgttgatttgtatcgctacgatgagatctccgggaaggtggaacacttcgggaagtttggggtcatatactatgacatcaaccagatcataaccacagcagtgatgacactgtctaagcactttgacacacacggccgtatcaaggaagtccagtatgaaatgttccgatcactgatgtattggatgactgtgcagtatgacagtatgggacgggtgatcaaacgcgagctgaaactgggaccatacgctaacaccacgaagtatacatacgactacgacggcgacggccaattacaatccgtggctgtgaacgatcgtcccacatggcgatacagttacgatctgaacggtaacttgcatttgttgaacccaggtaattccgtccggctcatgccgctccgctatgaccttcgcgacaggattacacggctcggcgacgtccagtacaaaattgatgatgacggttatctatgtcagagaggaagcgatattttcgagtacaatagcaaaggactactgacccgagcctataataaggcctcgggctggagcgtgcaataccggtacgacggagtcggtaggcgggcatcatacaagactaaccttgggcatcacctccagtatttctacagcgaccttcacaacccgacccggatcactcatgtctacaaccattctaactccgaaatcacttccctgtattacgacctgcagggtcacttattcgctatggaaagcagttctggggaagagtattacgttgcttctgacaatactgggaccccactagcggtcttttccatcaacgggttaatgatcaagcagctgcaatataccgcgtatggagaaatttattacgacagcaatcctgactttcagatggtgattggatttcatggaggattatacgacccactgacaaagcttgtgcattttacacaacgagattatgatgtcctggccggaagatggacatctcccgactatactatgtggaagaacgtgggcaaggagcctgctcctttcaacctgtatatgttcaagtccaataatccactatcttccgagctcgacctgaagaactacgttaccgatgtgaaaagttggcttgtgatgtttggattccagctgagtaatattatccctggattcccccgagctaaaatgtactttgtgcccccgccttacgaactgagcgagagccaggcctccgagaatggccagcttatcaccggggttcaacagaccacagaaaggcacaatcaggcattcatggcactcgaaggtcaggtcataacgaaaaaactgcacgcttccatcagagaaaaagcgggacactggtttgcaaccacaacaccaatcataggtaaaggtataatgttcgcaatcaaagaggggagagtgacaactggtgtttcctcaatagcatccgaagactcaaggaaggtcgcttctgtgctcaacaacgcctactatctcgacaagatgcactattccatcgaaggaaaggatactcactactttgtgaagattggtagcgccgatggtgatctggttaccttagggacaaccatcggccggaaagtactggaaagcggagttaacgtcaccgtatcccagcccaccttgctagtcaacggcaggacgcggcggttcaccaacattgagtttcagtactcaacactgctcctctccatcaggtacggactcactccagatactttagatgaggagaaggcccgcgtgctggaccaagcacgccagagagccctgggtaccgcttgggctaaggaacaacagaaggcacgcgacgggagggaaggatcaaggctgtggaccgagggcgagaagcagcaactgctaagcaccggccgtgtgcaggggtatgagggatattatgtgctccccgtggaacaataccccgagctcgccgactcttcatctaatatccaattcctccgtcagaatgaaatgggtaaacgctag

SEQ ID NO: 43688 - DNA, 8322 bp, Artificial Sequence
  derived and/or modified sequence
atggacgtgaaggaccggcggcaccggagcctgacccggggccggtgtgggaaagagtgccggtacacttcctcctccctggactccgaggactgtagggtcccaacccagaagtcctatagttccagcgaaacgttgaaggcctatgaccacgattcgagaatgcattacggtaaccgggtgaccgacctgattcaccgagaatctgatgagttcccccggcaaggtacaaatttcaccctggccgaactgggcatctgtgaaccgtctccccaccgttccggctattgctcagacatgggaattctgcatcaggggtactccctgagcactggaagtgatgcagacagtgacactgaaggaggcatgtcaccggagcacgccataagactatggggtcgtggcatcaagtcgagacgatcatctgggctgtcaagtagggagaatagtgccctgacacttacggattccgacaatgaaaataaatcagacgatgaaaacggccgtcccatccctcctacaagtagcccatcgctcttgcctagtgcacaactgcctagtagtcataaccctcctcctgtctcctgccagatgcctctattggatagcaatacatcacaccagatcatggatacaaacccagacgaggaattttccccgaactcctatctgcttcgagcctgtagcggtcctcagcaggcatcctcttcagggcccccaaatcaccactcccagagtactctccgcccacccctgccgccaccccacaaccacacactgtcacatcaccacagtagcgcaaacagcctaaatcggaactccctcactaatcgaaggtcacagatacacgctcccgctcccgctccgaatgacctcgctacaaccccggaatcagtgcaactgcaagatagttgggtgctgaacagcaacgtccccctggagactcggcactttctattcaaaacatcatcagggagtacgcctttgttctcgtcgagtagccctggctatcctcttacttcagggaccgtctacacaccaccccccagacttctcccaaggaatacattttcccgcaaagcttttaaattaaaaaagcctagcaaatactgtagctggaagtgcgccgcactgtctgccatcgctgccgctttactccttgctattcttttggcctactttatcgccatgcatcttctagggctcaactggcagctccagcccgcagacgggcacacgttcaacaacgggattcgtaccgggctgcccggaaatgatgacgtggctaccatgccttcaggcggcaaagttccctggtcattaaaaaatagctccatcgactctggagaggccgaggtgggtcgccgagtaacccaagaggtgccacctggggttttttggcgatcgcagatccacatctcccagccacaattcctcaagtttaatatttctttgggaaaggatgcactatttggggtttatattaggcgcggcctgccccctagtcatgcccagtacgattttatggaaagactggacggtaaagagaagtggtccgttgtggagagccctcgggaaaggcgctccatccaaacgctggttcagaatgaggcggtatttgtccagtatcttgatgtgggactttggcatttagccttttacaatgacggcaaagacaaagagatggtgagctttaatactgtggtgctagacagcgtgcaggactgcccccggaattgtcatgggaatggcgaatgtgtgagcggcgtgtgtcattgctttcccggctttcttggcgcggactgcgccaaggcagcctgccctgttctctgtagcggtaatggccagtattcgaaggggacatgccagtgctactcaggatggaaaggagcggagtgtgacgtccccatgaaccaatgcatcgacccatcgtgtgggggccatggaagctgtatcgatggtaactgcgtttgtagtgccggatataagggtgagcactgcgaggaagtcgattgcctcgatccaacatgctccagccatggagtttgcgtcaatggtgagtgcctgtgctcacccggatggggtggactgaactgtgagctcgcccgcgtgcagtgtcccgaccagtgctcgggccacgggacatatctgcctgatacaggcctgtgttcctgcgatcccaactggatgggcccagattgctccgtggaagtttgttccgtagattgtgggactcacggggtgtgtattggtggagcttgtcgctgcgaagaaggatggacaggggccgcctgcgaccaaagggtgtgtcaccctcgatgcattgagcacggaacatgcaaagacgggaagtgtgagtgcagggaaggatggaatggagagcactgcaccattgtccgtgaaaccattgggggtgagtgctacggttgccccgacctctgtaatgggaatgggagatgcactttgggacagaattcttggcagtgtgtgtgccagactggatggagggggcccggctgcaatgtggcaatggaaacatcctgcgccgataataaggataatgaaggtgacgggctggttgactgcctcgacccagactgctgccttcaatctgcctgtcaaaactcgttattgtgtcgcggaagtagggaccctttagatattatccagcagggccagactgattggccagccgtaaagtccttttatgatcgaataaagctcttggccggaaaagatagtacccacataattcccggagaaaacccattcaatagctcgctcgtctccctgatacggggccaggttgtgacaactgacggaacccccctggtcggcgtcaacgtaagctttgtgaagtaccctaaatatggctacactatcacccgtcaggacggcaccttcgacctgatcgccaacgggggggccagtcttactctgcactttgaaagggcgccgttcatgtcacaggagcggaccgtttggctgccatggaatagcttctatgcaatggacacactggtgatgaaaactgaggaaaacagcatcccttcctgcgacctctcaggatttgtgcgaccagatcctatcataatcagctctccactgtctacattcttctccgcagccccaggacagaaccccatagtgccggagacgcaagtgctgcacgaagagatagagcttccagggagcaacgtcaagctcaggtacctatcctcccgcacggctggctacaagtccctgctgaagattactatgacacagtccacggttccgttaaacctgatacgtgtccacttgatggtcgcagtggagggccaccttttccaaaagagcttccaggcgagcccaaacttagcctatacctttatttgggataagaccgacgcctacggtcagcgggtctacggattgtccgacgctgtggtgagtgtcggattcgaatacgaaacatgcccatctttgatcctctgggagaagcgaacagcgctactacagggatttgagctggatcccagcaatttgggaggatggagcctggacaaacaccacatcctaaatgtgaaaagcggcatcctgcataaggggacaggcgaaaatcagttccttacacagcagccagcaatcataacatcaatcatggggaacggccgcaggcggagcattagttgtccatcctgtaatggtcttgctgagggtaacaaacttctggctcccgtggctctcgccgtcggcattgatgggagcctttacgtcggggatttcaattatatccgacgtatctttccatccagaaatgtgacatccatcctcgagcttagaaataaggaatttcacaataataaccctgcgcataaatattacctggcagtggaccccgtctctgggagcctttatgtctccgacacgaatagtcggagaatttatcgggtaaagtccttgtccggcactaaagacctcgcgggaaactccgaagtggtggccgggacaggcgagcagtgtctgccttttgatgaggcaagatgcggcgacggaggaaaggccatcgatgccacactgatgagcccccggggtatcgctgtcgataaaaacggactgatgtattttgtggacgctaccatgatcagaaaggtagaccagaacggtattataagtacactgcttgggagcaatgacctgacagcagtgcgacccctcagctgcgattcgagtatggatgtcgcccaggtgaggctggagtggccgactgatctcgcagtgaatcccatggataattcattgtacgtgcttgaaaataatgtgattctcaggatcacagaaaatcatcaggtgtctattatcgccggacgcccaatgcactgccaggttccaggcattgattattcactcagcaaactggccatccacagcgccctggagagcgcctccgccatagctatctcacacacaggggtcctttatatcacagagaccgacgagaagaagatcaatagattgagacaggtaaccactaacggggagatctgtctgttggccggggccgcgtctgactgcgactgcaaaaatgatgtgaattgtaattgctattccggcgatgacgcatatgccacagacgctatcttaaactcaccaagctctctggccgtggcacctgatggcacaatttacatcgctgatcttggaaatattcggattagagccgtctccaaaaataagcccgtcctgaatgctttcaaccagtatgaagctgcttcacctggcgagcaggagttatacgtgtttaatgccgacgggatccaccagtacaccgtgagcctggtcaccggggagtatctctacaacttcacttatagtaccgataatgacgtcactgagctcattgataataatggcaattcactcaagattagacgagacagttccggaatgcccaggcacttgctgatgccagacaatcaaatcatcactctgaccgtcggtaccaacggagggctaaaggtggtgagcactcagaacttagagcttgggctgatgacttatgacggaaatactggcctcctcgctactaagtcagacgagaccgggtggacaactttttacgattacgaccacgagggtagacttaccaatgtgactcgacccactggcgtcgtaacatccctgcaccgagaaatggagaagtccatcaccatagatatcgagaactcaaaccgggacgatgacgtgacggtcatcacaaatctgtccagcgtggaggcttcatataccgtggtacaggatcaggtaaggaattcctaccagctctgcaacaacggcactttgagggtcatgtacgccaatggaatggggatcagcttccacagtgaaccgcatgtccttgccggaaccatcacaccgacgattgggagatgcaacattagcctccctatggagaacgggttaaattccatcgaatggcgtctcagaaaggaacagattaaggggaaggtgactattttcggccggaaactacgagtccacggccgcaaccttttgagtatcgattatgacagaaatatccgtaccgagaagatttacgatgaccaccgcaagttcaccctgcgcatcatttacgaccaggtcgggaggccttttctgtggctgcctagttctggcttagcagctgtgaatgtttcctatttctttaacgggcggttggccggactccagcgcggagccatgagcgaacgaaccgacatcgacaaacaggggagaatagtttcgcggatgtttgccgacgggaaagtgtggtcatacagctatctcgacaagagcatggtactgctgctgcagtctcagagacagtatatcttcgagtacgactcttctgatcgccttttggctgttacaatgccgtctgtagcaaggcattcaatgagtactcacacttctattggctacatcagaaacatctataatccaccggaatcgaatgcttccgtgattttcgactactcggacgacgggcggatcctgaaaacgtcttttctgggaacaggccgtcaggttttttacaaatacggaaaactgtccaaattaagtgagattgtatacgattcaacagcagtcacatttggatacgacgaaaccaccggcgtgctaaagatggtcaatcttcagtctgggggtttcagctgcactattcgctatcgcaaaatagggcccttagtggataagcagatttatcgcttctcagaggaggggatggtcaatgcccgctttgactacacttatcatgacaattccttccgtattgcctcaatcaagcccgtgatcagcgaaacacctctcccagtggacctctatcggtacgacgagatctcaggcaaagtggaacatttcggcaagttcggtgttatttattatgatattaatcaaatcattacaaccgcggtgatgaccctatctaaacattttgacacccacgggagaatcaaagaggtccaatacgagatgttccgttccctcatgtactggatgacagtccagtacgacagtatgggaagagtgatcaagagagagctgaagctaggcccctacgctaatactaccaaatacacatatgactacgacggggacggccaacttcagtctgtcgctgtgaacgatagacctacctggcgctactcttatgacctgaacgggaaccttcatctgctgaaccctggtaatagcgtgcgcctgatgcctctccggtacgacttacgggaccgcatcacgcggctgggagacgtgcagtacaagattgacgatgatggctatctgtgccagcggggttctgacattttcgaatacaactccaagggactcttgaccagagcatataacaaggcatcaggctggtcagtacagtatcgttacgacggcgtcggcaggagagcctcttacaaaaccaatctagggcaccatctccagtacttctatagcgacctccacaaccctacacggatcactcatgtctataaccactccaattccgaaatcactagcctatactacgatctccaagggcacctgttcgctatggagtctagtagtggggaagaatactacgttgcttctgataatacaggaacccccctcgccgtgttttctattaatggtctgatgattaagcagctgcaatacacggcatatggggaaatctattacgattctaatcccgatttccagatggtgattggattccacggcggcctttacgaccccctgaccaagctggtccacttcacacagcgtgactatgacgtcctcgcaggcagatggactagtccggactacacaatgtggaagaacgtcggcaaggagcctgcaccttttaacctctacatgtttaagtccaataatcccctgtcatccgagctggacttgaagaattatgtgacggatgtgaagagttggctggtcatgtttggcttccaattgagtaatataattccgggtttcccacgggctaagatgtatttcgtgccacctccttacgaactgagcgagtcccaggccagtgagaacggacagctcatcaccggtgtccagcagactaccgagaggcacaatcaggcgtttatggcattggagggccaggtgatcactaagaaattgcatgccagcataagagaaaaggccggacactggtttgctaccacaacaccaattattggaaagggcattatgtttgcaatcaaagaggggagggtgaccacaggcgtatcctcgatcgcaagcgaagatagccggaaagtggctagcgtgctcaacaatgcttactacctggataaaatgcactattccatcgaggggaaggacactcactactttgtcaagatcggatctgcagacggagatctggtaaccttaggtacaacaattgggaggaaagttctcgagagcggcgtcaatgtgaccgtaagccagcctacactgcttgtgaatgggcgaaccagaagattcaccaacatcgagttccagtactctacacttctgctgagtatacgttatggactgacccctgacaccctggacgaggagaaggcccgggtgctagaccaggcacggcagcgtgccttgggcaccgcatgggccaaagagcaacagaaggcaagggacggccgggagggttcacgcctgtggaccgagggagaaaaacagcagctcttatctacggggagagttcagggttatgaaggctactatgtactgccagtggagcagtaccccgagctggccgactctagctctaacattcagtttcttcgacagaacgagatgggcaagcggtag

SEQ ID NO: 43689 - DNA, 7796 bp, Artificial Sequence
  derived and/or modified sequence
ggcaggcccataccccctacctcaagcccgtcccttcttcctagcgcacaacttccctcttctcataaccccccacctgtctcgtgtcagatgcccctcctggactcgaacacctcacaccagattatggacacaaaccccgacgaagagttcagccccaactcgtatcttctgcgagcgtgcagcggtccacagcaggcaagcagttctggacctcccaatcatcactcccaaagtacccttcgacccccactacctccccctcacaatcataccctgtcccaccaccattcaagcgccaactccctcaatagaaatagcttgactaatcgtagatctcaaatccatgccccagccccagcccctaatgacctggctactacacctgagagcgttcagctgcaggatagttgggtgctcaactctaatgtccctctggagaccaggcatttcttgttcaagacttcctccggcagtacccctctgttctcgtcttccagtcctggctatcccctcacatctggcacagtgtatacaccccctcccagactgctcccacggaacacattctcacgaaaggcattcaaacttaaaaaaccaagcaaatactgctcctggaagtgtgcagccctgagtgctatcgctgctgccctgctactggccatcctgctggcttacttcatcgcgatgcacttactgggcctaaattggcagttgcaaccagcagatggccatacttttaataacgggattagaaccggactccctggcaatgacgacgtagctacgatgccctcaggaggcaaagtcccgtggagtctgaagaatagttctatcgatagcggggaagccgaagttggaagaagagtaacccaggaagtgccacccggagtcttctggagatcacagatccacattagccaacctcagttcctgaaatttaatatctctctgggcaaggacgctctgttcggcgtgtatataagacggggtcttccaccctcccacgcccagtacgacttcatggagaggctagacgggaaggagaaatggagcgtggtagaatcaccgagggaacgaagaagtatccagactttggtgcagaacgaggcagttttcgttcagtacctcgatgtcggcctgtggcacctggcattctataatgacgggaaggataaagaaatggtgtcattcaacacagttgtcttagactcagtccaagattgtccccgtaattgccacggcaatggagagtgtgtctccggagtctgccactgttttcccggattcctgggggcagattgcgcaaaagctgcctgtccggtcttgtgcagcggaaatggccagtatagcaagggcacttgccagtgctactcagggtggaagggtgccgagtgcgacgtgcctatgaaccagtgcattgacccctcctgcggcggtcacggatcgtgcatcgatgggaactgtgtgtgcagtgccggatacaagggggaacattgtgaggaagtggactgcttggaccccacatgttccagccacggagtttgtgtgaacggagagtgtttatgttcccctgggtggggaggtctgaactgtgaactggcacgtgtgcaatgccctgaccagtgttcagggcacggaacctacctgccagatacaggactgtgttcctgcgatcctaactggatgggtccagactgctcagttgaagtctgttccgttgactgcggcacgcacggcgtctgcataggcggtgcttgtagatgtgaggagggatggacaggagccgcatgcgatcagcgggtctgtcatccccgatgtatcgagcacggcacctgcaaggacgggaaatgcgagtgtagagaaggatggaatggagagcactgcaccatagacggctgccctgacctgtgcaacggaaacggtcggtgcaccctcggccagaactcgtggcagtgtgtctgccagactggctggagagggccaggatgcaacgtggccatggaaactagctgtgctgacaataaggacaacgagggtgatgggctggttgattgcctggacccagattgctgtctacaatctgcctgccagaattctctgttatgccgcggaagtcgggatcccctcgatatcattcagcaaggacagacggactggcccgcagtcaagtctttttacgatcgtattaaactcctagcaggcaaagacagcactcacattatccctggggagaacccattcaacagttcattggtgtccctgattcgcggacaagtcgtcaccactgatggaacaccactcgtcggcgttaacgtgtcctttgtgaaatacccaaagtacggctacacgattactaggcaagacgggactttcgatcttattgccaacggaggtgcaagcctcaccctccactttgaacgagcccctttcatgtcccaggaaaggaccgtgtggctgccatggaatagcttttacgccatggacacgttagtgatgaaaaccgaagaaaacagcataccttcatgtgaccttagtgggtttgttagacccgatccaattataattagctcccccctgtccacgttctttagcgcagcccctggacagaatcccattgtgcccgaaacccaggttttacacgaggaaatagaactccccggaagcaatgtcaagctccggtatctgagtagccgtaccgcaggctataaaagccttttaaagatcaccatgacccagtctacggtccctcttaatctcatccgagttcacttgatggtggccgttgaaggtcatctcttccagaagtccttccaagcctccccaaacctggcatacactttcatctgggacaagaccgacgcttatggccagcgagtgtacggcctgtccgatgctgttgttagtgtgggctttgaatatgaaacgtgccctagtcttatcctgtgggaaaagcgcactgccttattgcagggcttcgaactggacccaagtaatttagggggatggtccctggacaaacaccacatactgaacgtgaagtccggtatcctgcacaaggggacgggcgaaaatcagttccttacccaacagccggcaatcattactagcattatggggaatggtagacggcgaagcattagttgtccatcttgtaatgggttagctgaaggcaataaattgctggcacctgtcgcattagccgttggcatagacggctcgctgtacgtcggagatttcaactacattagacgtatctttcccagcaggaatgtaacatctattctggagttgcggaacaaggagtttaaacactccaataatcccgctcacaaatattatttagctgtagaccccgtcagtgggtcactgtacgtgtccgataccaacagccgccgaatttatcgggtcaagtccttgtctggaactaaagacctggcaggaaattctgaagtggtggccggtactggagaacagtgtcttcccttcgatgaggccagatgcggagacgggggaaaggctatcgacgctacactgatgagcccaagaggcatcgcagtagataagaatggcctgatgtacttcgtggatgccacaatgatccggaaagtggaccagaacggcatcatttcaacgttgctcggttctaacgatctgaccgccgtgcggccactgtcttgcgacagtagcatggacgtagcccaagtgaggctggaatggcccaccgatctcgctgtgaatccgatggataattcattgtatgtgctggagaataatgtgattttgagaataacagaaaaccaccaggtgagcattatcgccggtcggccaatgcactgtcaggtcccaggaatcgattattccctgtctaaacttgcaatccactccgccctcgagagtgcctccgctatagccatcagtcataccggtgtgctgtacatcaccgagaccgatgagaagaagataaaccgattgagacaagtaacaactaatggtgaaatctgcttgttagctggcgctgcgtccgattgtgattgcaaaaatgacgtcaactgtaactgctactctggtgacgacgcctatgcaactgatgcgatcctgaattctcctagttctcttgctgtcgcacccgacggaaccatatacatagccgatctggggaacatacgaattagagccgtttctaagaataagccagtgctcaacgctttcaatcaatacgaggcggcatcgccaggggaacaagaattgtatgtcttcaatgccgacggaatccaccagtataccgtttcactggtgactggagaatatttatacaattttacctactccacagataacgatgtgacagaactcattgacaataatggcaactccttaaaaatccggagggatagcagtgggatgcctcgacacctgttgatgcccgacaaccagatcattactcttaccgtcggaaccaatggcggactcaaagtagtatctacacagaacctggagctcggactgatgacctatgatggcaacaccgggcttctggcaaccaaatcagatgagaccggatggacaacgttctacgactatgaccacgaggggcgactgacaaacgtcacccgtccgaccggagttgtgactagcttgcaccgcgaaatggagaagtccatcaccattgacatcgagaatagcaaccgcgacgacgatgtgacggtcattacgaacttgagcagcgtagaggctagctacaccgtggtgcaggaccaggtgcgcaacagctaccagctgtgcaataatggcaccctgcgcgtcatgtacgccaatggaatgggaatcagctttcattcagagccgcacgtgctggccggaaccatcacacctacaattggacggtgtaatatctccctcccgatggaaaatggactcaactctatcgagtggaggctgcgaaaggagcagattaaggggaaggtaaccatcttcggtcgaaagcttcgggttcacggacgcaatctcttaagtattgattatgatcgaaacattaggaccgagaagatctacgacgatcatagaaaattcacccttaggattatctacgatcaggtgggtcggccattcttgtggctcccttcttcaggcctggcagcggtcaacgtttcctatttcttcaatggaaggctggcgggattgcagagaggagcaatgagcgaacggactgatattgataagcaggggaggatcgttagccggatgttcgccgatggaaaggtgtggtcatactcctaccttgacaagtccatggtactactgctacagagccaacggcagtacatttttgaatatgactcatccgatcggttactcgccgtaacaatgccaagcgtggccagacactcaatgtctacccatacgagtatcggctatatcagaaacatctacaacccgccagagagcaatgcatcagtgatcttcgactacagtgacgacggacgcattctgaaaacctctttcttggggaccggcagacaggttttttataagtatggaaaactgagcaaactatccgaaatcgtgtacgactctactgctgtgacgtttggctatgacgagacaaccggcgttctgaagatggtcaacctgcagtctggtggtttctcctgtacgattagataccgcaaaatcggcccactagtggataagcaaatctatagattctccgaagagggtatggtgaatgctaggttcgactacacgtaccacgacaatagcttccggatcgccagtatcaaacccgtaatttcggagacacccctgcctgtagatctgtataggtacgatgagatcagcggcaaggtcgaacatttcggcaagtttggcgtcatatactacgacattaatcagattataaccaccgccgtgatgacactcagcaagcacttcgatacccacgggcgaatcaaagaagtgcagtatgaaatgttccggtcactcatgtattggatgacagtgcaatatgatagtatgggacgggtcatcaagcgggaactgaagctcgggccttatgctaatactaccaaatatacgtacgactatgatggtgacgggcaactgcagtctgtcgccgtgaacgaccgccctacctggcgctactcctacgatctgaacggtaatctgcatctgctgaaccccggtaactccgtaagactaatgcctttgagatatgatctgagagatcggattacccgcctgggggatgtccaatacaagattgacgacgacggatacctctgtcagaggggttcagatatattcgagtacaacagtaagggactgctgaccagggcgtacaacaaggcatccgggtggtctgtgcaataccgatatgatggcgtcggccgtcgggcaagctacaagacaaatcttgggcatcacttgcagtatttctattccgacttacacaatcccacccggatcactcatgtctacaatcactctaactctgagataacctcactctattatgacctccagggtcacttatttgcaatggagagcagctccggtgaggagtactacgtagcttcagataacaccgggacccctctcgcagtcttctccattaacgggctgatgatcaaacaactccagtacacggcatatggtgagatttattatgattccaacccagatttccagatggtgattggtttccatggagggctctatgatccacttacaaaactcgtgcacttcactcaacgggactacgacgtactcgccggacgatggacttccccggactacaccatgtggaaaaacgttggcaaagagccagctccatttaatctatatatgttcaagtctaacaaccctttaagcagtgaattagacttaaagaattacgtcaccgacgtgaaatcctggctagtgatgttcggattccagctgtctaacataattcctgggttcccacgggctaagatgtacttcgtgccacctccctatgaacttagtgagagccaggcttccgaaaatggccagctgatcacaggagtccaacagacaactgagagacataatcaggccttcatggccctcgagggacaagtcatcaccaaaaagctgcatgccagtatacgggagaaagcagggcattggttcgccactactacacccatcatagggaaggggataatgttcgctatcaaagaagggcgagtgacaacgggcgtttccagtatcgctagcgaagactcccgcaaggtggcttctgtccttaacaatgcatattacttggataagatgcattacagcatcgaagggaaggatactcactactttgtaaaaattggatctgccgacggggatctggtcacactgggcacaaccattgggaggaaggtccttgagtcaggtgtgaatgtgaccgtgtcacagcctaccttactggttaatggacggacgaggcgattcaccaatattgaattccagtacagtacgctcctgctgtcaatacgatatggcctgacccccgatactctggacgaggagaaggccagggtgctcgaccaggcaagacagcgagctttgggaactgcctgggctaaggagcagcagaaggcaagggacggccgtgaggggtccaggctgtggaccgagggcgagaagcagcaattgctttctacggggcgtgttcagggctatgaaggttactacgttctgcccgtagagcaatatcctgagctggcagattcttcttccaacatccagttcctcaggcaaaacgagatgggcaaaaggta

SEQ ID NO: 43690 - DNA, 8324 bp, Artificial Sequence
  derived and/or modified sequence
atggacgtgaaagaccggaggcaccgatctcttaccaggggcaggtgtggaaaagaatgccggtacacttcctcatcccttgattccgaagactgtagggtgcctacgcagaagtcttacagcagtagcgagacactgaaagcatacgaccacgacagcagaatgcattatgggaaccgagtgaccgatctcattcatcgggaaagcgacgagttccccagacagggaacaaattttaccctggctgaactgggtatttgcgaaccaagccctcataggtccggatactgctccgatatggggatccttcaccaaggctactctttatctacagggtctgacgcagacagtgacaccgagggcggaatgagtcccgagcatgccatccggctgtggggcaggggcattaagagcagaaggtcctcagggctatctagcagggaaaactctgctctcaccttaacagattccgacaatgagaataaatcagatgacgagaacggcaggcccatcccgcctactagctccccttcgcttctgccatccgcgcagctcccgtcctctcataacccgcctcctgtctcctgccagatgccactgctggacagtaatacatcccaccaaatcatggataccaatccagatgaggagtttagtcctaactcgtacctgcttcgagcctgctcgggtccgcagcaggccagtagcagcggccctccaaaccaccactctcaatccacactcaggccacccttacctccgccacacaaccataccctgtcccatcaccacagctcagccaacagcctgaacagaaattccctgacaaatcgaagaagtcaaatacacgcccctgccccagccccaaacgacctcgctaccacccctgagtctgtccagcttcaggactcttgggtgctgaattccaatgtccccctggagaccaggcattttcttttcaaaaccagtagcggaagtacacccctattcagctcaagctctccagggtatccactgactagcgggaccgtttataccccaccgcctcgacttctccctagaaatacatttagccgcaaggcttttaagctcaagaagccctctaagtactgctcctggaaatgcgccgcactctcagctattgccgctgcactgttgctggccatactgctcgcctacttcattgccatgcatctgctcggcctgaactggcaacttcagcccgcagatggacacacctttaataatggaattagaacaggattgccaggcaatgacgacgtcgcaactatgccttcgggcggaaaagtgccctggagtctgaaaaacagttctatcgactctggagaggcggaggtgggacgccgagttacgcaggaagttcctcccggagtgttctggcggagccagatccacatttctcagcctcaatttctcaagtttaacatctcgctgggcaaagatgctcttttcggggtatatattcggaggggactgccgccatcccacgcgcaatatgacttcatggaaaggctcgatggaaaagagaagtggagcgtggtcgagagtccccgagagcggcgaagtatccagaccctcgtgcaaaacgaagcagtgttcgtccagtacctcgacgtgggactttggcatttggccttctacaatgatggcaaagacaaggaaatggtgtccttcaacaccgttgtcttagatagcgttcaagactgtcctagaaattgccacggcaacggggagtgtgtatctggcgtgtgtcattgctttcccggttttctgggagctgactgcgcaaaggcagcttgccccgtcttgtgttccggcaatggccagtattccaaagggacatgccagtgttattctggttggaagggtgcggagtgcgacgtccccatgaatcagtgtattgacccatcttgcggaggccacggttcgtgcatcgatggtaactgcgtgtgtagtgccggttacaaaggcgaacactgtgaggaagtagattgcttagatcccacatgcagtagccatggcgtatgtgttaatggggagtgtctgtgtagcccgggttggggaggacttaactgtgaacttgccagggtccagtgtcctgatcagtgctctggccacgggacatatttaccggatacaggattatgtagttgcgatcccaattggatgggcccagactgttcggtggaagtctgcagtgtggactgtggaacccatggagtgtgtatcggtggcgcttgtagatgcgaggaaggctggaccggcgctgcctgcgatcagagggtctgccatcctcggtgtatagagcacggcacttgtaaagacggaaagtgcgaatgccgagaaggatggaatggcgaacactgtaccattggcaggcagacagctgggacagaaacagacgggtgccccgatctttgcaatgggaatgggaggtgtactctcggtcagaatagttggcagtgtgtttgccagaccggttggaggggtccaggatgcaacgtggccatggaaacaagttgtgcagataataaggataatgaaggcgacggcctcgtagactgtctcgacccagattgttgtctgcagtctgcctgccaaaattcactgctctgccgagggagccgggaccccctcgatatcatacagcagggacagacggactggcccgcagttaagagtttttacgacagaatcaaactgttggctgggaaggattcaacccatattatccccggtgagaacccattcaattcatctttggtgagtctaataaggggacaggtcgtgacaacagacggcacccctctggtaggtgtgaatgtcagtttcgtgaagtaccccaaatacggctataccataactcgccaggatggcaccttcgatctgattgctaacggaggagcctcgctcacactgcacttcgagagggcacccttcatgagtcaggaaagaacggtctggctgccatggaacagcttctatgcaatggatactttggttatgaagactgaggagaattcaatcccttcttgtgacttgagcgggttcgtgaggcccgatcccatcatcatcagctcgcccctaagcactttcttctcagcagccccagggcagaacccaatcgtccccgagacacaggtcttacacgaagaaatcgaactgccaggctccaacgtgaagctcagatacctgagttccagaactgcgggatataagtccctgctcaaaataaccatgacgcagtctactgtgccactgaatctgattcgggtacacctgatggtcgccgtcgaggggcacctatttcagaaaagcttccaggcaagccccaatcttgcctacacctttatttgggacaagactgacgcttacggccagcgcgtttatggcttgtccgatgctgtagtgtcagtaggctttgagtatgaaacctgtccatccctgatcctctgggagaaaaggaccgcactgctgcagggtttcgaactagatcccagcaacctggggggttggagcctggataaacaccacattctgaacgtcaagagcggtatcctccacaaaggcactggcgaaaaccagtttttaactcagcagcctgcaatcatcacttccatcatgggaaacggacggaggcggagtatttcatgtccgagttgtaatggtttggccgaagggaacaagctgctggctccggtggccctggctgttggcattgatggaagcttgtatgtgggtgactttaattatatccggagaatcttcccgtcacgaaatgtgactagcatacttgagctccgcaataaggaatttaaacattcaaataacccagcccacaagtactaccttgccgtagaccccgtgtcaggaagcctttatgtcagcgacacgaactcacgcagaatctacagagttaaatctctgagtggcacaaaagacttggcgggaaattccgaagtggtggccggtacgggcgagcagtgtttgccgttcgacgaagcaaggtgtggcgacggcggtaaggccatcgacgctacattgatgtcacctcgcggaatagcagttgacaagaatggactcatgtatttcgtcgacgctaccatgattaggaaagttgaccagaatggaattatatcgacccttctagggtctaatgatcttactgccgttagacccttaagctgtgatagctcaatggacgttgcccaggttagattggaatggcctaccgatctagcggtcaaccctatggataactccctctacgttctggagaacaacgtcatcctaagaatcaccgaaaatcaccaggtctctattatcgccggtagacctatgcactgccaggtgcccggaatcgactatagtctcagcaagctcgccattcactcagccctggaaagtgcctcagcaatagcaatatcccataccggcgtcctttatataaccgaaaccgacgaaaaaaaaattaacaggttacggcaagtcactactaacggcgagatatgcctgttagccggtgcggcatccgactgtgattgtaagaacgatgtgaactgtaattgctactctggagatgacgcatacgccacagatgctatccttaactccccttcaagccttgctgtagccccagatgggacaatttacatagccgatttaggaaatattcgcattagggctgtgagcaagaataaaccagtcctaaatgcgttcaatcaatatgaggccgcatcccccggagagcaagagctctatgtattcaacgctgacggaatccatcagtacactgtgtcactcgtcaccggtgagtacctgtataacttcacatactctaccgacaacgatgtcacagagcttatagacaataatggcaattcgctcaagatccgacgggacagcagtggtatgcctcgacacctgctgatgccagataatcaaatcataactctgaccgtcggaacaaatggtggcctgaaggtggttagtacccaaaatttagagctgggactcatgacttacgacggaaatactggcctgctcgccacaaaatcagatgagaccggatggactaccttctacgactatgaccacgagggtagattaaccaacgtcacaaggcccactggggttgtgacctctttacatcgcgagatggaaaagtccattaccatcgacatagagaactccaatagggatgacgacgtgacagtaattacgaatctaagctcagttgaagccagttacactgtcgtccaagatcaggtgcggaactcttaccaattgtgtaacaacgggacactgagggtgatgtatgctaatggaatggggatctcattccactccgaacctcacgtgctcgccggaaccatcaccccaactattggcagatgcaacatcagcctccctatggaaaacgggctcaactcaatagaatggcggttgagaaaagagcagattaagggcaaagtgaccatcttcgggcgaaaactgcgagtccatggcaggaacctgttgtcaatcgattacgatagaaatatccggaccgagaagatctatgatgatcatcgcaaatttaccctaagaattatttatgaccaggtaggacggcctttcttgtggctgccgagctctggtttggccgctgtcaatgttagctattttttcaacggaagactggcagggttacagaggggtgctatgagtgaaaggaccgacattgataagcagggaaggatcgtctctagaatgttcgctgacggtaaggtctggtcctatagctatctggacaagagcatggtcctgctgctccaaagccagcggcagtatatctttgagtatgattccagcgatagactgctcgcagttacaatgcccagtgtcgccagacattcaatgtccacacatacgtcaatcggttatattcgaaacatctataacccccctgagtctaacgcttcagtcatctttgattactctgatgacggacgcatcctgaagacatctttcctgggcacagggcgacaagtgttctataagtatgggaaactcagcaaactgagcgagatcgtctatgattctaccgccgtcactttcggctatgatgagacaaccggcgtgctgaagatggttaatctgcaatctggtggcttttcatgtaccattagataccggaagatcggtcccctggtggacaagcagatttatcgcttctctgaagaaggaatggtgaatgcaaggttcgactatacctaccatgacaattccttcaggattgcttctatcaaacccgtgatctcagaaaccccactgccagtagatctgtacaggtacgacgagatatcagggaaagtcgaacatttcggaaagttcggcgtcatttactatgacatcaaccagataattacaaccgccgttatgactcttagcaagcacttcgacacccatgggaggataaaagaggtccaatatgagatgttccgctccttgatgtactggatgacagtgcagtacgactccatgggcagggtgatcaaaagagagctcaagctgggcccatacgctaataccacaaaatacacctatgactacgacggtgacgggcagctccagtccgtggccgtgaacgaccgcccaacatggcgatactcctacgacctaaacggcaatcttcatctccttaatcccggtaacagcgtgagactcatgcccctcagatatgacttgcgcgacaggatcaccagactgggcgacgtgcaatacaagattgacgacgatggctacctatgccaacgcggatctgacattttcgaatacaactctaaaggcttgctcactagagcttataacaaggcctctggttggtccgtgcagtatcggtatgatggtgtgggcaggcgggcttcctataagaccaacttggggcaccatctgcagtacttctatagtgacctgcacaaccctactagaatcacacacgtgtataatcatagcaactccgaaatcactagcttgtactacgatttgcagggccatctttttgccatggagagcagctctggcgaagagtattacgtggcaagcgacaatactggaaccccccttgcagtattctccattaacggtctgatgatcaaacagctgcaatacactgcctatggagagatctattacgactcaaacccagatttccagatggttatcgggtttcatggtggtctgtacgatccactgactaaactcgtgcacttcacacagagagactatgacgtgctggccggacgctggacctcccctgattacaccatgtggaaaaatgtcggaaaagagcctgctcctttcaatctttacatgtttaaatccaacaatccattgtcctctgaactcgatctaaaaaactacgtaacagatgtgaaatcctggttagttatgttcggattccagctttctaacatcatcccgggattccccagagcgaagatgtattttgtgccccctccttatgagctgtcagagtcacaggcttccgaaaacggacaattaatcacaggggtgcagcagacgacggagaggcacaaccaggcattcatggccttggaaggtcaggtgatcaccaaaaaactgcacgccagcattagagagaaggccggtcattggttcgcaacaaccaccccaattattggaaagggtatcatgtttgccatcaaggagggtagagtgaccacgggggtgagtagcattgcatcagaagattccagaaaagttgcatctgtcctgaacaatgcgtactacttagacaagatgcattattcaatcgagggaaaggacactcattatttcgtgaaaattgggtctgctgatggtgatctggtcaccctgggcactacgatagggcgtaaggtgctggaaagcggcgtgaatgtgacagtgagtcagcctacgcttctcgtcaacggtaggactcgcaggttcacaaatatcgagtttcagtactctaccctactgctgagcattagatacggtctcactccggacaccctcgacgaggaaaaggcacgtgtgctggatcaggctcggcagcgcgctctaggcaccgcttgggccaaagagcagcagaaggctcgcgatggcagagaagggtctagattgtggactgaaggtgaaaaacagcagctgttatccactggtagagtgcagggctatgaaggctattatgtactccctgttgagcagtacccggaactggccgatagtagctcgaatatccaatttctgcgtcagaacgagatgggcaagcgcta

SEQ ID NO: 43691 - DNA, 8321 bp, Artificial Sequence
  derived and/or modified sequence
atggacgttaaggatcgaaggcaccgctctctgactcggggacggtgcggtaaggagtgccgctacacatccagctccctggactccgaggactgccgagttccaacacagaaaagctactccagctccgaaacactaaaagcgtacgaccacgactcaagaatgcattacggcaatagagtgactgacctcatccatcgtgaatctgatgagttcccccgtcaggggacaaacttcaccctagcggagttaggaatttgtgagccttctccccaccgctcgggttactgttctgacatgggcatactgcatcagggctactcgctgtccacaggctccgacgcagattctgacacggaaggaggcatgtcgcccgagcatgctattcgactttggggcagaggtattaaaagcagaagatctagtgggttgagcagtcgtgagaattcagccctcactctgaccgactccgacaatgagaacaagagcgatgacgaaaacggtcgacctattcctcccaccagtagccccagtctgctgcccagcgcacagcttccatcgtcacacaaccctcccccagtgtcctgtcaaatgccgctgctggattcaaacaccagccatcagatcatggacactaacccggacgaagagttttcacctaattcctacctcctgcgagcctgctccgggccacaacaagccagtagttccgggccaccgaatcatcactcacagtcaactctacgaccgcctctccctcctccccataaccacacactctcccatcatcatagtagcgcgaactcattgaaccgaaatagcctgacaaataggaggagccagattcacgcaccagcccctgcaccaaacgacctcgccactactccagaatccgttcagctgcaggactcctgggttctgaactcaaatgtgcccctggagacacggcattttcttttcaaaacatccagtggatcgacgcctttgttctccagttcctctcccggatatcccctcacgtctgggaccgtctataccccaccgccacgattactgccgcgaaatactttctctcgcaaggcctttaaactgaaaaaaccttcgaagtattgtagctggaagtgcgctgcgttgtctgcgatcgctgctgcgctgctgctggccattctgctggcgtatttcatcgccatgcatctgttaggattgaattggcaactccagcccgctgacgggcataccttcaataatgggataagaacaggtctgcctggtaatgatgatgtggctaccatgccatcagggggtaaagtgccctggagtttgaaaaattcttctatagatagtggagaggccgaggtcggccgtcgggtcacccaggaggtcccacctggtgtcttctggaggagccagattcacattagccagccgcagtttttgaaattcaatatctctctgggcaaagatgccttgtttggagtgtatatacggaggggtttgcctccgtctcacgctcagtacgactttatggaaagactggacggcaaagaaaagtggagcgtggtggagagtccccgagaacgtcggagcatccagacactggttcagaacgaggccgttttcgtccagtatctggacgtgggcctgtggcatctggctttttataacgatggcaaagacaaagaaatggtttcgtttaataccgtcgtgctggacagcgtccaggattgtcccagaaattgtcacggcaatggtgaatgtgtcagcggagtttgtcattgtttccccggatttctcggcgcagattgcgcaaaagcagcttgtcccgtgttgtgctcaggaaatgggcagtatagtaagggaacctgccagtgttattctggctggaagggcgctgaatgcgacgtgcccatgaatcaatgcatagatccaagctgtggcggtcacgggtcttgcatcgacggcaactgtgtctgctcagctggatacaaaggggaacattgtgaggaagtggattgtttggatcccacatgttctagtcacggggtctgtgttaacggcgaatgcctgtgttcacccggatggggtggcttgaactgcgagcttgcccgagtccagtgcccggaccagtgctccgggcacggtacatacctgccagacaccggtctctgcagctgcgaccctaattggatggggcctgattgtagcgtggaagtatgttcagtggactgtggaactcatggtgtgtgcatagggggtgcatgccgatgtgaggagggctggacgggggctgcctgcgatcaaagagtgtgccaccccaggtgtattgagcatgggacatgcaaagacggtaagtgcgaatgccgtgaaggatggaacggagagcattgcaccattgtgcgcgaaacgatcggtggagagtgctacgggtgtccagacctatgtaacggtaacggaagatgtaccctgggccagaactcttggcagtgtgtgtgccaaacgggatggagaggcccagggtgcaatgtggcaatggaaacaagctgtgcggacaacaaagacaacgagggggacggactcgtagattgcctggatcctgattgctgtctgcaaagcgcatgtcagaatagtctgctctgcaggggcagtcgggatccactcgatatcatccagcaaggtcagaccgactggcccgctgtgaaatcattttatgacagaattaaactgttggcgggaaaagactcaacgcacattatccccggagagaacccttttaactccagcctggtgtctctcattcgcggacaggtggtgactaccgatggcactcctctggtgggcgtgaacgtcagctttgttaaatatcccaaatatggttacactatcacccgacaggacggcaccttcgatcttatcgctaatggaggagccagtctgactttgcatttcgaacgggctccatttatgtctcaagagcgaactgtgtggctgccctggaactccttctacgctatggacacactggtcatgaaaacagaagagaatagcattccttcgtgcgaccttagtggcttcgtccggcctgatcccattatcatctcaagccccttatctactttcttttccgctgcccctggtcaaaatccaatagtgcctgagacacaggtgctccacgaagaaatagagctgcctggttcaaacgttaaactgcgctacctaagcagccgtacagcagggtacaagagcttactgaaaatcacaatgacccaaagcacagtccccctgaacctgataagggttcacctcatggtggctgttgagggccatcttttccagaagtcctttcaagcaagcccgaatctggcttatacgttcatttgggacaagacagatgcctacggccagagagtttacggccttagtgacgcagtcgtgtccgttggatttgagtacgaaacatgccctagcctgatactttgggaaaaaaggacagccctcctccagggctttgagctcgacccctctaatttgggaggatggtcccttgacaagcatcatatcctgaacgtgaagtcgggtatcctacataagggcaccggagagaatcagttcctaacgcaacagcccgcaatcattactagtatcatgggtaatggccgaagacggtcaatttcctgtccctcgtgcaacggtttagccgagggaaacaaactcttagcccctgtagccctggccgtgggtattgacggctctttgtacgtgggtgattttaattatattcggaggatctttccctcaaggaacgtgacgtccatccttgaactgagaaacaaagaattccacaacaacaatcccgctcacaagtactatctggcagtggatcctgtgtcaggctctctctacgtgagcgacactaatagccgacgcatatacagggtcaaaagtctcagtgggactaaagatctggcaggcaactccgaggtggtggccggaaccggagagcaatgcctcccgtttgacgaggcccgttgtggagatggcggtaaagctattgatgcaacactgatgtcccctagggggattgcagtggataaaaatggcctgatgtatttcgtagacgcaaccatgattagaaaagtcgatcaaaacggtatcattagcacactgctgggcagcaatgacttgacagcagtacgccctctctcatgcgattccagcatggacgtggcccaggtcaggctggagtggccaactgatctggctgtcaacccaatggataactcgctatatgtgcttgagaataatgttattctgagaataactgagaatcatcaagtcagcattattgctggcagacctatgcattgtcaggtgccaggtattgactactcgttgagtaaacttgccattcatagcgccctggagtccgcaagcgcaatcgccatctcccataccggggtgctgtacattaccgagacagacgagaagaagattaatcggttgaggcaggtgaccacgaatggagaaatttgtttactagccggtgctgcatctgattgcgactgcaaaaatgacgtgaattgcaattgctattccggggatgacgcatacgctaccgacgctattctgaactcaccaagctcccttgccgtggcccctgatggtacaatctacatcgcagacctgggcaacattagaattcgggcagtgagcaaaaataagccagttctcaacgcatttaatcagtacgaagctgctagcccaggagaacaagaactgtacgtgttcaacgcagacggcatccaccagtacactgtgtcactcgtcaccggggaatatctgtataacttcacatactctacagataacgacgtgactgaactaatagataacaatggaaacagcctgaagatccgtagggactcttcaggtatgcccaggcatttgttaatgcctgacaaccagatcattacactcacagtaggcacaaacggaggacttaaggttgtcagcacccagaatctcgagcttggcctgatgacatatgatggcaataccgggctgctcgcaaccaagtctgacgagaccggctggactacattctacgattatgatcacgaaggacggctcactaatgtgacccgtccaaccggagtcgttacctccctccaccgcgaaatggaaaagagtattactatcgacatcgagaattcgaacagagatgacgatgtgactgtaataactaatttaagctcagtggaggcttcttacaccgttgtgcaggaccaggttcggaatagctatcagctgtgcaacaacggtacactacgggtcatgtatgccaacgggatgggaatttcatttcactccgagccacatgttttggccggaaccatcacccctaccattggcagatgtaacatcagtctaccgatggagaatggcttaaacagtatagagtggagactccgtaaagagcaaatcaagggaaaggtcacaatttttggtaggaaactgcgagtgcacggcagaaacctactctcaatcgattacgaccggaacatacggaccgaaaaaatttatgatgatcacagaaagttcacacttcgtatcatttatgatcaagtgggccgtcctttcctttggctcccctcttcaggtctcgctgcagtaaatgtgagttactttttcaatggaaggctggcaggcctacagcgcggagccatgtctgaacgcacagatatagacaaacaggggcgaattgtgagccggatgttcgccgatgggaaagtgtggagctacagctacctggacaagtctatggtgctgctgctacaaagccaaagacagtatatttttgagtacgatagctcggaccgattgcttgccgtaaccatgccctccgtggcgcgacattctatgtccacccatacctcgattgggtatatcaggaacatctacaatccccctgagagtaacgcctcagtgatttttgattactctgatgacggccgaattctgaaaacatcttttttagggacaggaagacaggtattctataaatacggcaaactgagtaaattaagtgaaatcgtctacgatagtaccgcagttacctttggatacgacgaaacaaccggcgtgcttaaaatggtgaatctgcagtccggcggttttagttgtaccattcgatataggaagattggtcccctcgtggataaacagatctataggttctcagaagaaggtatggtcaacgcgagattcgactatacataccatgataatagctttcgaattgcatctatcaagcccgtgataagcgaaactcctctccccgtggacctataccggtatgatgagatatccggcaaagtcgaacactttggcaaattcggcgttatctattacgacataaaccagataatcaccactgctgtcatgaccctctccaagcacttcgatactcatggacggatcaaagaggtgcagtacgagatgttcaggtctctcatgtattggatgacagtgcagtacgatagtatgggtcgcgtgattaagagagaattgaagctgggaccttacgctaacactaccaagtacacatacgattatgatggagatgggcagctccaatcggttgcagtcaatgaccgccctacgtggcgctactcttacgacctgaacggtaatctgcacctgctgaatcccggaaattccgttagactgatgcccctgcgttatgatctgagggaccgcataacaagactgggagacgtacagtacaagattgacgatgatggctacttatgccagcgaggctcagatattttcgaatacaattctaagggcctgctgacccgggcatataataaggcatccgggtggtctgtgcagtatcgttacgatggcgtaggacggagggctagctataagaccaatctgggccaccacttgcaatatttctactcggacctccataaccccactaggattacacacgtttacaatcacagtaatagcgaaataacatctctgtattacgacctacagggacacctgttcgccatggagtcttcgagcggggaggagtactatgtcgctagtgacaacaccggcaccccgctcgcagtatttagtatcaatggccttatgataaaacagttgcagtataccgcatatggggagatctattatgatagcaaccctgattttcagatggtgattggtttccacggaggtctgtatgacccactcactaaactggttcattttacccaaagagactatgatgttctggctgggagatggacctctcccgattataccatgtggaaaaacgttggtaaagagcccgcacccttcaatctctacatgttcaaatcaaataatcctctgagcagtgaacttgatctgaagaactatgtgaccgacgtgaagagctggctggttatgtttggctttcagctcagcaatatcatcccgggtttccctagagcgaagatgtacttcgtgccaccaccttatgagctgtccgaaagccaggccagtgaaaacggccagttaatcaccggggtgcagcagacaacagaacggcacaatcaagcattcatggcgttggaaggacaggtgattacaaagaagctgcatgccagcatcagagaaaaggccggtcactggtttgccacgactactcccatcataggcaaaggcataatgttcgccatcaaggaaggacgggttaccacaggtgtttcatccattgcaagcgaggacagcagaaaggtggccagcgtgttgaataacgcgtactacttagacaagatgcactattctatagagggcaaggatacgcactacttcgtaaagatcgggtccgctgatggggatctcgttaccctgggcaccacgatcgggcgaaaggtgcttgagagtggcgtcaatgttacagttagccagcctacgttgctggtaaatggccgtactagacggttcacaaacatcgaatttcagtacagcactctattactcagtatcaggtatggcctgaccccagacaccctcgacgaagaaaaagcccgtgtgttggaccaggctaggcagagggcacttggcacagcctgggctaaggaacagcagaaagctagggatggcagagagggcagccggctttggaccgagggggaaaagcagcagttgcttagcactggcagggtgcagggttacgagggctattatgtactcccagtcgagcagtatccagagctggcagatagttcctctaacattcaattcctgcgtcagaatgagatggggaaacgcta

SEQ ID NO: 43692 - protein, 317 aa, Artificial Sequence
  derived and/or modified sequence
MSCQAFTSADTFIPLNSDASATLPLIMHHSAAECLPVSNHATNVMSTVPSILSLIQTPKCLCTHFSVTTLGNTATGLHYSVPSCHYGNQPSTYGVMAGSLTPCLYKFPDHTLSHGFPPIHQPLLAEDPTAADFKQELRRKSKLVEEPIDMDSPEIRELEKFANEFKVRRIKLGYTQTNVGEALAAVHGSEFSQTTICRFENLQLSFKNACKLKAILSKWLEEAEQVGALYNEKVGANERKRKRRTTISIAAKDALERHFGEQNKPSSQEIMRMAEELNLEKEVVRVWFCNRRQREKRVKTSLNQSLFSISKEHLECR

SEQ ID NO: 43693 - DNA, 954 bp, Artificial Sequence
  derived and/or modified sequence
atgagttgtcaggcctttacctccgctgatacgttcattccattgaactctgacgctagcgccacgctgcctctgatcatgcatcacagcgccgcggagtgcctgccagtctccaatcatgccacaaatgtcatgtccaccgtgccttcaattctctctcttatccagacccccaaatgtctctgcacacacttttccgtgactaccttggggaacactgctacgggacttcactactccgtcccttcatgtcattatgggaaccagccatccacctatggcgtgatggccgggtcactaaccccgtgcctgtacaagtttcccgatcacactctcagtcacggcttcccaccaatacaccagcctctgctggccgaggaccccactgcggcagactttaagcaggagttgcggcgaaaatctaaattagtagaagagcccatcgacatggattctccggagattcgggagctggaaaaattcgctaacgaatttaaggttaggagaatcaagctgggctacacacagaccaacgtcggcgaggcgctagcagctgtgcacggatcggagttctctcaaactaccatatgccgttttgaaaacttgcagctgtcttttaaaaacgcctgcaagctgaaagccattctgagtaagtggctggaggaagccgagcaggtgggcgctctgtacaatgaaaaagttggagccaacgagagaaagaggaagagacggaccacaatcagcattgccgcaaaggatgccctcgaacgccatttcggagagcaaaacaaacccagctcgcaggagattatgcgcatggcggaagaactaaacctcgaaaaagaggttgtcagagtctggttttgcaacaggaggcagcgcgagaaaagggtgaagacgtcactcaaccagtccctttttagcatctcaaaggaacatttggaatgtagatag

SEQ ID NO: 43694 - DNA, 954 bp, Artificial Sequence
  derived and/or modified sequence
atgagctgccaggccttcaccagcgctgacaccttcatccccctgaacagtgatgccagcgccaccctgcccctcatcatgcaccacagcgctgctgaatgtctgcctgtgagcaaccacgccaccaacgtgatgagcacagtgcccagcatcctgagcctcatccagacccccaagtgcctgtgcacccacttctctgtgaccaccctgggcaacacagccaccggcctgcactacagcgtgcccagctgccactacggcaaccagcccagcacctatggagtgatggccggcagcctgaccccctgcctgtacaagttcccagaccacaccctgagccacggcttcccccccatccaccagcccctgctggccgaggaccccacagctgctgacttcaagcaggagctgcggaggaagagcaagctggtggaggagcccatcgacatggacagccctgagatccgggagctggagaagtttgccaatgagttcaaggtgcggcgcatcaagctgggctacacccagaccaacgtgggggaggccctggccgctgtgcacggcagcgagttcagccagaccaccatctgccgctttgagaacctgcagctgtccttcaagaatgcctgcaagctgaaggccatcctgagcaagtggctggaggaggccgagcaggtgggcgccctgtacaatgagaaggtgggcgccaatgaaaggaagaggaagaggaggaccaccatcagcattgctgccaaggatgccctggagcggcactttggagagcagaacaagcccagcagccaggagatcatgaggatggccgaggagctgaacctggagaaggaggtggtgcgggtgtggttctgcaacagacggcagcgggagaagagggtgaagaccagcctgaaccagagcctcttcagcatcagcaaggagcacctggagtgcaggtag

SEQ ID NO: 43695 - DNA, 954 bp, Artificial Sequence
  derived and/or modified sequence
atgagctgccaggccttcaccagcgccgacaccttcatccccctgaacagcgatgcctccgcaaccctgccattaatcatgcaccactctgcggctgaatgtcttccggtctcaaaccacgccaccaatgtaatgtcaaccgtgccaagtatactttccctgattcagacaccaaagtgtctctgtacccacttttcagttacgaccctcggaaacacggctactggactgcactattctgtgccttcttgtcattatggcaatcagccatctacatacggggtgatggccggatcccttaccccctgcctctataagtttcctgaccacaccctgtctcacggtttcccccccatccaccagccgctgctggccgaggacccaacagcagccgatttcaaacaggagttgagaaggaaaagcaagctggttgaggaacctatcgacatggactctccagaaatccgggaacttgagaagttcgccaatgagttcaaggtacgcagaatcaagctgggatatactcagaccaacgttggcgaagccctggcagccgtgcacggatcggagttttcacagaccaccatttgtcggtttgagaacctgcaactgtcttttaaaaacgcgtgcaagctcaaagccattctctctaaatggctggaggaagccgagcaggtgggagctctgtacaacgaaaaagtcggggcaaatgaacggaaacgcaaacggaggaccaccatcagcatcgcagcaaaggacgccctagagagacatttcggagaacagaataagccatcttcacaggagataatgagaatggccgaggagctgaatctagagaaagaggtggtacgtgtctggttctgtaaccggaggcagcgggaaaagagggttaagacttctctgaatcaatctctcttttccatctccaaggagcatttggagtgccggtag

SEQ ID NO: 43696 - DNA, 1149 bp, Artificial Sequence
  derived and/or modified sequence
ggggagcagcggttctccttatttttctactctcttgtgggaatgagttgccaagcttttacttcggctgatacctttatacctctgaattctgacgcctctgcaactctgcctctgataatgcatcacagtgctgccgagtgtctaccagtctccaaccatgccaccaatgtgatgtctacagtcccatctattttgtctttgatccaaactcctaaatgtttgtgcacacatttctcggtgacaacgttgggaaacacagcaacaggacttcattattctgttccttcctgtcattatggaaaccagccatcaacctatggagtgatggcaggtagtttaaccccttgtctttataaatttcctgaccacaccttgagtcatggatttcctcctatacaccagcctcttctggcagaggaccccacagctgctgatttcaagcaggaactcaggcggaaaagtaaattggtggaagagccaatagacatggattctccagaaatcagagaacttgaaaagtttgccaatgaatttaaagtgagacgaattaaattaggatacacccagacaaatgttggggaggccctggcagctgtgcatggctctgaattcagtcaaacaacaatctgccgatttgaaaatctgcagctcagctttaaaaatgcatgcaaactgaaagcaatattatccaaatggctggaggaagctgagcaagtaggagctttgtacaatgaaaaagtgggagcaaatgaaaggaaaagaaaacgaagaacaactataagcattgctgctaaagatgctctggagagacactttggagaacagaataaaccttcttctcaagagatcatgaggatggctgaagaactgaatctggagaaagaagtagtaagagtttggttttgcaaccggaggcagagagaaaaacgggtgaaaacaagtctgaatcagagtttattttctatttctaaggaacatcttgagtgcagataagatttttctattgtataatagcctttttctcccgtttcattcctttctcttcctcaacaaaaacagaaattacttggttgacttaaaatcattttatatcaatagcttttacagaagctttacttttccacttttttttaaaaaaaagaaacc

SEQ ID NO: 43697 - DNA, 954 bp, Artificial Sequence
  derived and/or modified sequence
atgagttgtcaggccttcacttctgcagatactttcattccacttaactcagacgcgagtgcgactctgcctctgatcatgcaccacagtgctgcagagtgtttaccagtttcgaaccacgctacaaatgtcatgagcacagtccccagcatcttgtcactcatccagactccaaagtgtctatgcacccactttagtgtgactacactcggcaatactgccacaggcctgcattattctgtgcccagctgtcattatggcaaccagcctagcacttacggcgtaatggctggaagcctcacaccttgcttgtataagtttcctgatcacaccttatcccacgggttccccccaatccaccaaccgctcctggcggaggatcctacagctgccgactttaagcaggaattgagaagaaagtcaaaactcgtagaggaaccgatcgatatggattcccccgaaatccgggagctcgaaaaattcgcaaacgagtttaaagtgaggcgcatcaaacttggatatactcagacgaatgtcggcgaggccctggcggctgtacatggcagtgaattttcccagactacgatatgcaggttcgagaacctgcaactcagctttaaaaacgcgtgtaagctcaaggctatccttagcaagtggctagaggaggcagagcaggtcggagcgctgtacaacgagaaggtaggcgcaaacgagcgcaagcgaaagcggcgaaccactatctccattgccgctaaggatgccctggaacgccactttggtgaacaaaacaagccttcgtcacaggaaatcatgcgtatggccgaggagctcaatctcgaaaaggaggtggtccgtgtctggttctgtaacaggcgccagcgtgagaaacgggtgaagacaagcctgaaccaatccctgttctccattagtaaagaacacctggaatgccggtag

SEQ ID NO: 43698 - DNA, 954 bp, Artificial Sequence
  derived and/or modified sequence
atgagctgccaggccttcaccagcgccgacaccttcatccccctgaacagcgacgccagcgccaccctgcccctgatcatgcaccacagcgccgccgagtgcctgcccgtgagcaaccacgccaccaacgtgatgagcaccgtgcccagcatcctgagcctgatccagacccccaagtgcctgtgcacccacttcagcgtgaccaccctgggcaacaccgccaccggcctgcactacagcgtgcccagctgccactacggcaaccagcccagcacctacggcgtgatggccggcagcctgaccccctgcctgtacaagttccccgaccacaccctgagccacggcttcccccccatccaccagcccctgctggccgaggaccccaccgccgccgacttcaagcaggagctgagaagaaagagcaagctggtggaggagcccatcgacatggacagccccgagatcagagagctggagaagttcgccaacgagttcaaggtgagaagaatcaagctgggctacacccagaccaacgtgggcgaggccctggccgccgtgcacggcagcgagttcagccagaccaccatctgcagattcgagaacctgcagctgagcttcaagaacgcctgcaagctgaaggccatcctgagcaagtggctggaggaggccgagcaggtgggcgccctgtacaacgagaaggtgggcgccaacgagagaaagagaaagagaagaaccaccatcagcatcgccgccaaggacgccctggagagacacttcggcgagcagaacaagcccagcagccaggagatcatgagaatggccgaggagctgaacctggagaaggaggtggtgagagtgtggttctgcaacagaagacagagagagaagagagtgaagaccagcctgaaccagagcctgttcagcatcagcaaggagcacctggagtgcagatag

SEQ ID NO: 43699 - protein, 477 aa, Artificial Sequence
  derived and/or modified sequence
MGRTVVVLGGGISGLAASYHLSRAPCPPKVVLVESSERLGGWIRSVRGPNGAIFELGPRGIRPAGALGARTLLLVSELGLDSEVLPVRGDHPAAQNRFLYVGGALHALPTGLRGLLRPSPPFSKPLFWAGLRELTKPRGKEPDETVHSFAQRRLGPEVASLAMDSLCRGVFAGNSRELSIRSCFPSLFQAEQTHRSILLGLLLGAGRTPQPDSALIRQALAERWSQWSLRGGLEMLPQALETHLTSRGVSVLRGQPVCGLSLQAEGRWKVSLRDSSLEADHVISAIPASVLSELLPAEAAPLARALSAITAVSVAVVNLQYQGAHLPVQGFGHLVPSSEDPGVLGIVYDSVAFPEQDGSPPGLRVTVMLGGSWLQTLEASGCVLSQELFQQRAQEAAATQLGLKEMPSHCLVHLHKNCIPQYTLGHWQKLESARQFLTAHRLPLTLAGASYEGVAVNDCIESGRQAAVSVLGTEPNS

SEQ ID NO: 43700 - protein, 697 aa, Artificial Sequence
  derived and/or modified sequence
MGERAGSPGTDQERKAGKHHYSYLSDFETPQSSGRSSLVSSSPASVRRKNPKRQTSDGQVHHQAPRKPSPKGLPNRKGVRVGFRSQSLNREPLRKDTDLVTKRILSARLLKINELQNEVSELQVKLAELLKENKSLKRLQYRQEKALNKFEDAENEISQLIFRHNNEITALKERLRKSQEKERATEKRVKDTESELFRTKFSLQKLKEISEARHLPERDDLAKKLVSAELKLDDTERRIKELSKNLELSTNSFQRQLLAERKRAYEAHDENKVLQKEVQRLYHKLKEKERELDIKNIYSNRLPKSSPNKEKELALRKNAACQSDFADLCTKGVQTMEDFKPEEYPLTPETIMCYENKWEEPGHLTLDLQSQKQDRHGEAGILNPIMEREEKFVTDEELHVVKQEVEKLEDEWEREELDKKQKEKASLLEREEKPEWETGRYQLGMYPIQNMDKLQGEEEERLKREMLLAKLNEIDRELQDSRNLKYPVLPLLPDFESKLHSPERSPKTYRFSESSERLFNGHHLQDISFSTPKGEGQNSGNVRSPASPNEFAFGSYVPSFAKTSERSNPFSQKSSFLDFQRNSMEKLSKDGVDLITRKEKKANLMEQLFGASGSSTISSKSSDPNSVASSKGDIDPLNFLPGNKGSRDQEHDEDEGFFLSEGRSFNPNRHRLKHADDKPAVKAADSVEDEIEEVALR

SEQ ID NO: 43701 - DNA, 2094 bp, Artificial Sequence
  derived and/or modified sequence
atgggcgagcgggccggatcccctggcacggatcaggaacgaaaggccggaaaacatcactactcatacctcagtgactttgagacgccccagtcttcaggacgtagcagtcttgtctcttcttctcctgccagtgtgcggagaaaaaaccccaagcggcagactagcgacggacaggtccatcatcaggcccctcgcaaaccgagtcctaagggactgcctaaccgcaaaggggtgagagtggggtttagatcccagtccttgaaccgggagcctcttcggaaggacacagacctggtcactaagcggatcctgtccgccaggcttctaaaaatcaacgaactgcaaaatgaagtaagtgaactgcaggtgaaacttgctgagctgcttaaggaaaacaagtccctcaaacgtctgcaataccgccaggagaaggctctaaataagttcgaggatgcagagaacgagatttcacagctgatttttagacataacaacgagatcacggctctgaaagaaaggctcagaaagtcgcaagagaaggaacgggcaaccgagaaaagggtcaaggataccgaatccgagctgttcagaactaaattttcactgcagaagcttaaggaaatttcggaggcaaggcatctgccagagcgcgacgatttggcaaagaagctggtaagtgctgagctgaagcttgatgatactgaacggcgtattaaagagctctccaaaaatttggagctgtcaaccaattcatttcaaaggcaactcctggcagagcgcaagagggcatacgaagcgcacgatgaaaataaagtgctgcagaaggaggttcagcgcctctatcacaaacttaaagagaaggagagggagctggatatcaagaacatttactccaataggttgcctaaatccagcccaaataaagaaaaggagctcgcattacgaaaaaatgctgcctgccaaagtgacttcgctgacctgtgtacgaagggtgtccagactatggaggacttcaagccggaggaatacccccttacccccgagaccatcatgtgttacgagaacaaatgggaggagcccggtcacctgaccctggatctgcaatcccaaaaacaggaccgacatggggaggctggtatccttaatcctatcatggaaagggaggagaagttcgttaccgacgaagagctgcatgttgtaaagcaggaggttgaaaagctcgaggatgaatgggagagagaagagctggacaagaagcagaaggagaaggccagccttctggagagagaggagaagccagagtgggaaacaggcagataccaacttgggatgtaccccattcagaatatggacaaactgcagggggaagaggaggagaggttaaagcgagagatgctactggcaaaactcaatgaaattgaccgcgaactccaggactcacgcaacctgaaataccctgttctgccccttcttcccgactttgagtccaaattgcactcccccgagagaagcccaaagacgtatcgcttcagcgaaagcagtgaacgcctgttcaacggccaccatctccaggacatttcattttcaacccctaaaggcgagggccagaattccggaaacgtgcggtcccccgcgagtccgaacgaatttgcttttgggtcatacgtaccaagctttgcaaaaacctctgagcggtccaaccccttttcccagaagagcagcttcctggacttccaacgaaattcgatggaaaagcttagcaaggacggggtcgacctcattacaagaaaagagaagaaggccaaccttatggagcagctgtttggcgcatccggatcctctaccatcagcagcaaatcaagcgatcccaactcggtggccagcagcaaaggggacatagatcctctaaacttcttgcccggcaacaaaggatccagagatcaagagcatgacgaagacgaggggttttttctgagcgaaggacgcagtttcaacccgaataggcaccggttaaagcatgccgatgataagccagctgtgaaggcagcagacagtgtcgaggatgaaattgaggaagttgcactcaggtag

SEQ ID NO: 43702 - DNA, 2094 bp, Artificial Sequence
  derived and/or modified sequence
atgggggagagggcgggatcccccggtaccgaccaagagcggaaggccggcaaacatcattattcgtatctgtccgattttgaaaccccccagtcgtcaggccgctcgtctttagtcagtagctcacctgcgagcgtcaggagaaaaaatcctaagcgccagacatctgatgggcaggtgcaccaccaagcgcctcggaaaccatctcccaagggtctgcccaataggaaaggcgtgcgggtgggattcaggtctcaaagtctaaacagggaaccactgcggaaggataccgatcttgtgactaagaggatattgtctgcgcgcctgctgaaaattaacgagcttcagaacgaagtgagcgaactccaagtgaagctggcagagctgctgaaggaaaacaaaagtctcaaacgattgcagtataggcaggaaaaggccttgaataagttcgaggatgccgaaaatgagatctcgcaactgattttccggcacaataacgagatcactgcactaaaggagaggctacgcaagagccaggagaaggagcgcgccacagagaaaagagtaaaagacactgagagcgagctgtttagaacaaagttttcattacagaaactaaaagagatctccgaagcgagacatctgccagaacgggatgatctggctaaaaagctggtgtctgctgaactcaagctggacgatacggaaaggcgcattaaagagctcagcaagaatttggaattgagcacgaacagttttcagaggcagctcctggccgagcgcaaaagagcatacgaggcccatgacgagaataaggtcctgcaaaaggaagtgcagcgcctatatcacaaacttaaagagaaggagcgggagcttgacataaaaaatatctacagtaaccgcctgcccaaaagttccccaaacaaagagaaagagcttgcgctccgcaagaacgctgcttgtcagtccgactttgccgacttgtgcacaaaaggggttcagactatggaggatttcaagcctgaggaatatcccctcacccccgaaaccatcatgtgctatgagaataagtgggaagaacctggacatttgaccttggacctccagtcacagaaacaggaccggcatggggaggcagggattctgaaccccatcatggaaagagaggagaaatttgtgaccgacgaggagctgcatgttgtaaaacaggaggttgaaaaactggaagatgagtgggagcgcgaagagctggacaagaaacaaaaagaaaaggcatcgctgctcgagagggaggagaagcccgaatgggaaaccggtaggtatcagctcggcatgtacccaattcagaatatggacaagctgcagggggaggaggaggagcgcttaaagagggagatgcttttggccaagctcaacgagatcgatagggagctacaggattctcgcaatctgaagtatccggtcctccccctgctgcctgatttcgaatccaaattgcacagcccagagcgctcaccaaagacctataggttttctgaatcctctgagaggctgtttaacggacaccacttacaggatatctctttttctaccccgaagggggagggccagaatagcggcaatgtccgctcccctgccagccctaacgagttcgccttcgggtcgtacgtgccatcattcgctaaaacaagcgagcgttctaaccctttctcccagaagtcaagctttctggattttcagcgaaatagtatggaaaaactctccaaggacggcgttgatctgattaccaggaaagaaaaaaaggctaacctgatggaacagctgttcggcgcttctggctcatcaacgatatcgtcaaaatcctcggatccgaattctgtcgcctcctcgaaaggcgacatcgaccccctgaattttctgccgggaaacaagggctcccgcgaccaggagcacgatgaggacgaaggtttcttcctttcagaaggacgctcttttaatcccaatcgccatcgcctgaagcatgccgatgacaagccggctgtaaaagctgccgactcggtcgaagacgaaattgaggaagtcgccctccggtag

SEQ ID NO: 43703 - DNA, 4542 bp, Artificial Sequence
  derived and/or modified sequence
accctggagcccaggttaccgccgctgccacccaggagccccgatcctcgcctctgtcccatccttgtgttcaaacctcccgcatctcggcaacctcggcacccgcccggcagcctccgcaggaaccaggcacccgctctttggcggtcagacgccgaggccccagctgggagtttggtcctaagagggaaggcaaggaggcgggacgccgcatcggctctgctgaagagcctgcgggttggagggcaaaaaagtttatcttctggatgccaatgtgaattgtggtctacaaatacattgtggagaaaatagattgcacagaaatgaatattatcaggatctgaagactgtgaaaatgtttttcagtattgtcatagtctcctctggagaaaataatctgtgaaattatgtgaatagagaccatttttcaaaacaatgggggaaagagcaggaagtccaggtactgatcaagaaagaaaggcaggcaaacaccattattcttacttatctgattttgaaacgccacagtcttctggccgatcatcgctggtcagttcttcacctgcaagtgttaggagaaaaaatcctaaaagacaaacttcagatggccaagtacatcaccaagcccctcggaaaccaagccctaagggtctaccaaacagaaagggagtccgagtgggatttcgctcccagagcctcaatagagagccacttcggaaagatactgatcttgttacaaaacggattctgtctgcaagactgctaaaaatcaatgagttgcagaatgaagtatctgaactccaggtcaagttagctgagctgctaaaagaaaataaatctttgaaaaggcttcagtacagacaggagaaagccctgaataagtttgaagatgccgaaaatgaaatctcacaacttatatttcgtcataacaatgagattacagcactcaaagaacgcttaagaaaatctcaagagaaagaacgggcaactgagaaaagggtaaaagatacagaaagtgaactatttaggacaaaattttccttacagaaactgaaagagatctctgaagctagacacctacctgaacgagatgatttggcaaagaaactagtttcagcagagttaaagttagatgacaccgagagaagaattaaggagctatcgaaaaaccttgaactgagtactaacagtttccaacgacagttgcttgctgaaaggaaaagggcatatgaggctcatgatgaaaataaagttcttcaaaaggaggtacagcgactatatcacaaattaaaggaaaaggagagagaactggatataaaaaatatatattctaatcgtctgccaaagtcctctccaaataaagagaaagaacttgcattaagaaaaaatgctgcatgccagagtgattttgcagacctgtgtacaaaaggagtacaaaccatggaagacttcaagccagaagaatatcctttaactccagaaacaattatgtgttacgaaaacaaatgggaagaaccaggacatcttactttggacttgcaatctcaaaagcaagacaggcatggagaagcagggattctaaacccaattatggaaagagaagaaaaatttgttacagatgaagaactccatgtcgtaaaacaggaggttgaaaagctggaggatgaatgggaaagagaagaacttgataaaaagcaaaaagaaaaggcatctttactggaaagagaagaaaagccagagtgggaaactggaaggtaccaactaggaatgtatccaattcagaatatggataaattgcaaggagaggaagaagaaagactgaagagagaaatgctacttgctaaactgaatgaaattgacagagaactccaagattctcgaaatctaaaataccctgttttgccattgttacctgattttgaatcaaaactacactccccagagagaagccccaaaacatacaggttctctgaatcctcagagagattatttaatgggcatcatttgcaagacatcagtttctcaactccaaaaggagaaggtcagaattcaggaaatgttagaagtccagcctcccctaatgagttcgcatttggtagctacgtgccttcgtttgcaaaaacatcagagaggtcaaatccatttagtcaaaaaagtagttttttggatttccaaagaaacagtatggaaaaacttagtaaagatggtgtagatttaattacaagaaaagagaaaaaagctaatttgatggaacagttatttggtgccagtggtagcagcaccatttcctccaaaagcagtgacccaaattctgtggcttccagtaaaggagacattgaccctctaaattttctccctgggaataaaggcagcagagatcaagaacatgatgaagatgaaggctttttcctcagtgaaggaagaagttttaatccaaataggcaccgattaaaacatgcagacgataaaccagcagtaaaagcagctgattctgtagaagatgaaattgaagaagtagcactgagatgactgactagagtatacattttttctaattgtaaatattgaaatattttaatacagtatttattataaacatttagactttttaatgctaaaatgtccttattaaggaatgatttttaatagctaaatacaatgcagttaaaaagaagtagatcatacatacaccacatagatagtttgccaagaatgaaggaggcttttttgaatgaaaccaaaaataaaaatatgtcttgaaaaatgaaatagattttaactcttcatccagtgctatggcaagtttaactgcactggaggtggtattccttttctacttttattcctatttatgtatttatttttaatcatattctcactgtgctaaatacagtcttcccactaattgttgaatgaaaattaagggtgaaagtctgtgttgggaagtgtagctccggatggtggagaaccagtgcttcttaggagcccttccctttatggatagggccaggggtccctatcttacgtggcagtcctaagctactcttgagtgatagcagtcacaacattgggatttcccattcctctgaaagtacccacagctaaacactactcatttcccaatttcagtatttactgaaatcacttacctacaattctgttagaatattatgttgagttcggaagacatttctctgtttgcaaggacagttagttgctctctgtcatagcccgcagaagcttggctacagtgtaattcctctccttgttctcctacactctttgtatctcagtgactgggtgtaagatttcatgccaaatgcaaggaatagtggaaatacataccaactgcaaagaatagaaaaactttatcccaatatattatagaaagatcttcagttcaattatgtccagagtaatataatttggcaatgttaatgcttttaagatttgaacttgtcctcaaaccaaggagacaacaatagtgtaatactattggacttacaggattagttttaaagcaactttgaatagaagtgtttcagacataggacttctgccttgttgactagagtggatagttttctgtttaaatgcattggtcttttggctgtttgtaattcacttcagcttatagagaagttgatgaccttggatcatgctgggtatgattggtctttaaaaagcagtaatataccaccagcccaaggagaaaacattgttaaaatgaagagtggtggaaatagtgtgttgggaagaataaaaaatttagattggcacttattctaaagtgagctgtttttttcaagaatttactagcatttgctcgtagtatgatttctgacgccagtcatatatactgatgaggggaaggagttactgtgttattctgagttcttataaatgcatattattgaatttcattgcatgactatttgtcaagacttacctggttaggtctccaattaaaagatgtaccacctgtcatcttctaaattgtgttcctttcatttattgggaacagaatctctcaaaagtgctaaactatattaaaaagttttcttaatagatttgtatgtctgatatgtataaccatttactataatatgttgcaaatcattctaatatatgtaaaacaatattatttgtaatgcagttattggtaaaatattatgtaatgttaattttgttcctagctgctaatttttctgccaaaagtattctaattttcaggttgttttaaaggcttttaaaactttttagttaagttttttattcacgtcatttaaattagttttttgctttttttctacctgataatctctttaacaagatgcaacaagacagaattattaaaattaaacctaaagttaagttacagatttaaaggcattatgatattaagcattaaaattggagattaaaatgtacaaaacagggttttccttatgaacaaaccttacagggtaaattgtttttttttctaaatgtcattaaatttatttgtactcagaactgttactaataaaaattaaaaatgca

SEQ ID NO: 43704 - DNA, 4719 bp, Artificial Sequence
  derived and/or modified sequence
agtctaggcctccgcctccgttaccctggagcccaggttaccgccgctgccacccaggagccccgatcctcgcctctgtcccatccttgtgttcaaacctcccgcatctcggcaacctcggcacccgcccggcagcctccgcaggaaccaggcacccgctctttggcggtcagacgccgaggccccagctgggagtttggtcctaagagggaaggcaaggaggcgggacgccgcatcggctctgctgaagagcctgcgggttggaggtgggctttgaagtgggcgtggagacggcgggggaggtggaggtgcgagtataaatgatcaaccagaaattatcttcaaaggaataaaaccagaagtatgtaaataaaaagcccaagataaagaaacagaaaagctgacactacatgaagcagagggcaaaaaagtttatcttctggatgccaatgtgaattgtggtctacaaatacattgtggagaaaatagattgcacagaaatgaatattatcaggatctgaagactgtgaaaatgtttttcagtattgtcatagtctcctctggagaaaataatctgtgaaattatgtgaatagagaccatttttcaaaacaatgggggaaagagcaggaagtccaggtactgatcaagaaagaaaggcaggcaaacaccattattcttacttatctgattttgaaacgccacagtcttctggccgatcatcgctggtcagttcttcacctgcaagtgttaggagaaaaaatcctaaaagacaaacttcagatggccaagtacatcaccaagcccctcggaaaccaagccctaagggtctaccaaacagaaagggagtccgagtgggatttcgctcccagagcctcaatagagagccacttcggaaagatactgatcttgttacaaaacggattctgtctgcaagactgctaaaaatcaatgagttgcagaatgaagtatctgaactccaggtcaagttagctgagctgctaaaagaaaataaatctttgaaaaggcttcagtacagacaggagaaagccctgaataagtttgaagatgccgaaaatgaaatctcacaacttatatttcgtcataacaatgagattacagcactcaaagaacgcttaagaaaatctcaagagaaagaacgggcaactgagaaaagggtaaaagatacagaaagtgaactatttaggacaaaattttccttacagaaactgaaagagatctctgaagctagacacctacctgaacgagatgatttggcaaagaaactagtttcagcagagttaaagttagatgacaccgagagaagaattaaggagctatcgaaaaaccttgaactgagtactaacagtttccaacgacagttgcttgctgaaaggaaaagggcatatgaggctcatgatgaaaataaagttcttcaaaaggaggtacagcgactatatcacaaattaaaggaaaaggagagagaactggatataaaaaatatatattctaatcgtctgccaaagtcctctccaaataaagagaaagaacttgcattaagaaaaaatgctgcatgccagagtgattttgcagacctgtgtacaaaaggagtacaaaccatggaagacttcaagccagaagaatatcctttaactccagaaacaattatgtgttacgaaaacaaatgggaagaaccaggacatcttactttggacttgcaatctcaaaagcaagacaggcatggagaagcagggattctaaacccaattatggaaagagaagaaaaatttgttacagatgaagaactccatgtcgtaaaacaggaggttgaaaagctggaggatgaatgggaaagagaagaacttgataaaaagcaaaaagaaaaggcatctttactggaaagagaagaaaagccagagtgggaaactggaaggtaccaactaggaatgtatccaattcagaatatggataaattgcaaggagaggaagaagaaagactgaagagagaaatgctacttgctaaactgaatgaaattgacagagaactccaagattctcgaaatctaaaataccctgttttgccattgttacctgattttgaatcaaaactacactccccagagagaagccccaaaacatacaggttctctgaatcctcagagagattatttaatgggcatcatttgcaagacatcagtttctcaactccaaaaggagaaggtcagaattcaggaaatgttagaagtccagcctcccctaatgagttcgcatttggtagctacgtgccttcgtttgcaaaaacatcagagaggtcaaatccatttagtcaaaaaagtagttttttggatttccaaagaaacagtatggaaaaacttagtaaagatggtgtagatttaattacaagaaaagagaaaaaagctaatttgatggaacagttatttggtgccagtggtagcagcaccatttcctccaaaagcagtgacccaaattctgtggcttccagtaaaggagacattgaccctctaaattttctccctgggaataaaggcagcagagatcaagaacatgatgaagatgaaggctttttcctcagtgaaggaagaagttttaatccaaataggcaccgattaaaacatgcagacgataaaccagcagtaaaagcagctgattctgtagaagatgaaattgaagaagtagcactgagatgactgactagagtatacattttttctaattgtaaatattgaaatattttaatacagtatttattataaacatttagactttttaatgctaaaatgtccttattaaggaatgatttttaatagctaaatacaatgcagttaaaaagaagtagatcatacatacaccacatagatagtttgccaagaatgaaggaggcttttttgaatgaaaccaaaaataaaaatatgtcttgaaaaatgaaatagattttaactcttcatccagtgctatggcaagtttaactgcactggaggtggtattccttttctacttttattcctatttatgtatttatttttaatcatattctcactgtgctaaatacagtcttcccactaattgttgaatgaaaattaagggtgaaagtctgtgttgggaagtgtagctccggatggtggagaaccagtgcttcttaggagcccttccctttatggatagggccaggggtccctatcttacgtggcagtcctaagctactcttgagtgatagcagtcacaacattgggatttcccattcctctgaaagtacccacagctaaacactactcatttcccaatttcagtatttactgaaatcacttacctacaattctgttagaatattatgttgagttcggaagacatttctctgtttgcaaggacagttagttgctctctgtcatagcccgcagaagcttggctacagtgtaattcctctccttgttctcctacactctttgtatctcagtgactgggtgtaagatttcatgccaaatgcaaggaatagtggaaatacataccaactgcaaagaatagaaaaactttatcccaatatattatagaaagatcttcagttcaattatgtccagagtaatataatttggcaatgttaatgcttttaagatttgaacttgtcctcaaaccaaggagacaacaatagtgtaatactattggacttacaggattagttttaaagcaactttgaatagaagtgtttcagacataggacttctgccttgttgactagagtggatagttttctgtttaaatgcattggtcttttggctgtttgtaattcacttcagcttatagagaagttgatgaccttggatcatgctgggtatgattggtctttaaaaagcagtaatataccaccagcccaaggagaaaacattgttaaaatgaagagtggtggaaatagtgtgttgggaagaataaaaaatttagattggcacttattctaaagtgagctgtttttttcaagaatttactagcatttgctcgtagtatgatttctgacgccagtcatatatactgatgaggggaaggagttactgtgttattctgagttcttataaatgcatattattgaatttcattgcatgactatttgtcaagacttacctggttaggtctccaattaaaagatgtaccacctgtcatcttctaaattgtgttcctttcatttattgggaacagaatctctcaaaagtgctaaactatattaaaaagttttcttaatagatttgtatgtctgatatgtataaccatttactataatatgttgcaaatcattctaatatatgtaaaacaatattatttgtaatgcagttattggtaaaatattatgtaatgttaattttgttcctagctgctaatttttctgccaaaagtattctaattttcaggttgttttaaaggcttttaaaactttttagttaagttttttattcacgtcatttaaattagttttttgctttttttctacctgataatctctttaacaagatgcaacaagacagaattattaaaattaaacctaaagttaagttacagatttaaaggcattatgatattaagcattaaaattggagattaaaatgtacaaaacagggttttccttatgaacaaaccttacagggtaaattgtttttttttctaaatgtcattaaatttatttgtactcagaactgttactaataaaaattaaaaatgca

SEQ ID NO: 43705 - DNA, 2094 bp, Artificial Sequence
  derived and/or modified sequence
atgggagagagagctggcagccctggaacagaccaggagaggaaggccggcaagcaccactacagctacctgagtgactttgagaccccccagagcagcggccgcagcagcctggtgagcagcagccctgcctctgtgcggaggaagaaccccaagaggcagaccagtgatggccaggtgcaccaccaggcccccaggaagcccagccccaagggcctgcccaacagaaaaggagtgcgggtgggcttccgcagccagagcctgaaccgggagcccctgaggaaggacacagacctggtgaccaagaggatcctgagcgcccggctgctgaagatcaatgagctgcagaatgaggtgtctgagctgcaggtgaagctggccgagctgctgaaggagaacaagagcctgaagaggctgcagtaccggcaggagaaggccctgaacaagtttgaagatgctgaaaatgagatcagccagctgatcttccgccacaacaatgagatcacagccctgaaggagcggctgaggaagagccaggagaaggagcgggccacagagaagagggtgaaggacacagagagcgagctgttccgcaccaagttcagcctgcagaagctgaaggagatcagcgaggcccggcacctgcctgagagagatgacctggccaagaagctggtgtctgctgagctgaagctggatgacacagaaagacgcatcaaggagctgagcaagaacctggagctgagcaccaacagcttccagaggcagctgctggccgagaggaagagggcctatgaggcccatgatgagaacaaggtgctgcagaaggaggtgcagaggctgtaccacaagctgaaggagaaggagcgggagctggacatcaagaacatctacagcaaccggctgcccaagagcagccccaacaaggagaaggagctggccctgaggaagaatgctgcctgccagagcgactttgctgacctgtgcaccaagggcgtgcagaccatggaggacttcaagccagaggagtaccccctgaccccagagaccatcatgtgctatgagaacaagtgggaggagcccggccacctgaccctggacctgcagagccagaagcaggacagacatggagaggccggcatcctgaaccccatcatggagcgggaggagaagtttgtgacagatgaggagctgcacgtggtgaagcaggaggtggagaagctggaggatgagtgggagcgggaggagctggacaagaagcagaaggagaaggccagcctgctggagcgggaggagaagccagagtgggagaccggccgctaccagctgggcatgtaccccatccagaacatggacaagctgcagggcgaggaggaggagcggctgaagcgggagatgctgctggccaagctgaatgaaattgaccgggagctgcaggacagcaggaacctgaagtaccctgtgctgcccctgctgcctgactttgagagcaagctgcacagccctgagaggagccccaagacctaccgcttcagcgagagcagcgagcggctcttcaacggccaccacctgcaggacatctccttcagcacccccaagggggagggccagaacagcggaaatgtgcgcagccctgccagccccaatgaatttgccttcggcagctatgtgcccagctttgccaagaccagcgagaggagcaaccccttcagccagaagagcagcttcctggacttccagagaaattccatggagaagctgagcaaggatggagtggacctgatcaccaggaaggagaagaaggccaacctgatggagcagctgtttggagccagcggcagcagcaccatcagcagcaagagcagtgaccccaacagcgtggccagcagcaaaggagacatcgaccccctgaacttcctgcccggcaacaagggcagccgggaccaggagcatgatgaagatgagggcttcttcctgtctgagggccgctccttcaaccccaacagacaccggctgaagcatgctgatgacaagccagctgtgaaggctgctgacagcgtggaggatgaaattgaggaggtggccctgaggtag

SEQ ID NO: 43706 - DNA, 2094 bp, Artificial Sequence
  derived and/or modified sequence
atgggcgagcgggccggcagccccggcaccgaccaggagcggaaggccggtaagcatcattattcgtacctgtccgacttcgagacgcctcagtcgtctggacggagtagcctggtgtctagctccccagccagcgtgaggagaaagaaccctaaaaggcagacctcggatgggcaggtgcaccaccaggctcccaggaagccttctccaaaggggctgccaaaccgtaagggagttcgcgtgggcttccgtagtcagtccctgaatcgggagcctctcagaaaggacacggacctggtcactaaaaggatcctcagcgcaagactgctcaaaataaatgagctgcagaatgaggtgagtgagttgcaggtcaaattggcagagctcttaaaagaaaacaagtctctcaagcgattgcaatatcggcaagagaaagcattaaacaagtttgaagacgcagaaaatgaaatctcgcagctcatctttaggcacaacaacgaaatcaccgccctcaaggagcgactccgcaagtctcaggaaaaggagagagctaccgaaaagcgagttaaggatactgaatctgagcttttcaggaccaagttctcattgcaaaaactgaaggaaattagtgaggcgaggcacctgccagagagggacgatctagccaaaaaactggtaagcgcagagctgaaactggatgacaccgagaggagaatcaaggagcttagcaagaatttagaactgagcacgaattctttccagcgacagctgctggccgaacggaagcgggcctacgaggcccacgatgaaaacaaagttctccagaaagaggtccagagactctaccataaactcaaggaaaaggaacgagaacttgacattaaaaatatttatagtaatagacttcctaaatcctcccccaataaggagaaagagcttgctttaaggaaaaatgcggcatgccagagcgacttcgctgacctatgcaccaagggcgtgcagacaatggaagattttaagccagaggagtacccactcaccccagagacaattatgtgctatgaaaacaaatgggaagagccgggccatctgaccctggatctgcagtcccaaaagcaggaccgtcacggcgaggctggcatcttgaatcccatcatggagcgcgaagaaaaattcgtgactgacgaagagctgcacgtcgtgaagcaggaggtggagaagcttgaagacgagtgggagcgtgaggagctagataaaaaacagaaagaaaaggcctcgctcctggagagggaagagaagccagagtgggaaacaggaaggtatcagcttggcatgtatcctatacagaacatggacaagctgcagggtgaggaagaagagcggttgaagagagagatgctgttagctaaacttaacgagatcgatagagagcttcaagattcaagaaatcttaagtaccccgtgctgcccttactcccagattttgagagtaaactccactcgcctgagcggtcacccaagacatatagattctcggaatctagcgagaggctgttcaacggtcatcacctgcaagacatatctttctccacacccaagggcgaggggcagaactctggaaatgtccgtagccctgcgagccctaacgagttcgccttcgggtcatacgtcccctctttcgccaagacctccgagagatctaaccccttctctcagaaaagttcgtttttagattttcagcggaattctatggagaaactgagcaaagatggggtcgacttgattaccaggaaggaaaagaaggcgaatttaatggagcagctgttcggcgccagcggaagcagcacaatttcatctaaatcgtctgatccaaactctgttgcctcgtcaaagggcgatatcgatcccctgaattttctccctggcaacaaagggagccgtgatcaggaacacgatgaggacgaggggtttttcctgtcagaggggcggtctttcaatccgaaccgacaccgactcaaacatgccgatgataaacccgctgtgaaggctgcagatagcgtggaggacgagatcgaggaagtggcgttgcggtag

SEQ ID NO: 43707 - DNA, 2094 bp, Artificial Sequence
  derived and/or modified sequence
atgggcgagcgggccggcagccccggcaccgaccaggagcggaaggccggcaaacaccattacagttatctctcagatttcgagacccctcagagctccggccggtccagcctagtcagctcctctcctgccagcgttcggaggaagaaccccaagcgtcagacctcagacggacaggtccaccaccaggccccgcggaagccttctcctaaaggcctccccaatcggaaaggcgttagggtggggttccgaagtcaaagcttaaacagagagccactgcgcaaggacacagacctggtgacaaagagaattctgagcgcccggctgcttaagattaacgaacttcaaaatgaggtcagtgaactgcaggtcaagctcgcagaacttctgaaagagaacaagagccttaaaaggctgcagtacagacaggagaaagccctgaataagtttgaggacgcggagaacgaaattagccagctcatcttcagacacaacaatgagatcaccgccctgaaggagcggttgcgcaagtcacaggagaaggagcgcgcgaccgagaaacgcgtgaaagataccgagagtgagctgttccggaccaagttctccctccagaagctgaaggagataagcgaggccaggcatttgcctgagagagacgatctggcaaagaagttggtatctgctgagctgaaacttgatgacaccgaaaggaggatcaaggagctgtccaagaatctcgagctttcgactaactctttccagagacagctactcgctgagcggaaacgggcttatgaagcacatgatgagaacaaagttcttcaaaaggaggtccagcgcctttatcacaagctcaaggagaaggagagagagctggacattaagaacatttattcaaatcgtctgcccaaatcaagcccaaacaaggaaaaggagttagcactccggaagaacgcagcctgtcagagtgactttgccgatctttgcaccaaaggcgttcagaccatggaggacttcaaaccagaggaataccccctcacaccagaaacaattatgtgttatgagaacaagtgggaagagccaggacacctgacgttagatcttcagtctcaaaagcaggaccgacatggagaggccggtatcctgaatccgattatggagcgagaagagaagtttgttactgacgaagagttgcacgtcgtcaagcaagaagtagagaagctggaagatgagtgggagcgggaagagcttgacaaaaaacaaaaggaaaaagcttccttactcgaacgtgaggagaaacccgagtgggagacaggcagatatcagctgggaatgtaccccatccagaacatggataaacttcagggcgaggaggaggagcgtctgaagagggaaatgctcctagccaaacttaatgagatcgaccgcgagttgcaggactctcgcaaccttaaatatcccgtgctccctctgctcccagactttgagtctaagctccatagcccagagcggagcccaaaaacctataggttttctgaatccagcgaacgactttttaacgggcaccatctgcaggacatatcattcagtacgccgaagggggagggacagaacagcgggaacgtgcgctctcctgcatcacccaacgagtttgccttcggatcttacgtgccttccttcgccaaaacatcagagcgatccaaccccttcagccagaagtcttcatttctggacttccagcgaaatagtatggaaaaactaagtaaggatggggtggatttgataacgagaaaggaaaaaaaggctaatttgatggaacaactgtttggagcttccgggtcgtctacaatctcctccaaaagctccgacccaaattccgtagcctctagcaaaggggatattgatcccttaaactttttgcctggcaataaggggtccagggaccaggaacacgatgaggacgaaggcttcttcctgagtgaagggcgaagcttcaaccctaatagacacagactgaaacacgctgacgacaagcccgctgtaaaggcggccgacagtgtggaagacgagatagaggaagtggcccttcgctag

SEQ ID NO: 43708 - DNA, 2094 bp, Artificial Sequence
  derived and/or modified sequence
atgggcgaacgggctgggtctcctgggactgatcaagagcgaaaggcgggtaaacatcactactcttacctgagtgacttcgagaccccacagagcagcggacgtagttccttagtgtctagtagccctgcctctgtgcgtcgcaagaatccgaagcgacagacaagcgacggacaagtgcaccatcaggcccctagaaagccctctcctaaaggccttcctaatcgcaagggggtaagagtagggttccgctcacagtctctgaatagggagccacttcggaaggacaccgacctggtgaccaagcggatcctctcagcccgactgctgaaaatcaatgaactgcagaacgaggttagcgagctccaggtcaagctggcagagcttctgaaggagaacaaatcactgaaacgactgcagtaccggcaggaaaaagccctgaataagttcgaggacgctgaaaatgaaattagtcaattgatcttccggcacaataatgagataaccgcattaaaagagcgactgcgcaaatcccaggaaaaagagcgcgctacagagaagagggttaaggatactgagtccgaattattcaggaccaaattcagccttcagaaactaaaggaaatctctgaagcccgtcaccttcctgaacgcgacgacttggccaagaagttggtgagtgcggagttaaagctggacgacacggagcgacgcataaaggagctttctaaaaatctggaattaagcactaacagctttcaacggcagctgctcgcagagagaaagcgggcatatgaggcccatgacgagaacaaagtgcttcagaaggaagtgcaacgcctgtaccataaactgaaagagaaagagcgagagctcgatattaaaaacatatattccaaccgtctgcccaaaagctccccgaacaaagaaaaagagctcgccctccgtaaaaacgccgcatgccagtcagacttcgctgacctctgtaccaaaggtgtgcagacgatggaagacttcaaacctgaggaatatccactgacacctgaaaccatcatgtgctacgagaataaatgggaagaacctggacatcttacactcgacctgcagagccaaaagcaagacagacatggtgaagcaggcatcttgaatcccataatggagagagaggaaaaattcgtgactgatgaggagttgcatgttgtgaagcaggaggttgaaaaactcgaggatgaatgggagagagaggagcttgataagaaacagaaagagaaagccagtcttctcgagagagaggagaagcctgagtgggaaactgggcgataccagttgggaatgtatcccatccagaatatggataagctccagggcgaggaagaggaaagacttaagcgggagatgctgctggcaaagctgaatgaaatcgacagagagctccaagactcgagaaacttgaagtaccccgtgctccccctcctccccgatttcgagtctaagctgcacagccccgaaaggagccctaagacctatagatttagtgagtccagtgaacgacttttcaacgggcaccacctccaggatatctctttttccacgcctaaaggggaggggcagaactctggtaatgtgcggagtcccgcttcacccaacgagtttgccttcggctcctatgtcccctctttcgccaaaacttcagaacgtagcaatcctttctcccagaagtctagctttctggacttccagagaaacagcatggagaagctgagcaaagatggagttgatctcataacccgcaaagagaagaaagcaaatctcatggagcagctattcggcgcaagcgggtcctccactatcagtagcaagagttctgaccccaattctgtggcaagtagtaaaggcgatatagaccccctgaactttctgccaggcaataagggatctcgagaccaggaacacgatgaggatgagggcttcttcctgtccgaaggtcggtccttcaacccaaaccgtcaccggctgaagcatgccgacgacaagcctgcagttaaagcagctgactcagtagaagacgagatagaagaagtggctctgcgttag

SEQ ID NO: 43709 - DNA, 2094 bp, Artificial Sequence
  derived and/or modified sequence
atgggcgaacgtgctggctctccaggcacagaccaggagagaaaggcgggaaaacaccactacagctacctttctgattttgaaacccctcaatcatccggcagatcctcactggtcagcagcagcccggcatccgtacggcgtaagaatccaaaaaggcagaccagtgacggacaggtgcaccaccaagcccctagaaaaccatcgccaaaggggctacctaatcgcaagggagtccgcgtcggctttcgatcacagtccttgaaccgtgaacccttgcgaaaggacactgacctcgtcacaaaacgaatcctcagtgctagactgctcaagatcaatgagctgcagaacgaggtgtccgaattgcaggtcaagctggcagaactcctcaaagagaacaagtctttgaaacggctgcagtacagacaggaaaaggcactgaacaagttcgaggacgccgaaaatgagatcagccaattgatctttcgccacaacaatgagattacagctctaaaggaacgacttcggaagagtcaggaaaaggagagagccactgagaaacgagtgaaagatacagagtccgaactgttccgaacaaagttcagccttcagaaactaaaggagatatcagaggccagacacttacctgagcgggacgacctcgctaagaagctggtctccgctgagctgaagcttgatgacaccgaaaggagaattaaagagctttccaagaatctggaattgtcgaccaactctttccagcggcaactgcttgccgagcggaaaagggcctacgaagcacacgatgaaaataaagtattgcagaaagaggttcagcgattataccacaagctgaaggagaaggagcgggaactggatataaagaacatatacagcaacagactgcctaagtcatcgccgaacaaggagaaggaattggctctcagaaagaatgcagcctgtcaatcagattttgcggatttatgtacaaaaggagtacagacaatggaggacttcaagccagaagaataccccctcaccccggaaaccattatgtgctacgagaataagtgggaggagccaggccacctgaccttagacctccaaagccaaaaacaagaccgccacggggaggccggtattttgaaccccatcatggagcgtgaggagaagtttgtgacagacgaggaattgcatgttgtgaaacaggaggtggagaagcttgaagacgaatgggagagggaggagctggataaaaaacagaaagagaaggcttccttgctggaaagggaggaaaagcctgaatgggagacagggaggtaccagctgggcatgtatccaatacagaacatggacaagctccaaggagaggaggaagaacgactcaagcgcgagatgctgcttgccaagctaaacgaaatcgacagagagttgcaagattccagaaatctcaagtaccccgtgttgcctcttcttcctgattttgagagtaagctgcactcacccgagcgctcccctaaaacataccgattctccgagtcctcagagagacttttcaatggtcaccatctgcaggatattagtttctccaccccaaagggtgagggtcagaactcaggcaatgtgcgatcaccagcgagcccgaatgaattcgccttcggttcctacgtcccgtcctttgccaaaacctctgagcgatccaatccctttagtcagaagagcagcttccttgattttcagaggaatagtatggagaagctgtccaaagacggggtagacttaataacccgaaaggaaaaaaaagctaacctcatggaacagctgttcggggctagtgggtcctccacaatcagttctaagtcctcggaccccaacagtgtagcttcttccaagggagacattgacccgctgaattttctacctggaaacaagggatccagagaccaggagcatgatgaagatgagggtttctttctgtccgaaggaaggtcctttaaccccaatagacaccgcctaaaacatgcagacgataagcccgcagtaaaagccgctgattcagtggaggacgagattgaggaggtggccttgcgatag

SEQ ID NO: 43710 - DNA, 2094 bp, Artificial Sequence
  derived and/or modified sequence
atgggcgagagagccggcagccccggcaccgaccaggagagaaaggccggcaagcaccactacagctacctgagcgacttcgagaccccccagagcagcggcagaagcagcctggtgagcagcagccccgccagcgtgagaagaaagaaccccaagagacagaccagcgacggccaggtgcaccaccaggcccccagaaagcccagccccaagggcctgcccaacagaaagggcgtgagagtgggcttcagaagccagagcctgaacagagagcccctgagaaaggacaccgacctggtgaccaagagaatcctgagcgccagactgctgaagatcaacgagctgcagaacgaggtgagcgagctgcaggtgaagctggccgagctgctgaaggagaacaagagcctgaagagactgcagtacagacaggagaaggccctgaacaagttcgaggacgccgagaacgagatcagccagctgatcttcagacacaacaacgagatcaccgccctgaaggagagactgagaaagagccaggagaaggagagagccaccgagaagagagtgaaggacaccgagagcgagctgttcagaaccaagttcagcctgcagaagctgaaggagatcagcgaggccagacacctgcccgagagagacgacctggccaagaagctggtgagcgccgagctgaagctggacgacaccgagagaagaatcaaggagctgagcaagaacctggagctgagcaccaacagcttccagagacagctgctggccgagagaaagagagcctacgaggcccacgacgagaacaaggtgctgcagaaggaggtgcagagactgtaccacaagctgaaggagaaggagagagagctggacatcaagaacatctacagcaacagactgcccaagagcagccccaacaaggagaaggagctggccctgagaaagaacgccgcctgccagagcgacttcgccgacctgtgcaccaagggcgtgcagaccatggaggacttcaagcccgaggagtaccccctgacccccgagaccatcatgtgctacgagaacaagtgggaggagcccggccacctgaccctggacctgcagagccagaagcaggacagacacggcgaggccggcatcctgaaccccatcatggagagagaggagaagttcgtgaccgacgaggagctgcacgtggtgaagcaggaggtggagaagctggaggacgagtgggagagagaggagctggacaagaagcagaaggagaaggccagcctgctggagagagaggagaagcccgagtgggagaccggcagataccagctgggcatgtaccccatccagaacatggacaagctgcagggcgaggaggaggagagactgaagagagagatgctgctggccaagctgaacgagatcgacagagagctgcaggacagcagaaacctgaagtaccccgtgctgcccctgctgcccgacttcgagagcaagctgcacagccccgagagaagccccaagacctacagattcagcgagagcagcgagagactgttcaacggccaccacctgcaggacatcagcttcagcacccccaagggcgagggccagaacagcggcaacgtgagaagccccgccagccccaacgagttcgccttcggcagctacgtgcccagcttcgccaagaccagcgagagaagcaaccccttcagccagaagagcagcttcctggacttccagagaaacagcatggagaagctgagcaaggacggcgtggacctgatcaccagaaaggagaagaaggccaacctgatggagcagctgttcggcgccagcggcagcagcaccatcagcagcaagagcagcgaccccaacagcgtggccagcagcaagggcgacatcgaccccctgaacttcctgcccggcaacaagggcagcagagaccaggagcacgacgaggacgagggcttcttcctgagcgagggcagaagcttcaaccccaacagacacagactgaagcacgccgacgacaagcccgccgtgaaggccgccgacagcgtggaggacgagatcgaggaggtggccctgagatag

SEQ ID NO: 43711 - protein, 1192 aa, Artificial Sequence
  derived and/or modified sequence
MSRGAGALQRRTTTYLISLTLVKLESVPPPPPSPSAAAAGAAGARGSETGDPGSPRGAEEPGKKRHERLFHRQDALWISTSSAGTGGAEPPALSPAPASPARPVSPAPGRRLSLWAVPPGPPLSGGLSPDPKPGGAPTSSRRPLLSSPSWGGPEPEGRAGGGIPGSSSPHPGTGSRRLKVAPPPPAPKPCKTVTTSGAKAGGGKGAGSRLSWPESEGKPRVKGSKSSAGTGASVSAAATAAAAGGGGSTASTSGGVGAGAGARGKLSPRKGKSKTLDNSDLHPGPPAGSPPPLTLPPTPSPATAVTAASAQPPGPAPPITLEPPAPGLKRGREGGRASTRDRKMLKFISGIFTKSTGGPPGSGPLPGPPSLSSGSGSRELLGAELRASPKAVINSQEWTLSRSIPELRLGVLGDARSGKSSLIHRFLTGSYQVLEKTESEQYKKEMLVDGQTHLVLIREEAGAPDAKFSGWADAVIFVFSLEDENSFQAVSRLHGQLSSLRGEGRGGLALALVGTQDRISASSPRVVGDARARALCADMKRCSYYETCATYGLNVDRVFQEVAQKVVTLRKQQQLLAACKSLPSSPSHSAASTPVAGQASNGGHTSDYSSSLPSSPNVGHRELRAEAAAVAGLSTPGSLHRAAKRRTSLFANRRGSDSEKRSLDSRGETTGSGRAIPIKQSFLLKRSGNSLNKEWKKKYVTLSSNGFLLYHPSINDYIHSTHGKEMDLLRTTVKVPGKRPPRAISAFGPSASINGLVKDMSTVQMGEGLEATTPMPSPSPSPSSLQPPPDQTSKHLLKPDRNLARALSTDCTPSGDLSPLSREPPPSPMVKKQRRKKLTTPSKTEGSAGQAEAKRKMWKLKSFGSLRNIYKAEENFEFLIVSSTGQTWHFEAASFEERDAWVQAIESQILASLQCCESSKVKLRTDSQSEAVAIQAIRNAKGNSICVDCGAPNPTWASLNLGALICIECSGIHRNLGTHLSRVRSLDLDDWPRELTLVLTAIGNDTANRVWESDTRGRAKPSRDSSREERESWIRAKYEQLLFLAPLSTSEEPLGRQLWAAVQAQDVATVLLLLAHARHGPLDTSVEDPQLRSPLHLAAELAHVVITQLLLWYGADVAARDAQGRTALFYARQAGSQLCADILLQHGCPGEGGSAATTPSAATTPSITATPSPRRRSSAASVGRADAPVALV

SEQ ID NO: 43712 - DNA, 3579 bp, Artificial Sequence
  derived and/or modified sequence
atgagcaggggggccggtgcactgcaacgacggaccacgacatatttaatttcgttaacgctggtgaagttagagagcgtacctcctcctccaccttccccaagcgccgccgccgccggggccgctggggcacggggttcggaaactggagatccgggttctccacggggggctgaagaacccggcaagaagcgccatgagcgactttttcataggcaagacgcgttatggattagcaccagctccgccggaaccgggggagcggaacctcctgcgctttcgcccgccccagcctcaccagcaaggcctgtgagcccagcaccaggtcgcaggttgtccctctgggcagtgcctccggggccgccactgagcggggggctgtcccccgacccaaaaccgggaggggcacccactagctcaagaaggcccctgctgtctagtccaagttggggcgggcctgagcccgaaggccgcgccggcgggggcattccaggatcttccagtccccatcccggaacgggctcccggcggttgaaggtggcccctcctcctcctgcacctaaaccatgtaagactgtgaccactagcggagccaaagccgggggaggtaaaggcgcaggaagccggctgtcctggccagagtccgaaggcaaaccaagggtaaaaggatctaagtcgtctgccggaactggagcttcagtcagcgcagccgctacagccgcggccgcggggggaggcgggagtactgcatctacctcgggtggtgtaggggcaggcgctggtgctagggggaaactgagccctcgaaaaggcaaaagcaaaacactggacaactctgatctgcatccagggcctccagctggctctcctccccccttaacactgccaccgaccccttcacctgccacagccgtgaccgccgcctctgcccagcctcccggtcctgcccctcccatcaccttggagccccccgcccccggcctgaagaggggccgagagggggggagagcaagcacccgggaccgcaagatgctcaaatttatttctggcatatttaccaaatcaacaggcgggcccccaggctctggtcccttgccaggtcctccctcacttagttctgggagcggcagtagagaactgctcggcgcggaactgcgagcctcacctaaggccgtgatcaactcccaggagtggactttgagcagaagcatccccgaacttaggcttggcgtgcttggagatgcccgcagtgggaaatcttctttgattcaccgattcttgacaggctcgtatcaggtactggagaagacagagtccgagcaatataagaaagagatgttggtggacggtcagacacacctcgtgctgatacgcgaagaggctggtgcccctgatgccaagtttagcgggtgggctgacgccgtcatttttgtcttctctctggaagacgaaaatagctttcaggccgtgagcaggctgcatggacagctctcttctttgagaggagaaggtcgcgggggtttggccttggcactggtgggcacccaggacaggattagtgcttcctccccacgcgttgttggtgacgcgcgtgcgagggcgctgtgtgcggatatgaagcgctgctcatactacgaaacgtgtgccacttacggccttaatgtagacagagtgttccaggaggtggcgcagaaggtggtaactctgaggaaacagcagcaactgctggcggcttgtaagtccctcccctcttctccatcacactccgccgcctcgactcccgtggctggccaagcgtcaaatggcgggcatacaagtgactactcctctagtttgccgagctcacctaatgtgggtcatagagaactgcgcgccgaggcagcggccgtggctgggctctctaccccaggcagcctacatcgagctgccaaacggcgaacctccctctttgccaatagaaggggaagcgacagtgagaagagatcactggatagtaggggcgaaacaacaggaagtgggcgcgccatcccgataaaacaaagtttcctattaaagaggagtggcaattcactgaataaggagtggaagaagaaatatgtgaccctgagttcaaacggcttcctcttatatcatcccagcataaacgactacattcattctacacacggaaaagaaatggatttgctgcgcactaccgtgaaggtgcccggcaaacggcccccaagagcgatttcagccttcggtccatctgcaagtatcaacggactcgtcaaggacatgtcaacagtacaaatgggggaagggttagaagcgacaacccccatgccttcccctagcccatcccctagttccctgcagcccccgcccgaccagacctcaaaacacctgctgaaacccgacaggaacctggcccgtgcactgagcacagactgcacaccatccggagaccttagtcccttgtcaagagagccaccgccttctccaatggtcaaaaaacagaggcgaaaaaagctgacgacaccctccaagactgagggtagcgctggacaggcggaagccaagcgcaaaatgtggaaattgaaatcattcggctcactacgtaacatatacaaagccgaagaaaatttcgagttcctcatcgtgtcaagcacgggtcagacttggcacttcgaggcggcatctttcgaagaacgagacgcatgggtgcaggctatcgagagccaaatactggcttccctgcaatgctgtgaaagctctaaggtgaagcttaggaccgacagtcagagtgaagctgtggccatccaggctatccgaaacgctaagggaaactctatttgtgtcgattgtggggcccctaaccctacttgggccagtttaaacctaggcgcactgatttgcatcgaatgtagtggaatccaccggaatcttggcactcacttaagccgcgtacgatccctcgacctcgatgattggccccgcgaactgaccctggtgctcactgccattgggaatgacacagccaaccgtgtgtgggagtctgacacccgggggagggctaagcccagcagggactcctctagggaggaacgcgagtcctggatacgcgctaaatacgagcagctgctgttcttagccccactgtcaacatcagaagagcctttaggacggcaactttgggccgcagtacaggctcaagacgtggctaccgtcctcttgttgctcgctcatgcaaggcatggccctctcgatactagcgtggaagatccccaactgcgtagtcctctgcatttagctgcagagctcgctcacgttgtgatcacccagttattgctatggtacggtgccgacgtcgccgcccgtgatgcccagggaagaacagctctgttctacgcgaggcaagctgggagccagctctgcgccgacattctgctccagcacggctgtccaggcgaaggcgggagcgcggctacaacgcctagcgccgctacaacaccttccatcaccgcaacaccttcacctcgcaggaggtcctccgcagccagcgttggaagagcggacgcacctgtagcactggtgtag

SEQ ID NO: 43713 - DNA, 3579 bp, Artificial Sequence
  derived and/or modified sequence
atgagcagaggagctggggccctgcagaggaggaccaccacctacctgatcagcctgaccctggtgaagctggagagcgtgcccccacctccacccagccccagcgctgctgctgctggagctgctggggcccggggcagcgagactggagaccccggcagccccagaggagctgaggagcccgggaagaagagacatgagcggctcttccaccggcaggatgccctgtggatcagcaccagcagcgctggcactggaggagctgagcccccagccctgagccctgccccagccagccctgcccggcctgtgtccccagcccctggccggcggctgagcctgtgggccgtgcccccaggcccccccctgagcggcggcctgagcccagaccccaagccaggaggagcccccaccagcagcagaagacccctgctgagcagccccagctggggcggccctgagcctgagggccgggccggcggcggcatccctggcagcagcagcccccaccctggcaccggcagccggcggctgaaggtggcccctcctcctccagcccccaagccctgcaagacagtgaccaccagcggggccaaggccggcggcggcaagggggccggcagccggctgtcctggccagagagcgagggcaagccccgggtgaagggcagcaagagcagcgctggcaccggggcctctgtgtctgctgctgccacagctgctgctgctgggggcggcggcagcacagccagcaccagcggaggagtgggcgctggggccggggcccggggcaagctgagccccaggaagggcaagagcaagaccctggacaacagcgacctgcaccctggccccccagctggcagccccccacccctgaccctgccccccacccccagccctgccacagctgtgacagctgccagcgcccagcccccaggccctgccccacccatcaccctggagcccccagcccctggcctgaagaggggccgggagggcggccgggccagcacccgggacaggaagatgctgaagttcatcagcggcatcttcaccaagagcactggaggccccccaggcagcggccccctgcccggcccccccagcctgagcagcggcagcggcagccgggagctgctgggcgctgagctgcgggccagccccaaggctgtgatcaacagccaggagtggaccctgagccgcagcatccctgagctgcggctgggcgtgctgggagatgcccggagcggcaagagcagcctcatccaccgcttcctgaccggcagctaccaggtgctggagaagacagaaagtgagcagtacaagaaggagatgctggtggatggccagacccacctggtgctgatccgggaggaggccggggccccagatgccaagttcagcggctgggcagatgctgtgatctttgtgttcagcctggaggatgagaacagcttccaggccgtgtcccggctgcacggccagctgagcagcctgcggggggagggccggggcggcctggccctggccctggtgggcacccaggaccgcatcagcgccagcagcccccgggtggtgggagatgcccgggcccgggccctgtgtgccgacatgaagcgctgcagctactatgagacctgtgccacctacggcctgaatgtggacagagtcttccaggaggtggcccagaaggtggtgaccctgaggaagcagcagcagctgctggccgcctgcaagagcctgcccagcagccccagccacagcgctgccagcacccctgtggccggccaggccagcaatggaggccacaccagtgactacagcagcagcctgcccagcagccccaacgtgggccaccgggagctgcgggcagaggccgctgctgtggccggcctgagcaccccaggcagcctgcaccgggccgccaagaggaggaccagcctgtttgccaacagaagaggaagtgacagcgagaagaggagcctggacagcagaggagagaccaccggcagcggccgggccatccccatcaagcagagcttcctgctgaagaggagcggcaacagcctgaacaaggagtggaagaagaagtatgtgaccctgagcagcaatggcttcctgctgtaccaccccagcatcaatgactacatccacagcacccacggcaaggagatggacctgctgcggaccaccgtgaaggtgcctgggaagaggcctccccgggccatcagcgccttcggccccagcgccagcatcaatggcctggtgaaggacatgagcacagtgcagatgggagagggcctggaggccaccacccccatgcccagccccagccccagccccagcagcctgcagcccccaccagaccagaccagcaagcacctgctgaagccagacaggaacctggcccgggccctgagcacagactgcacccccagcggggacctgagccccctgagccgggagcccccacccagccccatggtgaagaagcagaggaggaagaagctgaccacccccagcaagacagagggcagcgctggccaggccgaggccaagaggaagatgtggaagctgaagagctttggcagcctgaggaacatctacaaggccgaggagaactttgagttcctgattgtgagcagcacaggccagacctggcactttgaggccgccagctttgaggagagagatgcctgggtgcaggccatcgagagccagatcctggccagcctgcagtgctgtgagagcagcaaggtgaagctgaggacagacagccagagcgaggccgtggccatccaggccatcagaaatgccaagggcaacagcatctgtgtggactgtggggcccccaaccccacctgggccagcctgaacctgggcgccctgatctgcatcgagtgcagcggcatccacaggaacctgggcacccacctgagccgggtgcgcagcctggacctggatgactggccccgggagctgaccctggtgctgacagccatcggaaatgacacagccaacagagtgtgggagagtgacacccggggccgggccaagcccagccgggacagcagccgggaggagcgggagagctggatccgggccaagtatgagcagctgctcttcctggcccccctgagcaccagcgaggagcccctgggccggcagctgtgggccgctgtgcaggcccaggatgtggccaccgtgctgctgctgctggcccacgcccggcacggccccctggacacctctgtggaggacccccagctgcggagccccctgcacctggccgctgagctggcccacgtggtgatcacccagctgctgctgtggtatggagcagatgtggccgccagagatgcccagggccgcacagccctcttctacgcccggcaggccggcagccagctgtgtgccgacatcctgctgcagcacggctgccctggagagggcggcagcgctgccaccacccccagcgctgccaccacccccagcatcacagccacccccagccccaggagaagaagcagcgctgcctctgtgggccgggcagatgcccctgtggccctggtgtag

SEQ ID NO: 43714 - DNA, 3579 bp, Artificial Sequence
  derived and/or modified sequence
atgagccggggcgccggcgccctgcagcggcggaccaccacctaccttattagcttgacccttgtgaaattggagtctgtgccgcccccaccaccctccccttccgccgccgcagccggtgcagctggggcgagaggctccgagacaggagaccccgggagccccaggggagctgaggaacctggcaagaagcggcatgaacgtctgttccaccgtcaggacgccctgtggatctccaccagctccgctgggaccggaggggcagagcctcccgctttatctccagccccagcatcccccgcccgacctgtgtccccggcccccggaaggaggctgtcactctgggccgtcccaccaggcccacctctgtcaggggggttaagtccagatccaaaaccagggggcgcccccactagctcacggcggccgctgctatcctcaccctcatgggggggaccagagccagagggccgagccggcgggggaattcctggctcttcctcccctcacccaggtaccgggagcaggagactgaaagtggccccaccaccccccgcaccaaagccatgcaagactgtgaccaccagtggggcaaaagccggcggaggaaagggcgcagggtcaagactgtcatggccggagagtgaagggaaaccccgggtcaagggctctaagtcttcagctggaacaggcgcctccgtctccgcggctgctaccgctgccgctgcgggcggaggtggcagcaccgctagtacaagcgggggagtgggcgcaggggcgggtgctcggggcaagcttagccccagaaaaggaaaatcaaagacgctcgataacagcgatctgcaccctgggccccccgcgggctcccctccgcccctgaccctgccccccaccccatcccccgccacagctgtcaccgccgcctctgcccagccaccaggccccgctccccctataacccttgagccccctgctcctggactcaagagaggccgggaaggcggaagagccagcactagagataggaaaatgctgaagtttatcagcggcatcttcaccaagagtacgggtggcccccccggatcgggacctctgcccggccctcccagtttaagttcggggagtggaagccgggagctgctcggcgcggaactgagggcctctcctaaggcggtgattaacagccaggaatggactctcagtcgcagcatccccgagctgcgtctcggagtcctgggtgatgcgagatccggtaagagcagtctgattcatcggtttctcactggttcttaccaggtgctggaaaagacagagtcagagcagtacaagaaagagatgctagttgacggccagacacatctggtgcttattcgggaggaggccggcgcccccgatgcgaagttttctggctgggccgatgccgtcatttttgtattctcactagaagacgagaactccttccaggccgtgtctcgacttcatggacagttgtcaagccttaggggcgagggccgaggcggtctggccttggccctggtgggcacacaggacaggatatcagcttcctcccctagagtggtcggggatgcaagagcccgcgctctatgcgccgatatgaaaaggtgctcctattacgagacatgtgccacgtatggcttgaacgtagaccgtgtgtttcaggaagttgcccagaaggtcgtgactcttcggaagcagcaacaactcctggccgcctgtaaatctttgcctagttcaccatcccattccgctgcgagtaccccagttgcaggacaggccagcaatggcgggcacacatcagattacagttcatcactgccatcctcacctaatgtcgggcatagagaacttagggccgaggctgcagcagttgcaggcttatcaacgcccggctctctccacagggctgcaaagaggcgcacttccttgtttgccaaccggagaggatcagactcagaaaagaggagtcttgactcgcgaggagaaactaccggttcagggcgggcgattccgatcaaacagtcattcttgctgaaaaggtccgggaactctcttaataaggaatggaaaaagaaatacgttaccctctcctccaacggatttctactgtaccatccatccatcaacgactacatccacagcacccatggcaaagagatggatctactgcggacaactgttaaagttccgggtaaacgccctcctagggccatttccgccttcgggcctagtgcgtccataaacggcctggttaaagatatgagcacggtacagatgggagaaggtctggaggcaaccacgcccatgcctagcccctcgccttcccccagttcattgcagccaccacccgaccagacctccaagcatctccttaagcctgacagaaatctagcgagggccctgtccactgattgtacacccagtggcgatctctccccattaagcagggaacctcccccatcccccatggtcaaaaagcaacgacgcaagaagctgacaacacccagtaagactgaagggtccgccggtcaagccgaggccaagagaaaaatgtggaagctcaaatcttttggctcgctgcgaaatatttacaaagcagaggaaaatttcgagttcctgatcgtcagtagtaccggtcagacctggcactttgaggctgcatcatttgaagaacgcgatgcctgggtgcaggccatagagtcccagatcctggccagtctgcagtgttgcgaatcctcaaaagtaaagcttaggacagacagccagtctgaggctgttgccatccaggcgatcaggaacgcaaagggcaactctatatgcgtggattgcggagcgcctaacccaacatgggcatccctgaatttaggtgctctgatatgcatcgaatgttcaggcattcatcgaaatctaggcactcacttaagtcgagttaggtctctggacctggacgattggccgcgggagctcactctggtgctcaccgctatcggtaatgatacagcgaaccgggtttgggaatcagacacaagaggacgggccaaaccaagtagggattcaagtcgtgaggagagagaaagttggatccgggcaaagtacgagcagttgctttttttggcccccctgagtacgtcggaagagccgttaggcagacagttgtgggccgcagtccaggctcaggatgttgctaccgtcctgctcctgctggcccacgcacggcacggacctttagatacctcagtggaggacccgcagctgagatccccgctgcacttggcagctgaattggcgcacgttgtgataacacagctgcttttgtggtacggcgcagacgtcgcagctcgggacgcccaaggccgcacagcactgttttacgcccgccaggcagggagtcagctgtgcgccgatatcctgctacagcatggctgcccaggggaaggcggttccgcggcaacgacacctagtgccgccacaactccatcgatcacagcaactcctagccctaggcggaggtcatcagctgctagcgtggggcgtgccgacgctccggtcgctctggtatag

SEQ ID NO: 43715 - DNA, 3579 bp, Artificial Sequence
  derived and/or modified sequence
atgtcccgcggtgccggtgccctccagaggcgtactactacttacctcatatctttgaccctcgtaaaattggagtcagttccacctcccccaccctctccgtccgccgcagcagcaggtgccgcaggcgctcgcggttctgagaccggggacccgggatctcctcgaggcgctgaggaaccaggtaagaagaggcatgaacggctgttccaccgccaagatgccctctggatatcaaccagctccgctggcacaggtggcgctgagcctccagctctctctcccgcacctgcctctccagctcggcctgtgagtcccgcacctggtaggcgcctgagcttatgggcagtgccaccaggacctccactgagcggaggcctgagccctgatcccaagcccggaggggctcctaccagctccagacgccctctgttaagtagcccaagctggggcggtccagagccagagggccgtgcgggaggcggtatcccagggagcagcagtccccacccaggcacaggaagccgtcgacttaaggtggccccaccgcctcccgctccaaagccatgcaagaccgttactacttcaggcgctaaagctggcggaggtaaaggcgcaggcagtagactgtcttggccggagtctgaaggcaaacctcgggtcaaagggtccaagtcctccgctggaaccggggcatccgtgtccgcagccgcaacagccgctgcggcaggcggtggcggaagcaccgcttcaacttccgggggtgtgggggctggtgcaggcgcaagaggcaagctcagtccccgaaaaggaaaaagcaaaacccttgataactcggacctccatcctggccctcccgcaggcagcccccctcctcttacccttccaccaactccaagccccgctactgccgttactgctgcctctgcccagcctccgggtcccgctcctccaatcaccttggaacccccagccccagggttgaagaggggacgggaaggcggtcgagctagtacacgcgatcgcaaaatgcttaagtttataagtgggatttttactaaatctaccggtgggccacccggaagtggacccttgcccggacccccttcactatcgagcgggtctggctcgagggagcttctgggcgctgagctgagagcgagccctaaggccgtaattaacagccaggaatggactctgagtcgttccatcccggaactccgactaggcgtgctcggagatgcccgatccggaaagagctcattaatccatcgcttcctgaccggttcataccaagtgctggaaaagaccgaatcagaacagtacaaaaaagagatgctcgtggatggccagacccacctggttctgatacgtgaggaggcaggcgctcccgatgccaagttcagtggatgggcagatgccgtgatctttgttttctcactggaagatgagaactcattccaggcagttagtcggctgcatggccaactatccagccttcgtggtgaaggtcgcggtgggctcgctttagccttggtgggtacccaggatcggatctcagcaagctcacctcgggttgtgggagacgctagggcacgagctctttgcgctgacatgaagaggtgctcttactacgaaacctgtgcgacttacggtctgaatgtggacagagtttttcaggaggtggcccagaaggtcgtgacgctgagaaagcaacagcagctattagccgcttgcaaaagtctaccgagttcaccttcacattccgccgctagtactcctgttgccggacaggcaagcaatgggggacatacgagtgactacagcagctccctccccagctcccccaatgtggggcacagggagctccgtgcagaggccgcagcagtggccggtttgtccacacctggaagtctgcatcgtgctgccaagagaaggactagtctttttgccaacaggaggggttccgactctgagaagaggtcactggattctcggggtgaaactactggctctggcagagcaatccccataaagcaatcttttctgctgaagaggtccggcaattctttgaataaagaatggaagaaaaagtatgtgacactgtcgtccaatggtttcttgctataccatccttctatcaatgactatatccatagcactcacggcaaggagatggatctactgcgcacaacagttaaggtcccaggaaagagaccacctagggcaatcagcgcttttggaccgtccgcgtcaatcaacgggttagtgaaagatatgtcaactgttcagatgggagaaggtctggaagctacaacccccatgccttcaccctccccctctccctctagcttacagcctccacccgatcagacatcaaagcacctgctaaaaccggatagaaatctcgccagagcgctgagcacggattgcactcccagcggcgatctgagtcctctttctcgcgaaccaccaccttccccaatggtgaagaaacaaagacgcaaaaaactaacaaccccctccaagaccgaaggttcggccggacaggctgaggcaaagcggaaaatgtggaagttaaaatcattcgggagtttgcggaacatctacaaggctgaggaaaactttgagtttctgattgtgtcatccacagggcagacatggcatttcgaggccgctagtttcgaggaacgggacgcttgggtacaggccatagagtctcaaattctcgcatccttacagtgctgtgaaagtagtaaagtgaaacttcgaactgacagccagagtgaggcggtcgctatccaggcaatccggaacgccaaggggaacagtatttgcgttgactgcggtgctcctaaccctacatgggcatccctgaacttgggggcactcatttgtattgagtgttccggcattcaccgaaacctgggtacccacttatcccgagtgagaagcctggatcttgatgattggcctagagagctcactctggtgctgacggctataggcaacgacacggcaaaccgtgtgtgggagagtgacacgcggggacgggctaaaccatcgcgcgactctagccgtgaggaacgcgagtcatggataagggcaaagtacgagcaactcctgttcttggctccactgagtacctccgaggagcccctggggcgtcagctgtgggctgctgttcaagcccaggatgtcgcaacagttcttctgctcctggctcatgctcggcatggtcccttggatacttcagtcgaggacccacaattgcggagcccactacacctggctgcggaattggcgcacgtggtcatcacccaactccttttgtggtatggagctgatgttgcggctagggatgcccaaggacgaaccgccctgttttacgccaggcaggctggctcccagctgtgtgccgacatcctgctgcagcacggatgtccaggtgagggtgggtctgccgcaaccacaccgagtgcagccaccacccccagtataacagcgactcccagccctcggaggcggagctctgccgctagcgtgggacgtgctgacgcccctgtggctctggtctag

SEQ ID NO: 43716 - DNA, 3579 bp, Artificial Sequence
  derived and/or modified sequence
atgagccggggcgcgggcgcgcttcagcgccggacaacgacctacctcatctcgctgaccctggttaagctcgagtcggtgcctccgccgccgccttctccgtctgcggccgcggccggcgccgccggtgccagaggctccgagactggggatcctggcagcccccgaggcgcggaggagccgggcaagaagcggcacgaacgtctcttccaccggcaggatgcgctgtggatcagcacgagcagcgcgggcaccgggggcgcggagcccccagccctgtccccggctccggccagtccggcccgcccagtctcccccgctcccggccgccgcctctccctctgggccgtccctccgggacccccgctctccgggggactgagccccgaccccaagcctgggggcgcccccacctcctcccggcgccccctgctcagcagcccgagctggggcggcccggagcccgaaggccgggcgggcggcggcatccctggctcatcctctccgcaccctggcaccggcagccggaggctcaaggtggcgcctcctccgccggctcccaagccttgcaagaccgtgaccacgagtggagccaaagccggcgggggcaagggcgcgggtagccgcctgtcatggcccgaaagcgagggcaagcccagggtcaaggggtcaaagagcagcgccgggactggagcttcggtctctgccgccgccaccgccgccgccgccgggggagggggctctacagcttcgacctctggtggggtcggggctggggctggagcccgagggaagttgtcccctcggaaaggcaagagtaagaccttggacaacagtgacttgcatccgggaccgcctgccggctctcctcctccgctaaccctcccaccaactccgagtccagccactgctgtcaccgctgcttccgcgcagccccccgggcctgcacctccaatcactctggagcctccagctccggggctgaaacggggccgggaggggggccgagcatccactcgtgaccgcaagatgctcaagtttatcagcggcatcttcaccaagagcacaggagggcctcctggctccgggccccttcccggaccccccagcctgtcttctggcagcgggtccagggagctgctgggcgccgagctccgcgcttcccctaaggctgtgatcaatagccaggaatggactttgagccgctccattcctgaactgcgcctgggtgtgctgggcgatgccaggagtgggaagtcatcgctcatccaccgattcctgactggctcataccaggtgctggagaagacagagagtgagcagtacaagaaagaaatgttggtggatggacagacacatctggtgctaatccgagaggaagctggggcacctgatgccaagttctcaggctgggcagatgctgtgatcttcgtcttcagcctggaggatgagaacagtttccaggctgtgagccgtctccatgggcagctgagttcccttcgcggggagggacgaggaggcctggccttggcactggtggggacacaagacaggatcagtgcttcctcccctcgggtggtgggagatgctcgtgccagagctctgtgcgcggacatgaaacgctgcagctactatgagacttgtgcaacctatgggctcaatgtggatcgggtcttccaggaggtggcccagaaggtggtgaccttgcgcaagcagcaacagcttctggctgcctgcaagtccctgcccagctccccaagccactcagctgcatccactccggtagctggccaggctagtaacgggggccacactagcgactactcttcttccctcccgtcctcaccgaatgttggtcaccgggagctccgagccgaggcagctgcagtggctggattgagcaccccagggtccctgcaccgggcagccaagcgcaggaccagcctttttgcgaatcgtcggggtagtgactccgagaaacgaagcttggatagtcggggagagacaacagggagtgggcgagccatccccatcaaacagagcttcctactaaaacgaagtggcaattccttgaacaaagaatggaagaagaaatatgtaaccctgtccagtaatggctttctactctaccaccccagtattaacgattacatccacagtacccacggcaaggagatggacttgctgcgaacaacagtcaaagtcccgggcaagcggcccccgagggccatctctgcctttggcccctcagccagcattaacgggctcgtcaaggacatgagcactgtccagatgggtgaaggcctggaagccactactcccatgccaagccctagccccagccccagttccctgcagccaccaccagatcagacatccaaacacctgctgaagccagaccggaatttggcccgagccctcagcacggactgtaccccatctggagacctgagccccctgagtcgggaaccccctccttctcccatggtgaagaagcagaggaggaaaaaattgacaacaccatccaagactgaaggctcggctgggcaggctgaagccaagcgcaaaatgtggaaactaaaatcctttggtagtttaagaaatatttataaagcagaggaaaactttgagttcctgatcgtgtccagcacgggtcagacgtggcactttgaggcagccagttttgaggagcgggatgcctgggtccaggccatcgagagtcagatcctagccagtctgcaatgctgtgagagcagcaaggtcaagctgcgcacagacagccaaagcgaggccgtggccatccaggcgatccggaacgccaaggggaattcaatctgcgtggactgcggggcccccaaccccacgtgggccagcttgaacctgggcgccctcatctgcatcgagtgttctggcatccaccgcaacctgggcacacacctgtcccgcgttcgctcgctggacttggacgactggccacgggagctgaccctggtgctgacggctattggcaacgacacggccaaccgcgtgtgggaaagcgacacgcgaggccgtgccaagccctcgcgggactcttcgcgggaggagcgcgagtcgtggattcgcgccaagtacgagcagctactgttcctggcgccgctgagcacctcggaggagccgctgggccgccagctgtgggccgccgtgcaggcccaggacgtggctaccgttctcctgcttttggcccatgcgcgacacgggccgctcgacaccagcgtagaggacccacagctgcgctccccactccacctggcggccgagctcgcccacgtcgtcatcacgcaactgctgctgtggtacggcgcggacgtggcggcccgtgacgcccagggccgcacggcgctgttctacgcccgccaggctggaagccagctgtgcgccgacatccttctccagcacggctgcccgggtgagggcggcagcgcggccaccacgcccagcgcggccaccacgcccagcatcaccgccacgcccagcccccgccgccggagcagcgccgctagcgtgggccgcgccgacgccccggttgcgctggtatag

SEQ ID NO: 43717 - DNA, 3579 bp, Artificial Sequence
  derived and/or modified sequence
atgagcagaggcgccggcgccctgcagagaagaaccaccacctacctgatcagcctgaccctggtgaagctggagagcgtgcccccccccccccccagccccagcgccgccgccgccggcgccgccggcgccagaggcagcgagaccggcgaccccggcagccccagaggcgccgaggagcccggcaagaagagacacgagagactgttccacagacaggacgccctgtggatcagcaccagcagcgccggcaccggcggcgccgagccccccgccctgagccccgcccccgccagccccgccagacccgtgagccccgcccccggcagaagactgagcctgtgggccgtgccccccggcccccccctgagcggcggcctgagccccgaccccaagcccggcggcgcccccaccagcagcagaagacccctgctgagcagccccagctggggcggccccgagcccgagggcagagccggcggcggcatccccggcagcagcagcccccaccccggcaccggcagcagaagactgaaggtggccccccccccccccgcccccaagccctgcaagaccgtgaccaccagcggcgccaaggccggcggcggcaagggcgccggcagcagactgagctggcccgagagcgagggcaagcccagagtgaagggcagcaagagcagcgccggcaccggcgccagcgtgagcgccgccgccaccgccgccgccgccggcggcggcggcagcaccgccagcaccagcggcggcgtgggcgccggcgccggcgccagaggcaagctgagccccagaaagggcaagagcaagaccctggacaacagcgacctgcaccccggcccccccgccggcagccccccccccctgaccctgccccccacccccagccccgccaccgccgtgaccgccgccagcgcccagccccccggccccgccccccccatcaccctggagccccccgcccccggcctgaagagaggcagagagggcggcagagccagcaccagagacagaaagatgctgaagttcatcagcggcatcttcaccaagagcaccggcggcccccccggcagcggccccctgcccggcccccccagcctgagcagcggcagcggcagcagagagctgctgggcgccgagctgagagccagccccaaggccgtgatcaacagccaggagtggaccctgagcagaagcatccccgagctgagactgggcgtgctgggcgacgccagaagcggcaagagcagcctgatccacagattcctgaccggcagctaccaggtgctggagaagaccgagagcgagcagtacaagaaggagatgctggtggacggccagacccacctggtgctgatcagagaggaggccggcgcccccgacgccaagttcagcggctgggccgacgccgtgatcttcgtgttcagcctggaggacgagaacagcttccaggccgtgagcagactgcacggccagctgagcagcctgagaggcgagggcagaggcggcctggccctggccctggtgggcacccaggacagaatcagcgccagcagccccagagtggtgggcgacgccagagccagagccctgtgcgccgacatgaagagatgcagctactacgagacctgcgccacctacggcctgaacgtggacagagtgttccaggaggtggcccagaaggtggtgaccctgagaaagcagcagcagctgctggccgcctgcaagagcctgcccagcagccccagccacagcgccgccagcacccccgtggccggccaggccagcaacggcggccacaccagcgactacagcagcagcctgcccagcagccccaacgtgggccacagagagctgagagccgaggccgccgccgtggccggcctgagcacccccggcagcctgcacagagccgccaagagaagaaccagcctgttcgccaacagaagaggcagcgacagcgagaagagaagcctggacagcagaggcgagaccaccggcagcggcagagccatccccatcaagcagagcttcctgctgaagagaagcggcaacagcctgaacaaggagtggaagaagaagtacgtgaccctgagcagcaacggcttcctgctgtaccaccccagcatcaacgactacatccacagcacccacggcaaggagatggacctgctgagaaccaccgtgaaggtgcccggcaagagaccccccagagccatcagcgccttcggccccagcgccagcatcaacggcctggtgaaggacatgagcaccgtgcagatgggcgagggcctggaggccaccacccccatgcccagccccagccccagccccagcagcctgcagcccccccccgaccagaccagcaagcacctgctgaagcccgacagaaacctggccagagccctgagcaccgactgcacccccagcggcgacctgagccccctgagcagagagcccccccccagccccatggtgaagaagcagagaagaaagaagctgaccacccccagcaagaccgagggcagcgccggccaggccgaggccaagagaaagatgtggaagctgaagagcttcggcagcctgagaaacatctacaaggccgaggagaacttcgagttcctgatcgtgagcagcaccggccagacctggcacttcgaggccgccagcttcgaggagagagacgcctgggtgcaggccatcgagagccagatcctggccagcctgcagtgctgcgagagcagcaaggtgaagctgagaaccgacagccagagcgaggccgtggccatccaggccatcagaaacgccaagggcaacagcatctgcgtggactgcggcgcccccaaccccacctgggccagcctgaacctgggcgccctgatctgcatcgagtgcagcggcatccacagaaacctgggcacccacctgagcagagtgagaagcctggacctggacgactggcccagagagctgaccctggtgctgaccgccatcggcaacgacaccgccaacagagtgtgggagagcgacaccagaggcagagccaagcccagcagagacagcagcagagaggagagagagagctggatcagagccaagtacgagcagctgctgttcctggcccccctgagcaccagcgaggagcccctgggcagacagctgtgggccgccgtgcaggcccaggacgtggccaccgtgctgctgctgctggcccacgccagacacggccccctggacaccagcgtggaggacccccagctgagaagccccctgcacctggccgccgagctggcccacgtggtgatcacccagctgctgctgtggtacggcgccgacgtggccgccagagacgcccagggcagaaccgccctgttctacgccagacaggccggcagccagctgtgcgccgacatcctgctgcagcacggctgccccggcgagggcggcagcgccgccaccacccccagcgccgccaccacccccagcatcaccgccacccccagccccagaagaagaagcagcgccgccagcgtgggcagagccgacgcccccgtggccctggtgtag

SEQ ID NO: 43718 - protein, 455 aa, Artificial Sequence
  derived and/or modified sequence
MDETQGPLAMTVHLLANSGHGSLLQRTLDQLLDCICPEVRLFQVSERASPVKYCEKSHSKRSRFPGMSVLLFLHESPGEDRLFRVLDSLQHSPWQCYPTQDTRGRLCPYFFANQEFYSLDSQLPIWGVRQVHCGSEILRVTLYCSFDNYEDAIRLYEMILQREATLQKSNFCFFVLYASKSFALQLSLKQLPPGMSVDPKESSVLQFKVQEIGQLVPLLPNPCMPISSTRWQTQDYDGNKILLQVQLNPELGVKNGILGAGMLPLGSRLTSVSAKRTSEPRSQRNQGKRSQGHSLELPEPSGSPTSDRCAGTSWKSPGRSFQVSSPAMGAHLHLSSHHLESGARMKVLNRENSFQKLEAETNVDTGLTIINSEPRQTYFGGFPRDLQTSQPPFCLPASSLGVATSKNNSVLKERVSPLPLAGQRDLGTRKTISECLLHLQVQGEEKEEDEEEFFI

SEQ ID NO: 43719 - DNA, 1368 bp, Artificial Sequence
  derived and/or modified sequence
atggacgagacccagggccccctggccatgaccgtgcacctgctggccaacagcggccacggcagcctgctgcagagaaccctggaccagctgctggactgcatctgccccgaggtgagactgttccaggtgagcgagagagccagccccgtgaagtactgcgagaagagccacagcaagagaagcagattccccggcatgagcgtgctgctgttcctgcacgagagccccggcgaggacagactgttcagagtgctggacagcctgcagcacagcccctggcagtgctaccccacccaggacaccagaggcagactgtgcccctacttcttcgccaaccaggagttctacagcctggacagccagctgcccatctggggcgtgagacaggtgcactgcggcagcgagatcctgagagtgaccctgtactgcagcttcgacaactacgaggacgccatcagactgtacgagatgatcctgcagagagaggccaccctgcagaagagcaacttctgcttcttcgtgctgtacgccagcaagagcttcgccctgcagctgagcctgaagcagctgccccccggcatgagcgtggaccccaaggagagcagcgtgctgcagttcaaggtgcaggagatcggccagctggtgcccctgctgcccaacccctgcatgcccatcagcagcaccagatggcagacccaggactacgacggcaacaagatcctgctgcaggtgcagctgaaccccgagctgggcgtgaagaacggcatcctgggcgccggcatgctgcccctgggcagcagactgaccagcgtgagcgccaagagaaccagcgagcccagaagccagagaaaccagggcaagagaagccagggccacagcctggagctgcccgagcccagcggcagccccaccagcgacagatgcgccggcaccagctggaagagccccggcagaagcttccaggtgagcagccccgccatgggcgcccacctgcacctgagcagccaccacctggagagcggcgccagaatgaaggtgctgaacagagagaacagcttccagaagctggaggccgagaccaacgtggacaccggcctgaccatcatcaacagcgagcccagacagacctacttcggcggcttccccagagacctgcagaccagccagccccccttctgcctgcccgccagcagcctgggcgtggccaccagcaagaacaacagcgtgctgaaggagagagtgagccccctgcccctggccggccagagagacctgggcaccagaaagaccatcagcgagtgcctgctgcacctgcaggtgcagggcgaggagaaggaggaggacgaggaggagttcttcatctag

SEQ ID NO: 43720 - DNA, 1368 bp, Artificial Sequence
  derived and/or modified sequence
atggacgaaacacagggaccccttgcaatgacagtgcatttgctcgctaatagtggccatgggtctctgctgcaaaggaccttggaccagctactcgactgtatatgtcccgaagtgagattgtttcaggtgtcggagagggcgtcacctgtcaagtactgcgaaaagtcacattccaagcgttcaaggtttcctggcatgagcgtcttgttattcctccatgaatcccccggagaagatcgccttttccgagtgctcgattcattacagcacagcccctggcagtgttacccgactcaagacacgaggggccggctgtgtccctacttttttgctaaccaggaattttacagcctcgatagccagcttcctatctggggagtacgacaggtgcactgtggctccgaaatcttgcgggtgaccctttactgcagtttcgataactatgaagacgccatacgcctctatgaaatgatccttcagcgtgaagcgaccttacaaaagtccaacttttgtttcttcgtgctctacgcatccaagtcattcgctctacaactctcattaaagcaactgccgccagggatgagcgtggatcccaaggagagttccgtactgcaattcaaggtccaggagattggccagctagtcccacttctgcccaatccgtgcatgccaatcagtagcacccggtggcagacgcaggattatgacggcaacaagatactactgcaagtacagcttaaccccgaacttggggttaagaacggcatcctgggcgctggcatgctgcctctggggtcgaggctgacctccgtgtcggccaagaggaccagcgagccgagatcacagcggaatcaaggaaagagatctcaggggcattccctggaactgccggaaccctctgggtctcctacttccgatcgctgcgcaggcaccagctggaaatctcctgggcggtcatttcaggtctcatcaccagctatgggagcccatttgcacttatcctcacaccacctggaatctggggcaagaatgaaagtgttaaacagggagaacagtttccaaaagctggaggctgagacaaacgtggacacaggactgacaatcattaactccgagccacgacagacttatttcggaggtttcccccgcgacctgcagactagtcagccacctttctgcctaccagcatcttctctgggggtggctacctcaaagaacaatagtgttctcaaggaacgcgtgagccccctcccccttgctgggcagcgagacctgggcacacggaaaactattagcgaatgcctgttgcatcttcaggtccagggcgaagaaaaagaggaagacgaagaagaattttttatctag

SEQ ID NO: 43721 - DNA, 2509 bp, Artificial Sequence
  derived and/or modified sequence
atgcacaagctggatgacgtgaccccgctgctgctgtgtggagagggaggctgctgaacccgagctggtgtgagcttctcttgccgtaagtccacgggtggccaggagcacgtgttagtctggttaagagctctgctcagaagtagccgctgcagctgaaggttttcaggcgggctgaaggctgggccgcttcttcattcatttcagaaacttgaacagtgggccttctacacacgctgtctttgtcagcctcaggcagttcctccatggatgagacacaggggcctctggccatgactgtccatcttcttgccaactctgggcacggctcccttctgcagaggactctggaccagctcctggattgcatttgcccagaggtccggctctttcaggtgtctgaacgggccagtcctgtgaaatactgtgaaaagtcccattccaagcggtcccggtttccagggatgtccgtgttgctcttcctgcacgaaagcccgggagaggataggctatttcgcgtcctggactctctccagcattcgccatggcagtgctaccccacccaggacactcggggaaggctgtgtccctacttttttgccaatcaggagttctacagcctggacagtcagctgcccatctggggggtgaggcaggtgcactgtggctccgagatcctgagggtgacgctgtactgcagttttgataactatgaagacgccatcagactctacgagatgatcctgcagagagaagcgaccttgcaaaagagcaatttttgtttcttcgtgctctatgcctccaagagctttgctctgcagctctccctgaagcagctgcccccgggaatgtcagtggaccccaaagagtcttcggtgctgcagtttaaggttcaagagatcggccagttagtgcctctgctacccaatccatgcatgcctatcagcagcaccaggtggcagactcaggactacgatggcaacaagattctgcttcaggttcagctgaatccagaacttggtgttaagaatggcatcttgggagctggcatgcttcccctgggctccaggctgacttctgtctctgcaaagaggacctcagaacccaggagccagaggaaccagggcaagaggtcccaggggcattctctggagcttcctgagcccagtgggagccccacatcagacaggtgtgctggcacttcgtggaaaagccctggccggtcattccaggtcagcagcccagctatgggtgcccacctgcacctgtcttctcatcaccttgaatccggggccagaatgaaggtcctcaaccgggaaaacagctttcagaagcttgaggccgagacgaatgttgacaccggcttgaccatcataaattctgaacccaggcagacttattttggcggatttccaagggatttacagaccagccagccaccattctgcttgccagcctcttccttgggggtggctacctccaaaaacaacagtgtccttaaggaaagagtctctcctttgccacttgctggccaaagggaccttggtaccaggaagacaatttcagaatgtctccttcatctgcaagttcagggtgaagaaaaagaagaagatgaagaagaattctttatatagcataaaataaatgtggttttctaaaacacaagatcagataaaatgttctagaaatggagtactgacccagaatcagcctgttagttgttcatctgaggggggctgaatgctccccatgcacaatctgtattgattttatttcaaatgttcaaagtctaaaggtgctgggaatgattgtttatttgccgtcacagtcataagagaacacagccaacacacagggaaaaaaaccgaatgcttttgttccgtggagatgcactaacccagctggatgtgttgaatccagcacctatcaggataattgcattgtatgcaaatgaatcggtatgttatacaacactaattagtgtctgtaatttggttttaatttttacttaggttgcatagctcatccccctggacaatatggactgctatttactcttgaatgctttttaattttcatgtgacctcttttggtaactaggccttgttcacataccctccttgtgattttgtctttaaagttgtttgtatctggaatgagtgaaaatgcaaagtgttttgaaaattataaacagttaattttgttttcctgtttaatgagccaaaatactggaagccagaaaatcaggttgaacatgaatgctaggctctagggctttcctgctcatctgcttctcatttgtttctgcactatgtcaaagaggacagtggttcttgttacaaaccaaagaggaacattgagcacagtgggaaaattggactggttgatctggtcactggagcaggacttgggttcttctggccagattttgactcccagattcctttacaaaacgcactcattcattcatttatatatgttcattcaataaacattttttgaataccta

SEQ ID NO: 43722 - DNA, 1368 bp, Artificial Sequence
  derived and/or modified sequence
atggatgagacccagggccccctggccatgacagtgcacctgctggccaacagcggccacggcagcctgctgcagaggaccctggaccagctgctggactgcatctgcccagaggtgcggctcttccaggtgtctgagcgggccagccctgtgaagtactgtgagaagagccacagcaagaggagccgcttccctggcatgtctgtgctgctcttcctgcacgagagccctggagaagatagactcttccgggtgctggacagcctgcagcacagcccctggcagtgctaccccacccaggacacccggggccgcctgtgcccctacttctttgccaaccaggagttctacagcctggacagccagctgcccatctggggcgtgcggcaggtgcactgcggcagcgagatcctgcgggtgaccctgtactgcagctttgacaactatgaagatgccatccggctgtatgagatgatcctgcagcgggaggccaccctgcagaagagcaacttctgcttctttgtgctgtatgccagcaagagctttgccctgcagctgagcctgaagcagctgcccccaggcatgtctgtggaccccaaggagagctctgtgctgcagttcaaggtgcaggagatcggccagctggtgcccctgctgcccaacccctgcatgcccatcagcagcacccgctggcagacccaggactatgatggcaacaagatcctgctgcaggtgcagctgaaccctgagctgggcgtgaagaatggcatcctgggcgccggcatgctgcccctgggcagccggctgacctctgtgtctgccaagaggaccagcgagcccaggagccagaggaaccagggcaagaggagccagggccacagcctggagctgcctgagcccagcggcagccccaccagtgacagatgtgccggcacctcctggaagagccctggccgctccttccaggtgagcagccctgccatgggcgcccacctgcacctgagcagccaccacctggagagcggggccaggatgaaggtgctgaacagagaaaattccttccagaagctggaggccgagaccaacgtggacaccggcctgaccatcatcaacagcgagccccggcagacctactttggaggcttcccccgggacctgcagaccagccagccccccttctgcctgcctgccagcagcctgggcgtggccaccagcaagaacaacagcgtgctgaaggagcgggtgagccccctgcccctggccggccagagggacctgggcaccaggaagaccatcagcgagtgcctgctgcacctgcaggtgcagggcgaggagaaggaggaggatgaggaggagttcttcatctag

SEQ ID NO: 43723 - DNA, 1368 bp, Artificial Sequence
  derived and/or modified sequence
atggacgagacccagggccccctggccatgaccgtgcacctgctggctaattccgggcatggaagcctgctccaaaggaccctggatcagctgctggattgtatatgcccagaagttcggctgttccaagtctctgagcgagcctccccagtcaaatattgtgaaaaaagccattctaaaagaagtaggttccctggcatgagtgtcttactcttcctgcacgaatcccctggcgaagaccggctgttccgggttctggactcactacagcacagcccctggcaatgctaccctactcaggacactaggggccgcttatgcccctattttttcgccaatcaggagttctactctttggatagccagctccccatctggggcgttcggcaagtgcactgtggtagcgaaattctaagagtcaccctatattgcagtttcgacaactatgaggatgccatcaggctttatgagatgattctccagcgcgaagcgacactgcagaagtccaatttctgcttcttcgtgctgtacgcctcaaaatcatttgcactgcagctgtcattaaagcagctcccccccgggatgtccgtcgatcctaaggaatcaagtgtactgcagtttaaagtgcaggagataggacagctggtgcccctgcttcccaatccctgtatgccaatatcttctactagatggcagacgcaggactacgacgggaacaagatcctgctgcaggtccagttgaacccagagctgggggtgaagaacggcatactcggcgctggcatgttacctctggggagtcggttgacaagcgtgtcggctaaacggacttcagagcccagatcacagcggaaccagggtaagcgatcccaggggcactcactcgagcttcccgaaccgtcaggtagcccaacatcagatcggtgcgctggaacctcttggaagtctcccggacgctcgttccaggtgagttcacccgccatgggggcccatctccacctgtcctctcaccacctggagtccggggctaggatgaaggtcctgaaccgggaaaattcattccaaaagttggaggcagaaaccaacgtggacacagggttgaccatcattaacagcgaaccccggcagacatatttcgggggcttcccaagggacctgcagacaagccaaccccctttctgcttacccgcgtctagcctgggggttgcgacgtccaagaataatagcgtactgaaagagcgggtaagtccactgccccttgctggccagcgggatctcgggaccagaaaaacgatttccgagtgccttctgcacctgcaggtgcagggtgaagaaaaggaagaggatgaggaagaattttttatctag

SEQ ID NO: 43724 - DNA, 1368 bp, Artificial Sequence
  derived and/or modified sequence
atggacgagacacagggccctctggcaatgacggtacatcttcttgccaattccggacatgggtcactcctacagcgcacactggaccagctgcttgactgcatctgtccggaggtgaggctttttcaagtatctgaaagagcctctcccgtgaagtactgcgaaaagagtcatagcaaaaggagccggtttcctggaatgtctgtcttactgttccttcacgagtcccctggcgaagatcgcttattccgggtgctcgattcactacagcacagcccctggcagtgctatccgactcaggataccaggggcagactgtgcccttactttttcgctaaccaagaattttactctctggattctcagttgcccatatggggcgtccgccaggtccattgcgggagtgagatcttgcgcgttaccctatactgctcatttgataattatgaggacgctattaggttatatgagatgatcctccagcgggaggccacgctacaaaagagcaacttctgtttcttcgtgctctacgccagtaaatcgttcgccttgcagctgtccttgaagcaactccctcctggtatgtcagtagatccaaaagaaagtagcgtcttgcagtttaaagtgcaggagatagggcagctggttcccctgctgccaaatccttgcatgccaattagctccacccgctggcaaacgcaggattacgatgggaacaagattctcttgcaggtccagctgaacccagaactcggcgtaaagaacggcattcttggagcaggcatgctaccactcggctcccgactgacgtcagtgagtgctaagcgtacaagcgagccgagatcccagcggaatcaggggaagaggtcacaaggacacagcctcgaactgccagagccaagcggcagcccaactagtgatcggtgcgccggtacatcctggaagagtcctgggcgaagctttcaggtgagctctcctgctatgggggcacacttgcacctgtcctcccatcaccttgaaagcggcgctaggatgaaagtgttgaaccgagagaatagcttccagaagctggaggcagagactaacgtggacaccgggttgacgattatcaatagcgaacccagacagacttactttggcggattccccagagatcttcagaccagtcagcctcccttttgcttgcctgcgtcgtccctgggggttgcgacaagcaaaaacaacagcgtgctcaaggagagggtatcacccctgcctctggccggtcagcgcgatctgggaacccggaagacgatatcggagtgtctcctccatctgcaggtccagggggaggagaaggaagaagatgaggaggaatttttcatatag

SEQ ID NO: 43725 - protein, 395 aa, Artificial Sequence
  derived and/or modified sequence
MAFSPWQILSPVQWAKWTWSAVRGGAAGEDEAGGPEGDPEEEDSQAETKSLSFRSGCKVKKHETQSLALDACSRDEGAVISQISDISNRDGHATDEEKLASTSCGQKSAGAEVKGEPEEDLEYFECSNVPVSTINHAFSSSEAGIEKETCQKMEEDGSTVLGLLESSAEKAPVSVSCGGESPLDGICLSESDKTAVLTLIREEIITKEIEANEWKKKYEETRQEVLEMRKIVAEYEKTIAQMIEDEQRTSMTSQKSFQQLTMEKEQALADLNSVERSLSDLFRRYENLKGVLEGFKKNEEALKKCAQDYLARVKQEEQRYQALKIHAEEKLDKANEEIAQVRTKAKAESAALHAGLRKEQMKVESLERALQQKNQEIEELTKICDELIAKLGKTD

SEQ ID NO: 43726 - DNA, 1188 bp, Artificial Sequence
  derived and/or modified sequence
atggccttcagcccctggcagatcctgagccccgtgcagtgggccaagtggacctggagcgccgtgagaggcggcgccgccggcgaggacgaggccggcggccccgagggcgaccccgaggaggaggacagccaggccgagaccaagagcctgagcttcagaagcggctgcaaggtgaagaagcacgagacccagagcctggccctggacgcctgcagcagagacgagggcgccgtgatcagccagatcagcgacatcagcaacagagacggccacgccaccgacgaggagaagctggccagcaccagctgcggccagaagagcgccggcgccgaggtgaagggcgagcccgaggaggacctggagtacttcgagtgcagcaacgtgcccgtgagcaccatcaaccacgccttcagcagcagcgaggccggcatcgagaaggagacctgccagaagatggaggaggacggcagcaccgtgctgggcctgctggagagcagcgccgagaaggcccccgtgagcgtgagctgcggcggcgagagccccctggacggcatctgcctgagcgagagcgacaagaccgccgtgctgaccctgatcagagaggagatcatcaccaaggagatcgaggccaacgagtggaagaagaagtacgaggagaccagacaggaggtgctggagatgagaaagatcgtggccgagtacgagaagaccatcgcccagatgatcgaggacgagcagagaaccagcatgaccagccagaagagcttccagcagctgaccatggagaaggagcaggccctggccgacctgaacagcgtggagagaagcctgagcgacctgttcagaagatacgagaacctgaagggcgtgctggagggcttcaagaagaacgaggaggccctgaagaagtgcgcccaggactacctggccagagtgaagcaggaggagcagagataccaggccctgaagatccacgccgaggagaagctggacaaggccaacgaggagatcgcccaggtgagaaccaaggccaaggccgagagcgccgccctgcacgccggcctgagaaaggagcagatgaaggtggagagcctggagagagccctgcagcagaagaaccaggagatcgaggagctgaccaagatctgcgacgagctgatcgccaagctgggcaagaccgactag

SEQ ID NO: 43727 - DNA, 1188 bp, Artificial Sequence
  derived and/or modified sequence
atggccttctccccatggcagatactttcccccgtacagtgggctaagtggacctggagtgcagtccgggggggggccgctggtgaggacgaggcaggcggcccagaaggagaccccgaggaggaggactcgcaagccgaaactaaatcactgtctttcaggagcggttgcaaggtgaagaagcatgaaacacaaagcctcgctctggacgcctgctcccgtgatgagggggcggttatttcgcaaatatccgacataagcaacagagacggccatgccactgatgaagaaaaactcgcctcaacgtcttgtggacagaaatcagctggcgctgaggttaaaggcgagccagaggaggacctggaatacttcgagtgcagcaatgtgccagtctcaacaatcaaccatgccttctcctcatctgaggcgggcatcgagaaagaaacctgtcagaagatggaggaggatggcagcaccgtgctgggcctgctcgagagtagcgccgaaaaagcccccgtgagtgtgagctgcggcggagagtcgcccctagacggcatatgtctatccgaatccgacaagaccgccgtcctgacgctgatccgggaagagatcatcaccaaggagatcgaggccaatgaatggaaaaagaagtacgaggagactcgacaagaggtgctagaaatgcggaagatagtagccgagtacgaaaagaccattgctcagatgatcgaagatgagcaaagaacgtccatgaccagccagaaatcctttcagcagctgacaatggagaaggaacaggctcttgccgaccttaattccgtggagcggagtctgtccgacctgttccggaggtatgagaatctgaagggagtactcgaggggtttaagaagaacgaagaagcgttgaaaaaatgtgcccaggactatttggccagagtgaagcaggaagaacagaggtatcaagcgcttaaaattcacgccgaggaaaaattggataaggctaacgaagagattgcacaggttaggaccaaggccaaggccgaaagcgcggctctccacgcaggcctccgcaaggagcagatgaaggtggaatcactggaaagggcactacagcaaaagaaccaagagatcgaggagctcaccaaaatctgtgacgagctcatcgccaaactgggtaaaactgactag

SEQ ID NO: 43728 - DNA, 1188 bp, Artificial Sequence
  derived and/or modified sequence
atggccttcagcccctggcagatcctgagccctgtgcagtgggccaagtggacctggagcgctgtgcggggcggcgctgctggagaagatgaggccggcggccctgagggggaccctgaggaggaggacagccaggccgagaccaagagcctgtccttccgcagcggctgcaaggtgaagaagcatgagacccagagcctggccctggatgcctgcagcagagatgaaggagctgtgatcagccagatcagtgacatcagcaacagagatggccacgccacagatgaggagaagctggccagcaccagctgtggccagaagtctgctggagctgaggtgaagggggagcctgaggaggacctggagtactttgaatgtagcaatgtgcctgtgtccaccatcaaccacgccttcagcagcagcgaggccggcatcgagaaggagacctgccagaagatggaggaggatggcagcacagtgctgggcctgctggagagcagcgctgagaaggcccctgtgtctgtgtcctgtggcggggagagccccctggatggcatctgcctgtctgagagtgacaagacagctgtgctgaccctcatccgggaggagatcatcaccaaggagattgaggccaatgagtggaagaagaagtatgaggagacccggcaggaggtgctggagatgaggaagatcgtggccgagtatgagaagaccatcgcccagatgattgaagatgagcagaggacctccatgaccagccagaagagcttccagcagctgaccatggagaaggagcaggccctggccgacctgaacagcgtggagaggagcctgagtgacctcttcagaagatatgagaacctgaagggcgtgctggagggcttcaagaagaatgaggaggccctgaagaagtgtgcccaggactacctggcccgggtgaagcaggaggagcagcgctaccaggccctgaagatccatgctgaggagaagctggacaaggccaatgaggagatcgcccaggtgaggaccaaggccaaggccgagagcgctgccctgcacgccggcctgaggaaggagcagatgaaggtggagagcctggagcgggccctgcagcagaagaaccaggagattgaggagctgaccaagatctgtgatgagctgattgccaagctgggcaagacagactag

SEQ ID NO: 43729 - DNA, 1188 bp, Artificial Sequence
  derived and/or modified sequence
atggccttcagcccctggcagatcctgagccccgtgcagtgggccaagtggacttggagtgccgtgcgtggtggggccgcaggggaggacgaggcaggaggaccagaaggcgatcccgaggaggaggattcacaggcagagaccaaaagcttgtcctttagaagcggctgcaaagtgaagaaacatgaaactcaatccttagcattggacgcttgttcccgcgatgagggggccgtaatttcgcaaatcagcgacataagcaatcgggacgggcacgctactgatgaggaaaaactggcctccacatcatgtggccagaaatctgctggcgccgaagtaaaaggtgagccagaagaagatctggagtacttcgaatgcagtaatgtgcctgtctctaccataaatcacgcttttagttcctctgaggctggcattgaaaaagaaacatgccaaaagatggaggaggatggcagcacggtgctgggattattagaaagctccgccgaaaaggcccccgtttccgtttcctgcggcggagagtctcccctcgacgggatctgtctgtccgagtccgataagacagcggtcttaacattgatccgggaggaaattatcacaaaggaaatcgaggcgaatgaatggaaaaagaaatatgaggagactagacaggaggtgctcgaaatgcgcaagattgttgcggagtacgagaaaactatcgcacaaatgatcgaagacgagcaaaggacaagcatgacctcacagaaatcttttcagcagctcactatggaaaaagaacaggctctcgccgatcttaacagtgttgaacggagcctatctgacctcttccggcggtacgagaacctgaagggtgtgttggagggcttcaagaagaatgaggaagcactgaaaaaatgcgcacaagattacctggccagagtgaagcaagaggagcagaggtaccaggctctaaaaattcacgcagaagaaaaattagacaaggcgaatgaagagattgcacaggttagaacaaaggcgaaagccgagagtgcagccctgcacgcagggctgcggaaggagcagatgaaggtcgaatctctggagagggcattacagcaaaaaaaccaagagattgaggaattgaccaagatttgtgatgaattgatcgctaaactgggcaagaccgactag

SEQ ID NO: 43730 - DNA, 1188 bp, Artificial Sequence
  derived and/or modified sequence
atggccttcagtccctggcagattctgtctccggtccagtgggcaaaatggacgtggagcgccgtccggggaggtgccgcaggcgaagacgaggccggaggtccagagggggaccctgaagaggaggactcgcaggccgaaaccaagtctctttcctttcgcagtggttgtaaagtaaagaagcacgagacccagtcactggctctcgatgcatgttcccgcgatgagggcgctgtcatatcacagatctccgatatctccaaccgcgatggacacgccactgatgaagaaaaattggcaagcacctcatgtggacagaagtcagctggggctgaagtcaagggtgagcctgaggaagatctcgaatactttgagtgttccaatgtgcctgtgtccacaatcaaccatgccttcagctcaagtgaagcaggaattgagaaagagacctgccaaaagatggaggaggacggctctacagttctcgggttactggaaagcagcgctgaaaaagctcctgttagcgtgagctgcgggggagaatcccccctggacggaatctgcctctctgagtccgacaagacggcagtactgacactgattagggaagagatcatcaccaaagaaatagaagcaaatgaatggaaaaaaaagtacgaagaaactaggcaggaggtgctggaaatgaggaagatcgttgcagagtacgaaaagactatagcacagatgattgaggatgagcagagaacttccatgacttcacagaaatctttccagcagctgaccatggaaaaagagcaggccctggcggatctgaatagtgtagaaagaagtctatccgacctgtttcggagatacgagaacctcaaaggtgttctcgagggattcaagaagaatgaagaggcccttaagaagtgtgcacaggattacttggccagagtaaagcaagaggagcagaggtaccaggcccttaaaatccacgccgaagaaaagctggacaaggctaacgaagaaatcgcccaagtgcgtaccaaagccaaagcagagagtgcggcactgcacgcgggattaaggaaggaacagatgaaggtggagtccctcgagagagctttgcagcaaaagaatcaggagatcgaggagctcactaaaatttgcgacgagctgatcgcgaaattagggaagaccgactag

SEQ ID NO: 43731 - DNA, 6513 bp, Artificial Sequence
  derived and/or modified sequence
cagaggtctagcagccgggcgccgcgggccgggggcctgaggaggccacaggacgggcgtcttcccggctagtggagcccggcgcggggcccgctgcggccgcaccgtgaggggaggaggccgaggaggacgcagcgccggctgccggcgggaggaagcgctccaccagggcccccgacggcactcgtttaaccacatccgcgcctctgctggaaacgcttgctggcgcctgtcaccggttccctccattttgaaagggaaaaaggctctccccacccattcccctgcccctaggagctggagccggaggagccgcgctcatggcgttcagcccgtggcagatcctgtcccccgtgcagtgggcgaaatggacgtggtctgcggtacgcggcggggccgccggcgaggacgaggctggcgggcccgagggcgaccccgaggaggaggattcgcaagccgagaccaaatccttgagtttcaggagtggctgtaaggtgaagaagcatgaaactcagtctctcgccctggatgcatgttctcgggatgaaggggcagtgatctcccagatttcagacatttctaatagggatggccatgctactgatgaggagaaactggcatccacgtcatgtggtcagaaatcagctggtgccgaggtgaaaggtgagccagaggaagacctggagtactttgaatgttccaatgttcctgtgtctaccataaatcatgcgttttcatcctcagaagcaggcatagagaaggagacgtgccagaagatggaagaagacgggtccactgtgcttgggctgctggagtcctctgcagagaaggcccctgtgtcggtgtcctgtggaggtgagagccccctggatgggatctgcctcagcgaatcagacaagacagccgtgctcaccttaataagagaagagataattactaaagagattgaagcaaatgaatggaagaagaaatacgaagagacccggcaagaagttttggagatgaggaaaattgtagctgaatatgaaaagactattgctcaaatgattgaagatgaacaaaggacaagtatgacctctcagaagagcttccagcaactgaccatggagaaggaacaggccctggctgaccttaactctgtggaaaggtccctttctgatctcttcaggagatatgagaacctgaaaggtgttctggaagggttcaagaagaatgaagaagccttgaagaaatgtgctcaggattacttagccagagttaaacaagaggagcagcgataccaggccctgaaaatccacgcagaagagaaactggacaaagccaatgaagagattgctcaggttcgaacaaaagcaaaggctgagagtgcagctctccatgctggactccgcaaagagcagatgaaggtggagtccctggaaagggccctgcagcagaagaaccaagaaattgaagaactgacaaaaatctgtgatgagctgattgcaaagctgggaaagactgactgagacactccccctgttagctcaacagatctgcatttggctgcttctcttgtgaccacaattatcttgccttatccaggaataattgcccctttgcagagaaaaaaaaaaacttaaaaaaagcacatgcctactgctgcctgtcccgctttgctgccaatgcaacagccctggaagaaaccctagagggttgcatagtctagaaaggagtgtgacctgacagtgctggagcctcctagtttccccctatgaaggttcccttaggctgctgagtttgggtttgtgatttatctttagtttgttttaaagtcatctttactttcccaaatgtgttaaatttgtaactcctctttggggtcttctccaccacctgtctgatttttttgtgatctgtttaatcttttaattttttagtatcagtggttttatttaaggagacagtttggcctattgttacttccaatttataatcaagaaggggctctggatccccttttaaattacacacactctcacacacatacatgtatgtttatagatgctgctgctcttttccctgaagcatagtcaagtaagaactgctctacagaaggacatatttccttggatgtgagaccctattttgaaatagagtcctgactcagaacaccaacttaagaatttgggggattaaagatgtgaagaccacagtcttgggttttcatatctggagaagactatttgccatgacgttttgttgccctggtatttggacactcctcagctttaatgggtgtggcccctttagggttagtcctcagactaatgatagtgtctgctttctgcatgaacggcaatatgggactccctccaagctagggtttggcaagtctgccctagagtcatttactctcctctgcctccatttgttaatacagaatcaacatttagtcttcattatctttttttttttttttgagacagagtttcgatctattttaagtatgtgaagaaaatctacttgtaaaaggctcagatcttaattaaaaggtaattgtagcacattaccaattataaggtgaagaaatgtttttttcccaagtgtgatgcattgttcttcagatgttgaaaagaaagcaaaaaataccttctaacttaagacagaatttttaacaaaatgagcagtaaaagtcacatgaaccactccaaaaatcagtgcattttgcatatttttaaacaaagacagcttgttgaatactgagaagaggagtgcaaggagaaggtctgtactaacaaagccaaattcctcaagctcttactggactcagttcagagtggtgggccattaaccccaacatggaatttttccatataaatctcaatgaattccctttcatttgaataggcaaacccaaatccatgcaagtgttttaaagcactgtcctgtcttaatcttacatgctgaaagtcttcatggtgatatgcactatattcagtatacgtatgttttcctacttctcttgtaaaactgttgcatgatccaacttcagcaatgaattgtgcctagtggagaacctctatagatcttaaaaaatgaattattctttagcagtgtattactcacatgggtgcaatctttagccccagggaggtcaataatgtcttttaaagccagaagtcacattttaccaatatgcatttatcataattggtgcttaggctgtatattcaagcctgttgtcttaacattttgtataaaaaagaacaacagaaattatctgtcatttgagaagtggcttgacaatcatttgagctttgaaagcagtcactgtggtgtaatatgaatgctgtcctagtggtcatagtaccaagggcacgtgtctccccttggtataactgatttcctttttagtcctctactgctaaataagttaattttgcattttgcagaaagaaacattgattgctaaatctttttgctgctgtgttttggtgttttcatgtttacttgttttatattgatctgttttaagtatgagaggcttatagtgccctccattgtaaatccatagtcatctttttaagcttattgtgtttaagaaagtagctatgtgttaaacagaggtgatggcagcccttccctagcacactggtggaagagaccccttaagaacctgaccccagtgaatgaagctgatgcacagggagcaccaaaggaccttcgttaagtgataattgtcctggcctctcagccatgaccgttatgaggaaatatcccccattcgaacttaacagatgcctcctctccaaagagaattaaaatcgtagcttgtacagatcaagagaatatactgggcagaatgaagtatgtttgtttatttttctttaaaaataaaggattttggaactctggagagtaagaatatagtatagagtttgcctcaacacatgtgagggccaaataacctgctagctaggcagtaataaactctgttacagaagagaaaaagggccgggcacagtggcttattcctgtaatcccaacactgtggaaggccgaggcaggaggatcacttgagtccaggagtttgaaacctacctaggcaacatggtgaaaccttgtctctaccaaaataaaaattagctgggcatggtggcacgtgcctgtggtcccagctacttgggaggctgaggtgggagcctgggaggtcaaggctgcagtgagccatgatcatgccactgcactccatcctgggtgacagcaagatcttgtctcaaaaaaaaaaaaaaaaaaaaaaaaaccaggagtgaaaaaggaaagtagaaggcagctgctggcctagatgttggtttgggaatattaggtgatcctgttgagattctggatccagagcaatttctttagcttttgactttgccaaagtgtagatagcctttatccagcagtattttaagtggggaatgcaacgtgaggccaactgaacaattccccccgtggctgcccagatagtcacagtcaaggttggagagtctccttccagccagtgacctacccaaaccttttgttctgtaaaactgctctggaaataccgggaagcccagttttctcacgtggtttctagcttcttcagactcagcccaaattaggaagtgcagaagcacatgatggtgaaaaacctaggatttggcagccttccagaatggtatggaatctgagggaagatttatgtttcgttttggaggatagctcaagttgaattttctttccagccagttaccctttcaacctacccatactttgtacaactcttacacaaatacttagatatttattagatagccctgaattcactctaattataaacagggagtgtaaactgcccccagatgttcctgggctgggtaaaagcagctggagtgaagcactcattttccataaaggtaacaaagggcagctcagtggttactcaagctcaaaagggtttttttaagagcaagcattggttaagtctgtgtatactgagttggaagtgatttcagcacattcttttttagtggagtgaaagttctgaagcccccttttaacttcctcttggtttttcattataattggtagccatctcatgaactgtctctgactgttgtctctttgtggtcatgtgattgtgagcttgctttctgacttgcatttctgactttatcctgttgttaggaagatagaaactaggttttgaaagattacatgattcaagcgagggattttaaagtaaagatgtatttattctgaagaatctaaaagataacagattatttgcttatgaaagaacaatatagtctgggaatcccagaatgtcaagccaaaggtctaagaagtcatctccttcaaatactttaataaagaagtatttcgaggagatatctgtccaaaaaggtttgactggcctccagattccagttatttttaaaaagcaacttaccactaaatccttgagtctccatagagtaacagtaaagaaactgatgtaacagactctcctctcaaaggatctcctctggaagagactatcagcggcagcattctccagggaagacccatcccctagtgccagagcttgcatcctggagactaaagattgcacttttttgtagttttttgtccaaatgcaatcccatttctgtgcctcttagcatgcagttagatttggacaaacaagattcctaaggaatgactttattaactataatatggttacagctattatataaatatatattctggttatagttctaatatggagatgttgtgtgcaatgctggcctgtggtggtctgtgtaatgctttaacttgtatggaggaggccaggctcagagctgagatgtggcctgaaccttccctgtatcgatcctttaatttagaactgtcaagatgtcactttctccccctctgccttttagtggtatctgacatatactcaaaacagtaatttcctggtcacatcattaactgctaattctgtatttataaagaattttcagatggacatgtacaaatttgaactcaaaccatccccagtccagatacagggcagcgtgtaggtgaccacaccagagcctcagcctcggtccttctcagccgtcgggataggatccaggcatttcttttaaatctcagaggtagcagtaaacttttcagtattgctgttagcaagtgtgtgtttgccaatagatacccattatactaatgtgccaagtaaatgttcattgcacatctgcttccactgtgttcccacgggtgccatgaagtgtgtgaggagcccctcatctggagggatgagtgctgcgttgactactgctatcaggattgtgttgtgtggaatattcatctacataaattttatatgcacagtaatttccctttttatatgtcaagtaactatttgtaaaagttatactcacaaattattataatgattactaatatattttttccatgtttcattgcctgaataaaaactgtttaccactgtta

SEQ ID NO: 43732 - protein, 608 aa, Artificial Sequence
  derived and/or modified sequence
MTASPDYLVVLFGITAGATGAKLGSDEKELILLFWKVVDLANKKVGQLHEVLVRPDQLELTEDCKEETKIDVESLSSASQLDQALRQFNQSVSNELNIGVGTSFCLCTDGQLHVRQILHPEASKKNVLLPECFYSFFDLRKEFKKCCPGSPDIDKLDVATMTEYLNFEKSSSVSRYGASQVEDMGNIILAMISEPYNHRFSDPERVNYKFESGTCSKMELIDDNTVVRARGLPWQSSDQDIARFFKGLNIAKGGAALCLNAQGRRNGEALVRFVSEEHRDLALQRHKHHMGTRYIEVYKATGEDFLKIAGGTSNEVAQFLSKENQVIVRMRGLPFTATAEEVVAFFGQHCPITGGKEGILFVTYPDGRPTGDAFVLFACEEYAQNALRKHKDLLGKRYIELFRSTAAEVQQVLNRFSSAPLIPLPTPPIIPVLPQQFVPPTNVRDCIRLRGLPYAATIEDILDFLGEFATDIRTHGVHMVLNHQGRPSGDAFIQMKSADRAFMAAQKCHKKNMKDRYVEVFQCSAEEMNFVLMGGTLNRNGLSPPPCKLPCLSPPSYTFPAPAAVIPTEAAIYQPSVILNPRALQPSTAYYPAGTQLFMNYTAYYPSV

SEQ ID NO: 43733 - DNA, 1827 bp, Artificial Sequence
  derived and/or modified sequence
atgacagcatcccctgattacctggtcgtactgttcggaattactgcgggagccaccggtgcaaagctgggctcagatgaaaaagaacttatcctgctgttctggaaggtggtcgatctcgcaaataagaaggttggacagctccatgaagtgctggtaagacctgatcagctggagctaactgaagactgcaaagaagagactaaaatcgacgtggagagtctgagtagcgcctcccagctcgaccaggccctcaggcagtttaatcagagtgtcagcaacgaactcaatattggagttggaacctcattctgtctgtgcaccgatggccagctgcatgtgcgccaaatcctgcaccctgaagcttctaagaagaatgtattactccccgaatgtttttacagtttctttgacctccggaaggagttcaagaaatgttgccctggatcccccgacattgacaaacttgatgttgcgacaatgacagagtatctcaacttcgagaaatcaagctcagtcagtagatatggagcctcacaggtcgaagatatgggcaacataatcctggcaatgatttctgagccctacaaccatcggttcagtgatccggagagggttaattacaaattcgaatcaggtacctgttctaaaatggagcttattgatgataacactgtggtacgggcacgcggactgccatggcagtcctcggatcaggatattgcaaggtttttcaaaggcttgaacatcgcgaaaggaggggctgccttgtgtcttaatgctcagggacgcagaaatggagaggcactagtacggtttgtttccgaagagcatagggacctcgcactacagcggcacaagcatcacatgggaacacggtacatcgaagtttacaaagccacgggggaggatttcctcaagattgcaggcgggaccagcaacgaggttgcccagttcctctccaaggagaaccaagttatagtccggatgagagggctcccctttacagccacagcagaagaggtggtggcattctttggccagcactgcccaatcaccgggggaaaagaaggcatcctcttcgtcacttacccagacggccgccccactggggacgcattcgtgctgtttgcatgtgaggaatatgcccagaacgccctgaggaaacataaagatctcttggggaagcggtacatcgagttattcagatcaacggcggcagaagtgcaacaagtgctaaataggttctcatcagcccccctgatacctctgcccacaccacctattattccagttctcccacagcagttcgtgccccctaccaatgtcagggactgcatccgtctgcgggggcttccctacgctgccactatcgaggatatcctcgactttctgggagaatttgccaccgacatcagaacccatggagtccatatggtcctgaatcatcaggggaggccttccggtgacgcgttcatccaaatgaagagtgccgaccgcgcctttatggccgcccagaagtgccataagaaaaatatgaaggatcggtacgtggaggtcttccaatgctccgctgaggaaatgaatttcgtactgatgggaggaaccctgaaccgcaacggattgtcccccccaccttgcaaactgccttgtctgtcgcctccatcctacacattccctgccccggccgccgttattcccacagaggcagctatttaccaacccagtgttattctcaacccaagggccctgcagccctctacggcatattatcccgcggggactcagctctttatgaattacaccgcgtattacccctccgtctag

SEQ ID NO: 43734 - DNA, 1827 bp, Artificial Sequence
  derived and/or modified sequence
atgacagccagcccagactacctggtggtgctgtttggcatcacagctggggccactggagccaagctgggcagtgatgagaaggagctgatcctgctcttctggaaggtggtggacctggccaacaagaaggtgggccagctgcacgaggtgctggtgcggccagaccagctggagctgacagaggactgcaaggaggagaccaagattgatgtggagagcctgagcagcgccagccagctggaccaggccctgcggcagttcaaccagagcgtgtccaatgagctgaacatcggcgtgggcaccagcttctgcctgtgcacagatggccagctgcacgtgcggcagatcctgcaccctgaggccagcaagaagaatgtgctgctgcctgagtgcttctacagcttctttgacctgaggaaggagttcaagaagtgctgccccggcagcccagacatcgacaagctggatgtggccaccatgacagagtacctgaactttgagaagagcagctctgtgagccgctacggggccagccaggtggaggacatgggcaacatcatcctggccatgatcagcgagccctacaaccaccgcttcagtgaccctgagcgggtgaactacaagtttgagagcggcacctgcagcaagatggagctgattgatgacaacacagtggtgcgggcccggggcctgccctggcagagcagtgaccaggacatcgcccgcttcttcaagggcctgaacatcgccaagggcggggccgccctgtgcctgaatgcccagggcagaagaaatggagaggccctggtgcgctttgtgtctgaggagcaccgggacctggccctgcagaggcacaagcaccacatgggcacccgctacatcgaggtgtacaaggccactggagaggacttcctgaagattgctgggggcaccagcaatgaggtggcccagttcctgagcaaagaaaaccaggtgattgtgaggatgaggggcctgcccttcaccgccacagctgaggaggtggtggccttcttcggccagcactgccccatcactggaggcaaggagggcatcctgtttgtgacctacccagatggccggcccactggagatgcctttgtgctgtttgcctgtgaggagtatgcccagaatgccctgaggaagcacaaggacctgctgggcaagcgctacatcgagctgttccgcagcacagctgctgaggtgcagcaggtgctgaaccgcttcagcagcgcccccctcatccccctgcccaccccacccatcatccctgtgctgccccagcagtttgtgccccccaccaacgtgcgggactgcatccggctgcggggcctgccctatgctgccaccatcgaggacatcctggacttcctgggggagtttgccacagacatccgcacccatggagtgcacatggtgctgaaccaccagggccggcccagcggagatgccttcatccagatgaagtctgctgaccgggccttcatggccgcccagaagtgccacaagaagaacatgaaggacagatatgtggaggtgttccagtgcagcgctgaggagatgaactttgtgctgatgggcggcaccctgaacagaaatggcctgagccccccaccctgcaagctgccctgcctgagcccccccagctacaccttccctgccccagctgctgtgatccccacagaggccgccatctaccagcccagcgtcatcctgaacccccgggccctgcagcccagcacagcctactacccagctggcacccagctgttcatgaactacacagcctactaccccagcgtgtag

SEQ ID NO: 43735 - DNA, 1827 bp, Artificial Sequence
  derived and/or modified sequence
atgaccgccagccccgactacctggtggtgctgttcggcatcaccgccggcgccaccggcgcgaaactcggttctgatgagaaggaactgatacttttattctggaaggtggtggacctggccaacaagaaagtgggtcagttacacgaggtcctggtgcggcctgaccagctggaactcactgaagactgtaaggaagagaccaagattgatgttgaatccctgagctctgcttcccagctggaccaggcactgcgccaatttaaccaatcagtatctaatgagctcaacataggagttggcacatctttctgcctgtgtacagacgggcagttgcatgtccgccaaattttgcacccagaggcttccaaaaagaatgtcctgcttcccgaatgcttctatagcttcttcgaccttcgaaaggagtttaaaaaatgctgccctgggagtccggacatcgataagctggatgtggcgacgatgactgaatacctgaactttgagaaatccagttcagtttctaggtatggtgcttcacaggtagaggatatgggtaatattatactcgccatgatctctgaaccatataaccaccggtttagtgatcctgaacgagtgaactataaattcgaatccggaacctgttcaaaaatggagctgatagacgacaacactgtagttagggcacgaggcctaccatggcagtctagtgatcaggatatcgccaggttttttaaaggactgaatatcgcaaaaggcggagctgcgctgtgtcttaacgctcagggtagaagaaatggcgaagccctggttcggttcgtgagcgaggaacatagggatcttgccctgcagcgccacaagcaccacatgggtacacgatacatcgaggtctataaagccaccggagaggactttctgaaaatagcgggagggacgtcaaatgaggtggcccagttcctctccaaggagaaccaagtgattgttcgaatgcgagggctcccattcactgccacggcagaagaagtagtggcattcttcggtcagcattgccccattacaggcggcaaagagggaatcctgtttgtcacataccccgatgggcggccaactggcgatgcctttgttttattcgcatgcgaggagtacgcgcagaatgctctgcgaaagcataaagatctccttggcaagcggtacatcgagctcttcagatcgacagccgctgaggtgcagcaggtactcaaccgcttttcaagtgcaccattgattccactgcccacacctccaatcatccccgtgctgcctcagcaattcgtgccacccactaatgtccgggactgtatcagattgcgaggcctgccatatgctgccacaattgaagatatcctggattttctgggggagtttgccaccgatattcgcacacacggcgtgcacatggttctgaatcaccaggggagaccctccggggatgccttcatccagatgaagtccgcagatagggctttcatggcggcccagaaatgccataaaaaaaatatgaaggaccgttatgtagaggtttttcagtgctccgcggaagagatgaatttcgtgctcatgggaggaaccctgaaccgcaacgggctgagtccccccccctgcaagctcccatgtctatcccccccgtcttatacttttccggcccccgccgctgttattcctactgaagcagctatttatcaaccctcagtcatcctgaatcccagggccttacagcctagcactgcctactaccccgccggcacgcagctgtttatgaactacactgcctattaccctagtgtctag

SEQ ID NO: 43736 - DNA, 1827 bp, Artificial Sequence
  derived and/or modified sequence
atgacggcttcacccgattatctggtcgtcctcttcggcataacagccggagcgactggagctaaactgggatcagatgaaaaagaactaatactgttattctggaaggtggtggatctggccaacaagaaggtgggtcagctacacgaggtcctcgtgcggccagaccaactggaactgacggaggactgtaaggaagaaacgaaaattgacgtcgaatcactgagcagcgctagtcagctggaccaggcactcagacagtttaaccagtcggtcagtaatgagttgaatatcggggtgggaacatctttctgcctgtgcaccgacggacagctccatgttaggcagattctgcatcctgaagcatcaaaaaaaaatgtgctgctgcccgagtgcttttattcttttttcgacctgaggaaagagtttaagaagtgctgtcccggtagcccagatatagataagcttgacgttgcaaccatgacagagtacctaaatttcgaaaagtctagtagcgtgtcgcggtacggggcatcccaagtcgaagatatgggtaacattatcctcgctatgatctctgagccatataaccatcggttcagcgaccctgagagggtgaattataagttcgagagcggtacatgctcgaaaatggagctaatcgacgataataccgttgtgcgcgctcggggattaccatggcagtcctccgatcaagacatcgcgcgattttttaaagggctcaacatcgcaaaggggggtgcagccttatgcctcaacgcacagggcagacgtaacggcgaggcactggtgagatttgtttctgaagagcatcgggacttagcgctgcaaagacataagcatcacatgggcaccagatatatagaagtgtacaaagccacaggagaggatttccttaagattgccggtgggactagcaacgaggtggcccagtttttgtccaaagagaaccaagtgatcgttagaatgcggggactgcccttcactgctaccgcggaggaagtcgttgcattcttcggccaacactgccctattacaggcggaaaggagggaatcctttttgtgacataccccgacggacggcctactggcgatgccttcgtgttatttgcctgcgaagagtacgctcaaaatgcgttgcggaaacacaaggacctgcttggaaagcggtatattgaactcttccgtagtaccgccgcagaggttcagcaggtgctaaatcggtttagctcggcgccactgatcccgctccccaccccacccataattccagtgctgccgcagcagtttgtgccccctaccaatgtgagggactgcatccggctccggggactgccttacgccgctaccattgaggatatcctggacttcctcggggagttcgccacggacatcaggacccacggtgtacatatggtgctgaatcaccaggggcgtccgagcggcgacgccttcatccagatgaaaagcgctgaccgggctttcatggccgcacagaagtgtcacaagaagaacatgaaagaccgctatgttgaagtcttccagtgcagtgccgaggagatgaacttcgtgctgatgggcggtaccttaaacagaaatggcctgtctcctcctccatgcaaactcccttgcctgtccccgccatcatatacatttcccgctccggcagcagtgattcccactgaggccgctatctaccagccatccgtgatcttgaaccccagagcactccagccatctaccgcctactaccccgcaggcacgcagctgtttatgaattatacggcttactatccctccgtgtag

SEQ ID NO: 43737 - DNA, 1827 bp, Artificial Sequence
  derived and/or modified sequence
atgaccgccagccccgactacctggtggtgctgttcggcatcaccgccggcgccaccggcgccaagctgggcagcgacgagaaggagctgatcctgctgttctggaaggtggtggacctggccaacaagaaggtgggccagctgcacgaggtgctggtgagacccgaccagctggagctgaccgaggactgcaaggaggagaccaagatcgacgtggagagcctgagcagcgccagccagctggaccaggccctgagacagttcaaccagagcgtgagcaacgagctgaacatcggcgtgggcaccagcttctgcctgtgcaccgacggccagctgcacgtgagacagatcctgcaccccgaggccagcaagaagaacgtgctgctgcccgagtgcttctacagcttcttcgacctgagaaaggagttcaagaagtgctgccccggcagccccgacatcgacaagctggacgtggccaccatgaccgagtacctgaacttcgagaagagcagcagcgtgagcagatacggcgccagccaggtggaggacatgggcaacatcatcctggccatgatcagcgagccctacaaccacagattcagcgaccccgagagagtgaactacaagttcgagagcggcacctgcagcaagatggagctgatcgacgacaacaccgtggtgagagccagaggcctgccctggcagagcagcgaccaggacatcgccagattcttcaagggcctgaacatcgccaagggcggcgccgccctgtgcctgaacgcccagggcagaagaaacggcgaggccctggtgagattcgtgagcgaggagcacagagacctggccctgcagagacacaagcaccacatgggcaccagatacatcgaggtgtacaaggccaccggcgaggacttcctgaagatcgccggcggcaccagcaacgaggtggcccagttcctgagcaaggagaaccaggtgatcgtgagaatgagaggcctgcccttcaccgccaccgccgaggaggtggtggccttcttcggccagcactgccccatcaccggcggcaaggagggcatcctgttcgtgacctaccccgacggcagacccaccggcgacgccttcgtgctgttcgcctgcgaggagtacgcccagaacgccctgagaaagcacaaggacctgctgggcaagagatacatcgagctgttcagaagcaccgccgccgaggtgcagcaggtgctgaacagattcagcagcgcccccctgatccccctgcccaccccccccatcatccccgtgctgccccagcagttcgtgccccccaccaacgtgagagactgcatcagactgagaggcctgccctacgccgccaccatcgaggacatcctggacttcctgggcgagttcgccaccgacatcagaacccacggcgtgcacatggtgctgaaccaccagggcagacccagcggcgacgccttcatccagatgaagagcgccgacagagccttcatggccgcccagaagtgccacaagaagaacatgaaggacagatacgtggaggtgttccagtgcagcgccgaggagatgaacttcgtgctgatgggcggcaccctgaacagaaacggcctgagcccccccccctgcaagctgccctgcctgagcccccccagctacaccttccccgcccccgccgccgtgatccccaccgaggccgccatctaccagcccagcgtgatcctgaaccccagagccctgcagcccagcaccgcctactaccccgccggcacccagctgttcatgaactacaccgcctactaccccagcgtgtag

SEQ ID NO: 43738 - DNA, 3482 bp, Artificial Sequence
  derived and/or modified sequence
ggggggtgggcgctctttctttttctcttagaagagggtttagcacaggttttttcgttctcacttccacaccaccttaccgcctcccgaccccccctctccccctccccacctatcgtcatgacggcctctccggattacttggtggtgctttttgggatcactgctggggccaccggggccaagctaggctcggatgagaaggagttgatcctgctgttctggaaagtcgtggatctggccaacaagaaggtgggacagttgcacgaagtgctagttagaccggatcagttggaactgacggaggactgcaaagaagaaactaaaatagacgtcgaaagcctgtcctcggcgtcgcagctggaccaagccctccgacagtttaaccagtcagtgagcaatgaactgaatattggagtagggacttccttctgtctctgtactgatgggcagcttcatgtcaggcaaatcctgcatcctgaggcttccaagaagaatgtactattacctgaatgcttctattccttttttgatcttcgaaaagaattcaagaaatgttgccctggttcacctgatattgacaaactggacgttgccacaatgacagagtatttaaattttgagaagagtagttcagtctctcgatatggagcctctcaagttgaagatatggggaatataattttagcaatgatttcagagccttataatcacaggttttcagatccagagagagtgaattacaagtttgaaagtggaacttgcagcaagatggaacttattgatgataacaccgtagtcagggcacgaggtttaccatggcagtcttcagatcaagatattgcaagattcttcaaaggactcaatattgccaagggaggtgcagcactttgtctgaatgctcagggtcgaaggaacggagaagctctggttaggtttgtaagtgaggagcaccgagacctagcactacagaggcacaaacatcacatggggacccggtatattgaggtttacaaagcaacaggtgaagatttccttaaaattgctggtggtacttccaatgaggtagcccagtttctctccaaggaaaatcaagtcattgtccgcatgcgggggctccctttcacggccacagctgaagaagtggtggccttctttggacagcattgccctattactgggggaaaggaaggcatcctctttgtcacctacccagatggtaggccaacaggggacgcttttgtcctctttgcctgtgaggaatatgcacagaatgcgttgaggaagcataaagacttgttgggtaaaagatacattgaactcttcaggagcacagcagctgaagttcagcaggtgctgaatcgattctcctcggcccctctcattccacttccaacccctcccattattccagtactacctcagcaatttgtgccccctacaaatgttagagactgtatacgccttcgaggtcttccctatgcagccacaattgaggacatcctggatttcctgggggagttcgccacagatattcgtactcatggggttcacatggttttgaatcaccagggccgcccatcaggagatgcctttatccagatgaagtctgcggacagagcatttatggctgcacagaagtgtcataaaaaaaacatgaaggacagatatgttgaagtctttcagtgttcagctgaggagatgaactttgtgttaatggggggcactttaaatcgaaatggcttatccccaccgccatgtaagttaccatgcctgtctcctccctcctacacatttccagctcctgctgcagttattcctacagaagctgccatttaccagccctctgtgattttgaatccacgagcactgcagccctccacagcgtactacccagcaggcactcagctcttcatgaattacacagcgtactatcccagtgtttgaaagatgtatggtgatcttgaaacctccagacacaagaaaacttctagcaaattcaggggaagtttgtctacactcaggctgcagtattttcagcaaacttgattggacaaacgggcctgtgccttatcttttggtggagtgaaaaaatttgagctagtgaagccaaatcgtaacttacagcaagcagcatgcagcatacctggctctttgctgattgcaaataggcatttaaaatgtgaatttggaatcagatgtctccattacttccagttaaagtggcatcataggtgtttcctaagttttaagtcttggataaaaactccaccagtgtctaccatctccaccatgaactctgttaaggaagcttcatttttgtatattcccgctcttttctcttcatttccctgtcttctgcataatcatgccttcttgctaagtaattcaagcataagatcttggaataataaaatcacaatcttaggagaaagaataaaattgttattttcccagtctcttggccatgatgatatcttatgattaaaaacaaattaaattttaaaacacctgaagataaattagaagaaattgtgcaccctccacaaaacatacaaagtttaaaagtttggatctttttctcagcaggtatcagttgtaaataatgaattaggggccaaaatgcaaaacgaaaaatgaagcagctacatgtagttagtaatttctagtttgaactgtaattgaatattgtggcttcatatgtattattttatattgtacttttttcattattgatggtttggactttaataagagaaattccatagtttttaatatcccagaagtgagacaatttgaacagtgtattctagaaaacaatacactaactgaacagaagtgaatgcttatatatattatgatagccttaaacctttttcctctaatgccttaactgtcaaataattataaccttttaaagcataggactatagtcagcatgctagactgagaggtaaacactgatgcaattagaacaggtactgatgctgtcagtgtttaacactatgtttagctgtgtttatgctataaaagtgcaatattagacactagctagtactgctgcctcatgtaactccaaagaaaacaggatttcattaagtgcattgaatgtggatatttctctaagttactcatattgtcctttgcttgaatgcaatgccgtgcagatttatgaggctgctatttttattttctgtgcattactttaacaccttaaagggagaagcaaacatttccttcttcagctgactggcaatggccctttaactgcaataggaagaaaaaaaaaaaggtttgtgtgaaaattggtgataactggcacttaagatcgaaaagaaatttctgtatacttgatgccttaagatgcccaaagctgcccaaagctctgaaagactttaagataggcagtaatgcttactacaatactactgagtttttgtagagttaacatttgataataaaacttgcctgtttaatctcaa

SEQ ID NO: 43739 - protein, 659 aa, Artificial Sequence
  derived and/or modified sequence
MTASPDYLVVLFGITAGATGAKLGSDEKELILLFWKVVDLANKKVGQLHEVLVRPDQLELTEDCKEETKIDVESLSSASQLDQALRQFNQSVSNELNIGVGTSFCLCTDGQLHVRQILHPEASKKNVLLPECFYSFFDLRKEFKKCCPGSPDIDKLDVATMTEYLNFEKSSSVSRYGASQVEDMGNIILAMISEPYNHRFSDPERVNYKFESGTCSKMELIDDNTVVRARGLPWQSSDQDIARFFKGLNIAKGGAALCLNAQGRRNGEALVRFVSEEHRDLALQRHKHHMGTRYIEVYKATGEDFLKIAGGTSNEVAQFLSKENQVIVRMRGLPFTATAEEVVAFFGQHCPITGGKEGILFVTYPDGRPTGDAFVLFACEEYAQNALRKHKDLLGKRYIELFRSTAAEVQQVLNRFSSAPLIPLPTPPIIPVLPQQFVPPTNVRDCIRLRGLPYAATIEDILDFLGEFATDIRTHGVHMVLNHQGRPSGDAFIQMKSADRAFMAAQKCHKKNMKDRYVEVFQCSAEEMNFVLMGGTLNRNGLSPPPCLSPPSYTFPAPAAVIPTEAAIYQPSVILNPRALQPSTAYYPAGTQLFMNYTAYYPSPPGSPNSLGYFPTAANLSGVPPQPGTVVRMQGLAYNTGVKEILNFFQGYQCLKDVW

SEQ ID NO: 43740 - DNA, 1980 bp, Artificial Sequence
  derived and/or modified sequence
atgactgctagccccgactatctggtagtcctcttcggcataacggctggtgctacaggcgctaaattaggctccgacgagaaggaactgatacttttattttggaaggtggtagatctcgcaaacaaaaaagtgggacagctgcatgaggtgctcgtgaggccagatcagttggaactgaccgaagactgcaaggaggaaacaaagatcgacgtggaatcactgtccagtgccagccagcttgaccaagccctgcggcaatttaaccagagtgtatccaatgagctgaatataggcgtgggcacctccttttgtctgtgtactgacggacaactccatgtgaggcagatcctgcaccctgaggcctctaaaaagaacgttcttctgccagaatgtttttattctttttttgatctaagaaaggaattcaagaaatgctgtcctggttcccctgacatcgataagttggatgtggctactatgactgagtaccttaacttcgagaaaagtagcagcgtcagccggtacggcgcaagccaggtcgaagatatgggtaacattatcctagcaatgatctccgagccatacaatcatcgatttagcgacccagagagagttaattataagttcgaaagcggaacgtgtagcaaaatggagctcatcgatgacaacacagtggtgcgcgctcgtgggttgccctggcagtcctcggatcaggacattgcacgctttttcaaagggctgaacatcgctaaggggggtgctgccttgtgcctcaacgctcagggccgccgtaacggggaggctttggtccgattcgtctcagaagagcaccgcgaccttgccttgcagcgccacaagcaccatatgggcaccaggtatatcgaagtgtacaaggccacaggtgaagatttcctcaagattgctggggggacgtccaacgaggtcgcgcagttcctcagcaaggaaaaccaggtcattgtgaggatgcgcgggttgccgttcactgcgaccgcagaggaagtcgtagctttcttcggccagcactgtccaatcaccggtggcaaagaaggcattttatttgtgacctaccctgatgggaggcccaccggcgatgccttcgtactgttcgcttgtgaggaatacgcccagaacgcccttcgcaaacataaggatttacttgggaaaaggtacatcgaactgtttagatcaactgcggctgaagtgcagcaagtcctcaatagattttcctcggcaccactgattccgctccccacccctcctataattccagtgttgcctcagcagtttgtaccccccactaacgtgagggattgcatacgcctgcgcgggctgccttatgccgccaccatagaagatatcctggatttcctgggagagtttgctaccgatatcaggacccacggcgtccacatggtcctaaatcatcaggggcgaccctcgggcgacgcgttcatccagatgaaaagcgctgacagggcctttatggccgctcagaagtgtcacaaaaaaaacatgaaagaccggtatgtcgaagtgtttcagtgttcagccgaagagatgaactttgtcttgatgggtgggacacttaaccgcaacggattgtcccctcctccctgtctgtcgccgccctcctatacgttcccagctccagctgcggtgattccaaccgaagccgctatctaccaaccttcagtgatactgaaccccagagccctgcagcctagtaccgcctattatcccgccggcacacagcttttcatgaactacactgcatactaccccagtccacctggcagtcctaattctctggggtattttcccacggccgccaacctctctggagtgcctccgcagccaggtaccgtggtgcgtatgcagggactggcctataataccggggtgaaggaaatcctcaacttttttcaggggtaccagtgcctcaaagatgtgtggtag

SEQ ID NO: 43741 - DNA, 1980 bp, Artificial Sequence
  derived and/or modified sequence
atgacagccagcccagactacctggtggtgctgtttggcatcacagctggggccactggagccaagctgggcagtgatgagaaggagctgatcctgctcttctggaaggtggtggacctggccaacaagaaggtgggccagctgcacgaggtgctggtgcggccagaccagctggagctgacagaggactgcaaggaggagaccaagattgatgtggagagcctgagcagcgccagccagctggaccaggccctgcggcagttcaaccagagcgtgtccaatgagctgaacatcggcgtgggcaccagcttctgcctgtgcacagatggccagctgcacgtgcggcagatcctgcaccctgaggccagcaagaagaatgtgctgctgcctgagtgcttctacagcttctttgacctgaggaaggagttcaagaagtgctgccccggcagcccagacatcgacaagctggatgtggccaccatgacagagtacctgaactttgagaagagcagctctgtgagccgctacggggccagccaggtggaggacatgggcaacatcatcctggccatgatcagcgagccctacaaccaccgcttcagtgaccctgagcgggtgaactacaagtttgagagcggcacctgcagcaagatggagctgattgatgacaacacagtggtgcgggcccggggcctgccctggcagagcagtgaccaggacatcgcccgcttcttcaagggcctgaacatcgccaagggcggggccgccctgtgcctgaatgcccagggcagaagaaatggagaggccctggtgcgctttgtgtctgaggagcaccgggacctggccctgcagaggcacaagcaccacatgggcacccgctacatcgaggtgtacaaggccactggagaggacttcctgaagattgctgggggcaccagcaatgaggtggcccagttcctgagcaaagaaaaccaggtgattgtgaggatgaggggcctgcccttcaccgccacagctgaggaggtggtggccttcttcggccagcactgccccatcactggaggcaaggagggcatcctgtttgtgacctacccagatggccggcccactggagatgcctttgtgctgtttgcctgtgaggagtatgcccagaatgccctgaggaagcacaaggacctgctgggcaagcgctacatcgagctgttccgcagcacagctgctgaggtgcagcaggtgctgaaccgcttcagcagcgcccccctcatccccctgcccaccccacccatcatccctgtgctgccccagcagtttgtgccccccaccaacgtgcgggactgcatccggctgcggggcctgccctatgctgccaccatcgaggacatcctggacttcctgggggagtttgccacagacatccgcacccatggagtgcacatggtgctgaaccaccagggccggcccagcggagatgccttcatccagatgaagtctgctgaccgggccttcatggccgcccagaagtgccacaagaagaacatgaaggacagatatgtggaggtgttccagtgcagcgctgaggagatgaactttgtgctgatgggcggcaccctgaacagaaatggcctgagccccccaccctgcctgagcccccccagctacaccttccctgccccagctgctgtgatccccacagaggccgccatctaccagcccagcgtcatcctgaacccccgggccctgcagcccagcacagcctactacccagctggcacccagctgttcatgaactacacagcctactaccccagccccccaggcagccccaacagcctgggctacttccccacagctgccaacctgtctggagtgcccccccagcccggcaccgtggtgaggatgcagggcctggcctacaacacaggagtgaaggagatcctgaacttcttccagggctaccagtgcctgaaggatgtgtggtag

SEQ ID NO: 43742 - DNA, 1980 bp, Artificial Sequence
  derived and/or modified sequence
atgaccgccagccccgactacctggtggtgctgttcggcatcaccgccggcgcgacaggcgcaaaactgggctccgacgagaaggagctgatcctgctgttctggaaagtcgtggacctggccaataagaaggtgggtcaactgcacgaagtgcttgtgcgaccagatcagctcgagctgacagaggattgcaaggaagaaaccaaaattgatgttgaaagtctgagtagcgcatctcagcttgatcaggccctgagacagtttaatcagtcagtttcaaacgagttgaacatcggcgttggtactagcttttgtttatgtaccgatgggcaacttcatgtaaggcaaatattgcaccccgaggcgtcgaagaaaaacgtgttattaccagaatgtttctacagtttcttcgatctgaggaaagagttcaaaaagtgctgcccaggttcgccagacatagacaagctggatgttgccactatgacagagtacctcaacttcgaaaaatcaagcagcgtatctcggtacggtgcctcccaagtggaagatatgggtaacattatcctggccatgatcagtgagccttacaatcatagattttctgatcctgaacgtgtcaattataagtttgaatctgggacttgtagcaaaatggaactgattgacgataacacggtggtccgcgcgagaggcctcccctggcagtcttcagaccaggatatcgcccgattcttcaaaggcctcaatatcgcaaaggggggcgccgcactctgtctcaacgcccaaggacgcagaaacggcgaagcgcttgttcgttttgttagcgaggagcatcgtgacctagcccttcagcgacataagcatcacatggggacgcgatacattgaggtctataaggccacgggagaggatttcctgaaaatcgcaggcgggacaagcaatgaggtggcccaattcctgtccaaagagaatcaggtaattgtgaggatgagaggccttccattcactgcaacagcggaggaggttgtcgccttcttcggacagcactgtcctataacgggaggaaaggaagggattctgtttgtcacataccctgatggtaggccgactggagacgccttcgtgctgttcgcctgcgaggaatacgcccagaatgcactcaggaaacataaagacttgctgggcaagcgttacattgagctctttcgctcaactgcagcagaggtgcagcaagtcctcaatcgattctcttccgccccactaatccccctacccactcctccgattatcccagtgctaccccaacaatttgttcctccgaccaacgtgagggattgtattcgactacgggggctcccgtatgccgccacgatcgaagatatcttggacttcctaggcgagtttgccaccgatataagaacacatggtgttcacatggtgctcaaccatcaggggaggccctcaggggacgctttcattcagatgaaaagtgccgaccgcgcattcatggccgcgcagaaatgccacaagaaaaacatgaaagaccgatatgtggaggtgtttcagtgtagtgccgaggagatgaactttgtgcttatgggtggaactctaaaccggaacggcctctcccctcccccctgtttgagtcctccttcctacaccttccccgcacctgcagctgtaatacccacggaagctgccatttatcagccaagcgtaattctaaatccacgggcactccagccttctaccgcttattaccctgctggcacacaattattcatgaactataccgcttattacccttctccccccggaagtcccaactctctagggtacttccctaccgcggccaatctttccggagtccctccccagcccggcaccgtcgtgcgcatgcagggcctggcatacaacaccggcgtcaaggagattctgaattttttccagggctatcaatgcctcaaggacgtctggtag

SEQ ID NO: 43743 - DNA, 1980 bp, Artificial Sequence
  derived and/or modified sequence
atgactgctagtccagactatcttgtagttctgttcggcattacagcaggcgcaactggcgctaagttggggtcggacgaaaaggaactcatccttttattctggaaggtggtggacctcgccaacaaaaaagttggccagctgcacgaagtcctggtccggccagatcaactggagctgactgaagactgcaaggaagagactaagatcgatgtggaatctctttcctccgctagtcagctggatcaggcccttaggcagttcaaccagtcagtgtccaacgagctgaacatcggggttggtacctccttctgcctatgcactgatggacaactgcatgtgcgtcaaatcctgcatcccgaggcctcaaagaaaaatgtgttgctgcccgaatgtttttattccttctttgacctgcgcaaagaatttaagaaatgctgccccggtagccccgatatcgataagctggatgttgccacaatgactgaatatctgaactttgagaaatcatcttctgtttccagatacggcgctagccaagttgaagatatgggcaatatcatcctggcaatgatttccgagccttataatcatagattctccgatccggaaagagtgaactacaagtttgagagcggtacctgctcaaaaatggagcttattgacgacaacactgtagtgcgagctcgtgggttaccctggcagtcaagcgatcaggatatcgcaagatttttcaagggcctcaatatcgcgaaggggggagccgctctctgtctaaatgcacagggcaggcggaacggcgaggcactagtccgctttgttagtgaggaacatagggacctcgcactgcaacgccacaagcatcacatggggacacgctatatcgaggtctataaggcaaccggggaagactttcttaagatcgcaggaggcacctccaacgaagtagcacagtttcttagcaaagagaaccaggtgattgttcgaatgagaggacttccttttactgccactgcagaagaagtggtcgccttcttcggacagcattgcccaattacggggggaaaagaaggcatcctcttcgttacatatcccgatggcagacccaccggagatgcctttgttctgttcgcctgcgaagagtacgcccagaatgccctgcgcaagcacaaggacctcctcgggaagagatacatcgaactgttccgaagtaccgcagccgaagtgcagcaggtattgaatcgattctctagcgccccacttatccccctgccgactccacccatcatccccgtcctgccccaacagtttgttcccccaacaaacgtccgtgattgcattcgcttacggggtctcccatatgctgccacaatcgaggacatcttagatttcctgggcgagttcgcaaccgacatcagaactcatggtgtgcacatggtgctgaatcatcaagggagacctagtggtgacgcattcatccagatgaaatcagctgaccgagcattcatggcagctcaaaaatgtcataaaaagaacatgaaggaccgttacgtggaggtgtttcagtgttctgctgaggagatgaactttgtgctgatgggtgggactctgaaccgtaatggcttatctcctcctccttgtctctcgcccccttcctacacttttcccgcacctgccgctgtgatccctaccgaagctgccatttaccagccatctgtaattcttaatccccgagctctgcagccgtctaccgcgtattaccccgctggcactcagctatttatgaattacacagcgtactatccatcacctccaggctctcctaatagcctgggctacttccccacggccgcaaacctctcaggcgtgccacctcaaccaggaacagtcgtgcgcatgcaaggtctcgcatataacaccggagtgaaagagatcctgaactttttccagggctaccaatgtctgaaggatgtctggtag

SEQ ID NO: 43744 - DNA, 1980 bp, Artificial Sequence
  derived and/or modified sequence
atgaccgccagccccgactacctggtggtgctgttcggcatcaccgccggcgccaccggcgccaagctgggcagcgacgagaaggagctgatcctgctgttctggaaggtggtggacctggccaacaagaaggtgggccagctgcacgaggtgctggtgagacccgaccagctggagctgaccgaggactgcaaggaggagaccaagatcgacgtggagagcctgagcagcgccagccagctggaccaggccctgagacagttcaaccagagcgtgagcaacgagctgaacatcggcgtgggcaccagcttctgcctgtgcaccgacggccagctgcacgtgagacagatcctgcaccccgaggccagcaagaagaacgtgctgctgcccgagtgcttctacagcttcttcgacctgagaaaggagttcaagaagtgctgccccggcagccccgacatcgacaagctggacgtggccaccatgaccgagtacctgaacttcgagaagagcagcagcgtgagcagatacggcgccagccaggtggaggacatgggcaacatcatcctggccatgatcagcgagccctacaaccacagattcagcgaccccgagagagtgaactacaagttcgagagcggcacctgcagcaagatggagctgatcgacgacaacaccgtggtgagagccagaggcctgccctggcagagcagcgaccaggacatcgccagattcttcaagggcctgaacatcgccaagggcggcgccgccctgtgcctgaacgcccagggcagaagaaacggcgaggccctggtgagattcgtgagcgaggagcacagagacctggccctgcagagacacaagcaccacatgggcaccagatacatcgaggtgtacaaggccaccggcgaggacttcctgaagatcgccggcggcaccagcaacgaggtggcccagttcctgagcaaggagaaccaggtgatcgtgagaatgagaggcctgcccttcaccgccaccgccgaggaggtggtggccttcttcggccagcactgccccatcaccggcggcaaggagggcatcctgttcgtgacctaccccgacggcagacccaccggcgacgccttcgtgctgttcgcctgcgaggagtacgcccagaacgccctgagaaagcacaaggacctgctgggcaagagatacatcgagctgttcagaagcaccgccgccgaggtgcagcaggtgctgaacagattcagcagcgcccccctgatccccctgcccaccccccccatcatccccgtgctgccccagcagttcgtgccccccaccaacgtgagagactgcatcagactgagaggcctgccctacgccgccaccatcgaggacatcctggacttcctgggcgagttcgccaccgacatcagaacccacggcgtgcacatggtgctgaaccaccagggcagacccagcggcgacgccttcatccagatgaagagcgccgacagagccttcatggccgcccagaagtgccacaagaagaacatgaaggacagatacgtggaggtgttccagtgcagcgccgaggagatgaacttcgtgctgatgggcggcaccctgaacagaaacggcctgagcccccccccctgcctgagcccccccagctacaccttccccgcccccgccgccgtgatccccaccgaggccgccatctaccagcccagcgtgatcctgaaccccagagccctgcagcccagcaccgcctactaccccgccggcacccagctgttcatgaactacaccgcctactaccccagcccccccggcagccccaacagcctgggctacttccccaccgccgccaacctgagcggcgtgcccccccagcccggcaccgtggtgagaatgcagggcctggcctacaacaccggcgtgaaggagatcctgaacttcttccagggctaccagtgcctgaaggacgtgtggtag

SEQ ID NO: 43745 - DNA, 3746 bp, Artificial Sequence
  derived and/or modified sequence
atacaaaaagggcaggcctcctgcgccctccttcccaccccccttcctgccctgggcgtggagcaccgaccaggtgtgggcttgggtggttggttaccgccttttgcactagcagtagcaaggaaggggggtgggcgctctttctttttctcttagaagagggtttagcacaggttttttcgttctcacttccacaccaccttaccgcctcccgaccccccctctccccctccccacctatcgtcatgacggcctctccggattacttggtggtgctttttgggatcactgctggggccaccggggccaagctaggctcggatgagaaggagttgatcctgctgttctggaaagtcgtggatctggccaacaagaaggtgggacagttgcacgaagtgctagttagaccggatcagttggaactgacggaggactgcaaagaagaaactaaaatagacgtcgaaagcctgtcctcggcgtcgcagctggaccaagccctccgacagtttaaccagtcagtgagcaatgaactgaatattggagtagggacttccttctgtctctgtactgatgggcagcttcatgtcaggcaaatcctgcatcctgaggcttccaagaagaatgtactattacctgaatgcttctattccttttttgatcttcgaaaagaattcaagaaatgttgccctggttcacctgatattgacaaactggacgttgccacaatgacagagtatttaaattttgagaagagtagttcagtctctcgatatggagcctctcaagttgaagatatggggaatataattttagcaatgatttcagagccttataatcacaggttttcagatccagagagagtgaattacaagtttgaaagtggaacttgcagcaagatggaacttattgatgataacaccgtagtcagggcacgaggtttaccatggcagtcttcagatcaagatattgcaagattcttcaaaggactcaatattgccaagggaggtgcagcactttgtctgaatgctcagggtcgaaggaacggagaagctctggttaggtttgtaagtgaggagcaccgagacctagcactacagaggcacaaacatcacatggggacccggtatattgaggtttacaaagcaacaggtgaagatttccttaaaattgctggtggtacttccaatgaggtagcccagtttctctccaaggaaaatcaagtcattgtccgcatgcgggggctccctttcacggccacagctgaagaagtggtggccttctttggacagcattgccctattactgggggaaaggaaggcatcctctttgtcacctacccagatggtaggccaacaggggacgcttttgtcctctttgcctgtgaggaatatgcacagaatgcgttgaggaagcataaagacttgttgggtaaaagatacattgaactcttcaggagcacagcagctgaagttcagcaggtgctgaatcgattctcctcggcccctctcattccacttccaacccctcccattattccagtactacctcagcaatttgtgccccctacaaatgttagagactgtatacgccttcgaggtcttccctatgcagccacaattgaggacatcctggatttcctgggggagttcgccacagatattcgtactcatggggttcacatggttttgaatcaccagggccgcccatcaggagatgcctttatccagatgaagtctgcggacagagcatttatggctgcacagaagtgtcataaaaaaaacatgaaggacagatatgttgaagtctttcagtgttcagctgaggagatgaactttgtgttaatggggggcactttaaatcgaaatggcttatccccaccgccatgcctgtctcctccctcctacacatttccagctcctgctgcagttattcctacagaagctgccatttaccagccctctgtgattttgaatccacgagcactgcagccctccacagcgtactacccagcaggcactcagctcttcatgaattacacagcgtactatcccagccccccaggttcgcctaatagtcttggctacttccctacagctgctaatcttagcggtgtccctccacagcctggcacggtggtcagaatgcagggcctggcctacaatactggagttaaggaaattcttaacttcttccaaggttaccagtgtttgaaagatgtatggtgatcttgaaacctccagacacaagaaaacttctagcaaattcaggggaagtttgtctacactcaggctgcagtattttcagcaaacttgattggacaaacgggcctgtgccttatcttttggtggagtgaaaaaatttgagctagtgaagccaaatcgtaacttacagcaagcagcatgcagcatacctggctctttgctgattgcaaataggcatttaaaatgtgaatttggaatcagatgtctccattacttccagttaaagtggcatcataggtgtttcctaagttttaagtcttggataaaaactccaccagtgtctaccatctccaccatgaactctgttaaggaagcttcatttttgtatattcccgctcttttctcttcatttccctgtcttctgcataatcatgccttcttgctaagtaattcaagcataagatcttggaataataaaatcacaatcttaggagaaagaataaaattgttattttcccagtctcttggccatgatgatatcttatgattaaaaacaaattaaattttaaaacacctgaagataaattagaagaaattgtgcaccctccacaaaacatacaaagtttaaaagtttggatctttttctcagcaggtatcagttgtaaataatgaattaggggccaaaatgcaaaacgaaaaatgaagcagctacatgtagttagtaatttctagtttgaactgtaattgaatattgtggcttcatatgtattattttatattgtacttttttcattattgatggtttggactttaataagagaaattccatagtttttaatatcccagaagtgagacaatttgaacagtgtattctagaaaacaatacactaactgaacagaagtgaatgcttatatatattatgatagccttaaacctttttcctctaatgccttaactgtcaaataattataaccttttaaagcataggactatagtcagcatgctagactgagaggtaaacactgatgcaattagaacaggtactgatgctgtcagtgtttaacactatgtttagctgtgtttatgctataaaagtgcaatattagacactagctagtactgctgcctcatgtaactccaaagaaaacaggatttcattaagtgcattgaatgtggatatttctctaagttactcatattgtcctttgcttgaatgcaatgccgtgcagatttatgaggctgctatttttattttctgtgcattactttaacaccttaaagggagaagcaaacatttccttcttcagctgactggcaatggccctttaactgcaataggaagaaaaaaaaaaaggtttgtgtgaaaattggtgataactggcacttaagatcgaaaagaaatttctgtatacttgatgccttaagatgcccaaagctgcccaaagctctgaaagactttaagataggcagtaatgcttactacaatactactgagtttttgtagagttaacatttgataataaaacttgcctgtttaatctcaa

SEQ ID NO: 43746 - protein, 166 aa, Artificial Sequence
  derived and/or modified sequence
MRGLHPWHVLRRPLGPQAHANDPECGQRPVPALSHHGSQRVVLLQTATLLGVLLLGYGYFWLLVPNPEARLQQLGLFCSVFTISMYLSPLADLAKVIQTKSTQCLSYPLTIATLLTSASWCLYGFRLRDPYIMVSNFPGIVTSFIRFWLFWKYPQEQDRNYWLLQT

SEQ ID NO: 43747 - DNA, 501 bp, Artificial Sequence
  derived and/or modified sequence
atgagaggcctgcacccctggcacgtgctgagaagacccctgggcccccaggcccacgccaacgaccccgagtgcggccagagacccgtgcccgccctgagccaccacggcagccagagagtggtgctgctgcagaccgccaccctgctgggcgtgctgctgctgggctacggctacttctggctgctggtgcccaaccccgaggccagactgcagcagctgggcctgttctgcagcgtgttcaccatcagcatgtacctgagccccctggccgacctggccaaggtgatccagaccaagagcacccagtgcctgagctaccccctgaccatcgccaccctgctgaccagcgccagctggtgcctgtacggcttcagactgagagacccctacatcatggtgagcaacttccccggcatcgtgaccagcttcatcagattctggctgttctggaagtacccccaggagcaggacagaaactactggctgctgcagacctag

SEQ ID NO: 43748 - DNA, 501 bp, Artificial Sequence
  derived and/or modified sequence
atgagaggtttacatccttggcacgtgcttcgccggcctctcggtccccaggcacatgctaacgacccggaatgcggccagcggccagtccccgccctgtcacatcacggctcccagagagtggtgctactgcagacagccacactcctaggggtattactgctcggttatggttatttctggttgctagtccccaatccagaagcccgcttgcagcagctaggcctgttctgttccgtctttacaatatctatgtatcttagtccactggccgatctcgccaaagtgattcagaccaagtccacgcagtgcctgagctatcctcttacaattgccactttgttaactagcgccagctggtgcctgtatgggtttcggttgagggacccatatatcatggtctccaatttccctggcattgtgacctccttcatcaggttttggttattttggaagtaccctcaggaacaagataggaattattggttgctgcaaacatag

SEQ ID NO: 43749 - DNA, 501 bp, Artificial Sequence
  derived and/or modified sequence
atgaggggcctgcacccctggcacgtgctgcggcggcccctgggcccccaggcccacgccaatgaccctgaatgtggccagaggcctgtgcctgccctgagccaccacggcagccagagggtggtgctgctgcagacagccaccctgctgggcgtgctgctgctgggctacggctacttctggctgctggtgcccaaccctgaggcccggctgcagcagctgggcctcttctgcagcgtcttcaccatctccatgtacctgagccccctggccgacctggccaaggtgatccagaccaagagcacccagtgcctgagctaccccctgaccatcgccaccctgctgaccagcgcctcctggtgcctgtatggcttccggctgcgggacccctacatcatggtgagcaacttccctggcatcgtgaccagcttcatccgcttctggctgttctggaagtacccccaggagcaggacaggaactactggctgctgcagacctag

SEQ ID NO: 43750 - DNA, 501 bp, Artificial Sequence
  derived and/or modified sequence
atgcggggcctgcacccctggcacgtgctgcggcggcccctgggcccacaggcacacgcaaatgacccagagtgtggtcaaaggcccgtccccgcgctgtcccaccacggatctcagcgcgtcgtgcttttgcagactgctactctgctgggggtactgcttttgggatacggatacttctggcttctggttcccaatcccgaagccaggctccagcagctgggactgttttgcagtgtctttaccataagcatgtatcttagccccctggcagatctagccaaagtgatccagaccaagtccacacagtgtctgagttaccctttaacgatcgcaacccttttgacttctgcctcctggtgcctgtatgggttcagactcagggatccatacatcatggtgtccaatttcccaggcatcgtgacctcattcattagattctggctgttttggaaataccctcaggagcaggatcgaaactattggttactgcaaacgtag

SEQ ID NO: 43751 - DNA, 501 bp, Artificial Sequence
  derived and/or modified sequence
atgcgtggcctccacccttggcatgtcctaagacgcccattagggcctcaggcccacgcgaatgatccagaatgcgggcagcgtccggtgccagctcttagtcaccatgggtctcaaagagtagtgttgctgcagaccgcaaccttgctgggagtgctccttctcgggtacggttatttttggctgctcgtcccaaatccggaagcgcgtctgcagcagctagggctcttctgctctgtctttactatatcgatgtatttaagccctttagcggatctcgctaaagtgatccagactaagtctacacagtgtctgtcctatcccctgaccatagcgacgttgcttactagcgcctcatggtgcctgtacggtttccgcctgcgggacccatatataatggtttcgaactttccaggcatcgttacgagctttatcagattctggttgttttggaagtatccccaggagcaagacaggaattactggctcctgcagacctag

SEQ ID NO: 43752 - DNA, 1166 bp, Artificial Sequence
  derived and/or modified sequence
cggcaaccgcaggctcgcggcgggcgctgggcgcgggatccgactctagtcgtaatggaggcgggcggctttctggactcgctcatttacggagcatgcgtggtcttcacccttggcatgttctccgccggcctctcggacctcaggcacatgcgaatgacccggagtgtggacaacgtccagttcctgccctttctcaccacggaagtcaacgtgttgtgctcctacagactgcaaccctgctaggggtccttctcctgggttatggctacttttggctcctggtacccaaccctgaggcccggcttcagcagttgggcctcttctgcagtgtcttcaccatcagcatgtacctctcaccactggctgacttggctaaggtgattcaaactaaatcaacccaatgtctctcctacccactcaccattgctacccttctcacctctgcctcctggtgcctctatgggtttcgactcagagatccctatatcatggtgtccaactttccaggaatcgtcaccagctttatccgcttctggcttttctggaagtacccccaggagcaagacaggaactactggctcctgcaaacctgaggctgctcatctgaccactgggcaccttagtgccaacctgaaccaaagagacctccttgtttcagctgggcctgctgtccagcttcccaggtgcagtgggttgtgggaacaagagatgactttgaggataaaaggaccaaagaaaaagctttacttagatgattgattggggcctaggagatgaaatcactttttattttttagagatttttttttttaattttggaggttggggtgcaatctttagaatatgccttaaaaggccgggcgcggtggctcacgcctgtaatcccagcactttgggaggccaaggtgggcggatcgcctgaggtcaggagttcaagaccaacctgactaacatggtgaaaccccatctctactaaaaatacaaaattagccaggcatgatggcacatgcctgtaatcccagatacttgggaggctgaggcaggagaattgcttgaacccaggaggtggaggttgcagtgagctgagatcgtgccattgtgatatgaatatgccttatatgctgatatgaatatgccttaaaataaagtgttccccacccctg

SEQ ID NO: 43753 - protein, 167 aa, Artificial Sequence
  derived and/or modified sequence
MEAGGFLDSLIYGACVVFTLGMFSAGLSDLRHMRMTRSVDNVQFLPFLTTEVNNLGWLSYGALKGDGILIVVNTVGAALQTLYILAYLHYCPRKAKVIQTKSTQCLSYPLTIATLLTSASWCLYGFRLRDPYIMVSNFPGIVTSFIRFWLFWKYPQEQDRNYWLLQT

SEQ ID NO: 43754 - DNA, 504 bp, Artificial Sequence
  derived and/or modified sequence
atggaggccggcggcttcctggacagcctgatctacggcgcctgcgtggtgttcaccctgggcatgttcagcgccggcctgagcgacctgagacacatgagaatgaccagaagcgtggacaacgtgcagttcctgcccttcctgaccaccgaggtgaacaacctgggctggctgagctacggcgccctgaagggcgacggcatcctgatcgtggtgaacaccgtgggcgccgccctgcagaccctgtacatcctggcctacctgcactactgccccagaaaggccaaggtgatccagaccaagagcacccagtgcctgagctaccccctgaccatcgccaccctgctgaccagcgccagctggtgcctgtacggcttcagactgagagacccctacatcatggtgagcaacttccccggcatcgtgaccagcttcatcagattctggctgttctggaagtacccccaggagcaggacagaaactactggctgctgcagacctag

SEQ ID NO: 43755 - DNA, 504 bp, Artificial Sequence
  derived and/or modified sequence
atggaggcgggaggatttctggatagtctgatttatggggcttgtgtagtgtttactttgggcatgttctcagccggcttgtcagacttgcggcatatgaggatgacgagatccgtcgataatgtgcagtttttgccgttcctgacaacagaggtgaacaatctcggatggctgtcttacggcgccctgaagggcgacggtatcctaattgtggtgaacacagttggtgccgcgctacagacactctatatactggcctatttacattactgtccaagaaaggccaaggtcatacagaccaaaagcactcaatgtctcagctatcccctgactatcgccaccctcctgacttctgccagctggtgcctgtatggattccgtctgcgcgatccctatatcatggtgtccaattttccaggcattgtgacgtcgttcattcgcttttggctcttctggaagtatccccaggagcaggaccggaactactggctccttcagacgtag

SEQ ID NO: 43756 - DNA, 504 bp, Artificial Sequence
  derived and/or modified sequence
atggaggccggcggcttcctggacagcctcatctacggggcctgtgtggtgttcaccctgggcatgttttctgctggcctgagtgacctgcggcacatgaggatgaccaggtctgtggacaacgtgcagttcctgcccttcctgaccacagaggtgaacaacctgggctggctgtcctatggagccctgaagggagatggcatcctgattgtggtgaacacagtgggcgccgccctgcagaccctgtacatcctggcctacctgcactactgccccaggaaggccaaggtgatccagaccaagagcacccagtgcctgagctaccccctgaccatcgccaccctgctgaccagcgcctcctggtgcctgtatggcttccggctgcgggacccctacatcatggtgagcaacttccctggcatcgtgaccagcttcatccgcttctggctgttctggaagtacccccaggagcaggacaggaactactggctgctgcagacctag

SEQ ID NO: 43757 - DNA, 504 bp, Artificial Sequence
  derived and/or modified sequence
atggaggccggcggcttcctggacagcctgatctacggcgcctgcgttgtctttaccctggggatgtttagtgccggtctgtcggatcttaggcacatgcggatgaccaggtctgttgacaacgtgcagtttttaccattcctaacaaccgaggtgaacaacttagggtggctcagttatggagcactgaagggagatggaattctgattgtggtaaacacggttggggcagcgttacagactctgtacattctggcgtatctgcattattgccctagaaaagctaaagtgatccagacgaaatcaacccagtgcctctcgtatcctctgactatagcaacattattgactagtgccagctggtgcctctacggtttccgcctcagggacccttacattatggtaagtaactttcccggcatcgtgacaagtttcattagattctggttgttttggaaatatccccaggagcaggatcgtaactattggctgcttcagacctag

SEQ ID NO: 43758 - DNA, 504 bp, Artificial Sequence
  derived and/or modified sequence
atggaagcgggtggattcctggactctttaatctatggggcatgcgtggtgtttacattggggatgtttagcgcgggactgagcgacctccggcacatgaggatgaccaggagtgttgataacgtgcagtttctgcctttcctgactactgaagtcaataatctcggctggttgtcttacggcgcactgaaaggagacgggattctcattgtcgttaacactgttggcgctgccctccagaccttatatatcctggcctatttacactactgtcccaggaaagccaaagtcattcagaccaagtccactcaatgcctgagttacccactgacaattgctacactgcttaccagtgcgtcatggtgcttgtacggatttaggttgcgcgacccctatattatggtctcaaatttccccggtatcgtaacgtctttcatccggttctggctcttttggaagtaccctcaagagcaggaccgaaattattggcttctgcagacatag

SEQ ID NO: 43759 - DNA, 1137 bp, Artificial Sequence
  derived and/or modified sequence
gtaggtcccggcaaccgcaggctcgcggcgggcgctgggcgcgggatccgactctagtcgtaatggaggcgggcggctttctggactcgctcatttacggagcatgcgtggtcttcacccttggcatgttctccgccggcctctcggacctcaggcacatgcgaatgacccggagtgtggacaacgtccagttcctgccctttctcaccacggaagtcaacaacctgggctggctgagttatggggctttgaagggagacgggatcctcatcgtcgtcaacacagtgggtgctgcgcttcagaccctgtatatcttggcatatctgcattactgccctcggaaggctaaggtgattcaaactaaatcaacccaatgtctctcctacccactcaccattgctacccttctcacctctgcctcctggtgcctctatgggtttcgactcagagatccctatatcatggtgtccaactttccaggaatcgtcaccagctttatccgcttctggcttttctggaagtacccccaggagcaagacaggaactactggctcctgcaaacctgaggctgctcatctgaccactgggcaccttagtgccaacctgaaccaaagagacctccttgtttcagctgggcctgctgtccagcttcccaggtgcagtgggttgtgggaacaagagatgactttgaggataaaaggaccaaagaaaaagctttacttagatgattgattggggcctaggagatgaaatcactttttattttttagagatttttttttttaattttggaggttggggtgcaatctttagaatatgccttaaaaggccgggcgcggtggctcacgcctgtaatcccagcactttgggaggccaaggtgggcggatcgcctgaggtcaggagttcaagaccaacctgactaacatggtgaaaccccatctctactaaaaatacaaaattagccaggcatgatggcacatgcctgtaatcccagatacttgggaggctgaggcaggagaattgcttgaacccaggaggtggaggttgcagtgagctgagatcgtgccattgtgatatgaatatgccttatatgctgatatgaatatgccttaaaataaagtgttccccacccctgc

SEQ ID NO: 43760 - protein, 827 aa, Artificial Sequence
  derived and/or modified sequence
MVVQKPHGTMEYTAGNQDTLNSIALKFNITPNKLVELNKLFTHTIVPGQVLFVPDANSPSSTLRLSSSSPGATVSPSSSDAEYDKLPDADLARKALKPIERVLSSTSEEDEPGVVKFLKMNCRYFTDGKGVVGGVMIVTPNNIMFDPHKSDPLVIENGCEEYGLICPMEEVVSIALYNDISHMKIKDALPSPGEWEDLASEKDINPFSKFKSINKEKRQQNGEKIMTSDSRPIVPLEKSTGHTPTKPSGSSVSEKLKKLDSSRETSHGSPTVTKLSKEPSDTSSAFESTAKENFLGEDDDFVDLEELSSQTGGGMHKKDTLKECLSLDPEERKKAESQINNSAVEMQVQSALAFLGTENDVELKGALDLETCEKQDIMPEVDKQSGSPESRVENTLNIHEDLDKVKLIEYYLTKNKEGPQVSENLQKTELSDGKSIEPGGIDITLSSSLSQAGDPITEGNKEPDKTWVKKGEPLPVKLNSSTEANVIKEALDSSLESTLDNSCQGAQMDNKSEVQLWLLKRIQVPIEDILPSKEEKSKTPPMFLCIKVGKPMRKSFATHTAAMVQQYGKRRKQPEYWFAVPRERVDHLYTFFVQWSPDVYGKDAKEQGFVVVEKEELNMIDNFFSEPTTKSWEIITVEEAKRRKSTCSYYEDEDEEVLPVLRPHSALLENMHIEQLARRLPARVQGYPWRLAYSTLEHGTSLKTLYRKSASLDSPVLLVIKDMDNQIFGAYATHPFKFSDHYYGTGETFLYTFSPHFKVFKWSGENSYFINGDISSLELGGGGGRFGLWLDADLYHGRSNSCSTFNNDILSKKEDFIVQDLEVWAFD

SEQ ID NO: 43761 - protein, 183 aa, Artificial Sequence
  derived and/or modified sequence
MGAAHSVWEVDHLYTFFVQWSPDVYGKDAKEQGFVVVEKEELNMIDNFFSEPTTKSWEIITVEEAKRRKSTCSYYEDEDEEVLPVLRPHSALLENMHIEQLARRLPARVQGYPWRLAYSTLEHGTSLKTLYRKSASLDSPVLLVIKDMDNQIFGAYATHPFKFSDHYYGTGETFLYTFSPHFK

SEQ ID NO: 43762 - protein, 440 aa, Artificial Sequence
  derived and/or modified sequence
DADLARKALKPIERVLSSTSEEDEPGVVKFLKMNCRYFTDGKGVVGGVMIVTPNNIMFDPHKSDPLVIENGCEEYGLICPMEEVVSIALYNDISHMKIKDALPSPGEWEDLASEKDINPFSKFKSINKEKRQQNGEKIMTSDSRPIVPLEKSTGHTPTKPSGSSVSEKLKKLDSSRETSHGSPTVTKLSKEPSDTSSAFESTAKENFLGEDDDFVDLEELSSQTGGGMHKKDTLKECLSLDPEERKKAESQINNSAVEMQVQSALAFLGTENDVELKGALDLETCEKQDIMPEVDKQSGSPESRVENTLNIHEDLDKVKLIEYYLTKNKEGPQVSENLQKTELSDGKSIEPGGIDITLSSSLSQAGDPITEGNKEPDKTWVKKGEPLPVKLNSSTEANVIKEALDSSLESTLDNSCQGAQMDNKSEVQLWLLKRIQVPIE

SEQ ID NO: 43763 - protein, 191 aa, Artificial Sequence
  derived and/or modified sequence
MDTKEEKKERKQSYFARLKKKKQAKQNAETASAVATRTHTGKEDNNTVVLEPDKCNIAVEEEYMTDEKKKRKSNQLKEIRRTELKRYYSIDDNQNKTHDKKEKKMVVQKPHGTMEYTAGNQDTLNSIALKFNITPNKLVELNKLFTHTIVPGQVLFVPDANSPSSTLRLSSSSPGATVSPSSSDAEYDKLP

SEQ ID NO: 43764 - protein, 117 aa, Artificial Sequence
  derived and/or modified sequence
MDTKEEKKERKQSYFARLKKKKQAKQNAETASAVATRTHTGKEDNNTVVLEPDKCNIAVEEEYMTDEKKKRKSNQLKEIRRTELKRYYSIDDNQNKTHDKKEKKMVVQKPHGTMEYT

SEQ ID NO: 43765 - protein, 90 aa, Artificial Sequence
  derived and/or modified sequence
MDTKEEKKERKQSYFARLKKKKQAKQNAETASAVATRTHTGKEDNNTVVLEPDKCNIAVEEEYMTDEKKKRKSNQLKEIRRTELKRYYSI

SEQ ID NO: 43766 - DNA, 576 bp, Artificial Sequence
  derived and/or modified sequence
atggacacgaaagaagaaaaaaaggaaagaaagcagtcatactttgcgcgacttaagaaaaagaagcaagcgaagcagaacgccgaaaccgcgtctgcagtcgcaaccagaacccatacaggaaaagaggataataacacggtcgttctggagccagataagtgtaacatcgctgtcgaagaggagtatatgacggatgagaagaaaaagcggaagagtaaccagctgaaggagattcgcagaactgagctcaaaagatattattccattgacgacaatcagaataagactcacgataaaaaggagaagaaaatggttgtccagaaacctcacgggacgatggagtacacagccggcaatcaggatactctaaattccattgctctcaaattcaacataacaccaaacaagctcgtggagttgaataagttgttcacacacactatcgtgccgggacaagtgctgttcgtccctgacgcaaatagtccgtcctctaccctgcgcctgtcaagcagcagtccaggggctactgtgagtcccagtagcagcgacgctgaatatgataagctgccctag

SEQ ID NO: 43767 - DNA, 354 bp, Artificial Sequence
  derived and/or modified sequence
atggacaccaaagaagagaagaaagagcgaaaacagagctacttcgcccgcctgaagaagaaaaaacaggccaagcagaacgcagagactgctagcgcggtcgccacacggacgcacacaggcaaagaagataacaacactgtggtccttgaacctgacaagtgtaatattgccgtggaggaggaatacatgacagacgagaaaaaaaagagaaaatctaaccaacttaaggagatcaggcgaacagagttaaagagatattactctatcgacgataaccagaataagacacatgataaaaaggagaaaaagatggtcgtccagaaaccacacggaaccatggaatatacctag

SEQ ID NO: 43768 - DNA, 273 bp, Artificial Sequence
  derived and/or modified sequence
atggacactaaggaagagaagaaggagagaaagcagagttatttcgcccgattgaaaaagaaaaaacaagctaagcagaatgccgagacagcctccgctgtggctactaggacacacaccggtaaggaggacaacaacacagtggtgcttgagcccgataaatgtaatatcgcagtggaagaggaatacatgactgatgagaagaagaagagaaagtctaaccagctcaaagaaatcagaaggactgaattgaaacgatattattcgatctag

SEQ ID NO: 43769 - DNA, 273 bp, Artificial Sequence
  derived and/or modified sequence
atggacacaaaggaagaaaagaaggagcggaaacaaagctattttgctagacttaagaagaaaaaacaggcaaaacagaacgcagaaaccgctagtgcggtggccactcgtacacacacaggaaaagaagacaacaacaccgttgtgctagagccagataagtgtaatatagccgtcgaggaagaatatatgacggacgaaaaaaaaaagaggaaaagcaatcagttgaaggagatccgacggactgagctaaaaagatactatagcatttag

SEQ ID NO: 43770 - DNA, 273 bp, Artificial Sequence
  derived and/or modified sequence
atggatacaaaggaggagaaaaaagaacggaagcaatcctatttcgctaggctcaagaaaaagaaacaggccaagcaaaatgccgaaacggcgtccgccgtagcaacaagaacacacacaggtaaggaggataataatacagtggtgctcgaacctgataagtgtaatattgcggttgaagaggagtatatgaccgacgaaaagaaaaagcgaaagtcaaatcaactcaaagaaatacgtcgcaccgagctaaagcggtactattccatttag

SEQ ID NO: 43771 - DNA, 576 bp, Artificial Sequence
  derived and/or modified sequence
atggacaccaaggaggagaagaaggagaggaagcagagctactttgcccggctgaagaagaagaagcaggccaagcagaatgctgagacagccagcgctgtggccaccaggacccacacaggcaaggaggacaacaacacagtggtgctggagccagacaagtgcaacattgctgtggaggaggagtacatgacagatgagaagaagaagaggaagagcaaccagctgaaggagatccggaggacagagctgaagcgctactacagcattgatgacaaccagaacaagacccatgacaagaaggagaagaagatggtggtgcagaagccccacggcaccatggagtacacagctggcaaccaggacaccctgaacagcatcgccctgaagttcaacatcacccccaacaagctggtggagctgaacaagctgttcacccacaccatcgtgcccggccaggtgctgtttgtgcctgatgccaacagccccagcagcaccctgcggctgagcagcagcagccctggggccaccgtgagccccagcagcagtgatgctgaatatgacaagctgccctag

SEQ ID NO: 43772 - DNA, 354 bp, Artificial Sequence
  derived and/or modified sequence
atggacaccaaggaggagaagaaggagaggaagcagagctactttgcccggctgaagaagaagaagcaggccaagcagaatgctgagacagccagcgctgtggccaccaggacccacacaggcaaggaggacaacaacacagtggtgctggagccagacaagtgcaacattgctgtggaggaggagtacatgacagatgagaagaagaagaggaagagcaaccagctgaaggagatccggaggacagagctgaagcgctactacagcattgatgacaaccagaacaagacccatgacaagaaggagaagaagatggtggtgcagaagccccacggcaccatggagtacacctag

SEQ ID NO: 43773 - DNA, 273 bp, Artificial Sequence
  derived and/or modified sequence
atggacaccaaggaggagaagaaggagaggaagcagagctactttgcccggctgaagaagaagaagcaggccaagcagaatgctgagacagccagcgctgtggccaccaggacccacacaggcaaggaggacaacaacacagtggtgctggagccagacaagtgcaacattgctgtggaggaggagtacatgacagatgagaagaagaagaggaagagcaaccagctgaaggagatccggaggacagagctgaagcgctactacagcatctag

SEQ ID NO: 43774 - DNA, 576 bp, Artificial Sequence
  derived and/or modified sequence
atggacaccaaggaggagaagaaggagcggaagcagagctacttcgccagactgaagaagaagaaacaggcaaaacagaacgcggagacagcgagcgctgtggctacacggacgcacactggaaaggaagataataatacagttgtgcttgagccggataaatgcaacatcgccgtcgaagaggagtacatgactgacgagaagaagaagcgtaaaagcaaccaactgaaggagatcaggcgtaccgaattgaagcgatactacagcatcgatgacaaccagaacaagactcacgataagaaggagaagaaaatggtggtgcaaaaaccccacggtaccatggaatataccgccgggaaccaagatacacttaacagtatcgccttaaagtttaatatcacacctaacaaactggttgagttgaataagttatttacgcatacaatagtgcccggtcaggtgctctttgtccctgatgccaattcgcccagctccacactgagactctcaagctctagtcccggcgcaacagtctccccctcgagttcggacgccgagtacgacaagctgccgtag

SEQ ID NO: 43775 - DNA, 354 bp, Artificial Sequence
  derived and/or modified sequence
atggacaccaaggaggagaagaaggagcggaagcagagctacttcgcccgcctgaaaaagaaaaaacaagccaaacagaacgcggagaccgccagcgcagttgcaacacgaactcatactgggaaagaggacaataacaccgttgtcttggagcctgataagtgcaacatagctgtcgaggaggaatatatgaccgacgagaagaaaaagcgaaaatctaaccagctgaaggagatcaggaggactgagcttaaacgctattactcgatcgatgataaccagaacaagacccatgacaaaaaagagaagaagatggttgtccagaaaccacacggaactatggagtacacttag

SEQ ID NO: 43776 - DNA, 273 bp, Artificial Sequence
  derived and/or modified sequence
atggacaccaaggaggagaagaaggagcggaagcagagctacttcgcccggctcaagaaaaagaagcaggctaaacagaacgccgaaaccgcctccgctgtggctaccaggacccacacgggaaaggaagataataataccgtcgtactggagcctgataagtgcaacatcgccgttgaagaggagtacatgacagacgagaaaaagaagcgcaagtcgaatcaactgaaagaaatacgaagaacggaactcaaacgctattatagcatctag

SEQ ID NO: 43777 - DNA, 273 bp, Artificial Sequence
  derived and/or modified sequence
atggacaccaaggaggagaagaaggagcggaagcagagctacttcgccaggttgaaaaaaaaaaagcaggctaagcaaaacgcagagaccgcgtctgctgtagccaccagaacccacaccggtaaggaggacaataatactgttgtgctagaaccggacaagtgtaatatcgccgtcgaagaagaatatatgactgacgaaaaaaagaaacggaaatctaatcaactgaaagagattagacggaccgagttgaagaggtactatagtatctag

SEQ ID NO: 43778 - DNA, 273 bp, Artificial Sequence
  derived and/or modified sequence
atggacaccaaggaggagaagaaggagcggaagcagagctacttcgctagactgaagaaaaagaaacaagcaaagcaaaacgctgaaacagccagtgcagttgcaaccagaacgcataccgggaaagaggataataataccgttgttctggaaccggacaaatgtaatatagcggttgaggaagaatacatgactgacgagaagaagaagcggaaatcaaatcaactgaaggagattcgtagaacagagctcaagaggtactattctatttag

SEQ ID NO: 43779 - DNA, 2998 bp, Artificial Sequence
  derived and/or modified sequence
gatgcgctccccggcgcccagcagcagaggccaccgctcccagaaatgcatgcgaccgatccccttctcccggaccccaggagccggcgcccccgccctgtagggttacgactcactgattaaaaagagggactttttcaaatactttgcacttttgattgtgtattatggataccaaggaagagaagaaggaacggaaacaaagttattttgctcgatgacaatcaaaacaaaacacatgataaaaaagagaagaagatggtggttcagaagccccatgggactatggaatacactgctggaaaccaggacaccctaaactccatagcactgaaatttaacatcactcccaataaattggtggaactgaataaacttttcacacatactattgttccaggccaggtcctttttgtgccagatgccaactctccttccagtaccttaaggctatcatcatccagtcctggtgctactgtctctccttcatcatcagatgcagaatatgataaattgcctgatgctgacttagcacgaaaggccttgaaacccattgaaagagtcttatcgtctacttctgaagaagatgagccaggtgtggtgaaatttttaaaaatgaattgtcgatacttcaccgatggaaagggtgtggttggcggtgttatgatagtgactcctaacaacatcatgtttgaccctcataaatctgatcctctggttattgaaaatgggtgtgaggagtatggtctcatctgccccatggaagaggttgtttccattgcgctctacaatgacatttctcacatgaagatcaaagatgccttgccatcgcctggagaatgggaagacctggcttcagaaaaggatatcaacccattcagtaagttcaaatctatcaacaaggaaaaacgacagcagaatggagagaaaattatgacttcggattccagaccaatagtacctttggagaagtccacaggacatacacctacaaagccctcaggcagctctgtgtcagagaaattaaagaaactggactcctctagggagacatcccatggttctcccacagtgactaagctcagcaaggaaccttccgacacttcttctgcatttgaatctacagccaaagaaaactttctaggggaagatgatgattttgttgacttggaagaactttcttctcaaactggtggtggaatgcacaaaaaagacaccttgaaggagtgcctttctcttgacccagaggaacgaaagaaagctgagtcacaaataaacaattctgccgtggaaatgcaggtgcagtcagccctagcctttttgggaacagagaatgatgttgaactgaagggggcgctagatttagaaacctgtgagaagcaagatataatgccagaagtggacaagcagtctggttcgccagaaagccgagtagaaaacacactgaacatacatgaagatttagataaagttaaactcattgaatattacctgactaagaacaaagaagggccacaggtatctgaaaatttgcagaaaacagaattaagtgatggaaaaagtattgaaccagggggaatagacattacccttagtagttctctttcccaggcgggtgatcccataactgagggcaataaagagccagataagacctgggtgaaaaagggagagcccctcccggtaaaactgaactcttctacagaagcaaatgtgattaaagaggctctagactcctctttggaatctactctggacaacagctgtcaaggtgcacaaatggataataaatctgaagttcagttgtggctgttaaagagaattcaggtacccattgaagatatacttccttcaaaagaagaaaaaagcaagaccccacccatgttcctgtgcatcaaagtgggaaaaccaatgagaaaatcctttgccactcacactgcagccatggtccagcagtacggcaaacggagaaagcagccagagtactggtttgctgttcctcgggagagggtggatcatttgtacacattctttgttcagtggtctcccgatgtctatggaaaagatgccaaagagcaaggctttgtggtggtggagaaggaagaactgaacatgattgacaacttcttcagtgagccaacaaccaagagctgggagatcatcactgttgaagaggcaaagcgcaggaagagcacatgcagctactatgaagacgaggacgaagaggtgctgcctgtcctacggccccacagcgcgctcctggagaatatgcacatcgagcagctggcccgacgccttcctgcaagggtgcaagggtatccatggagactggcctatagcacgttagagcacgggaccagcttaaagacgctctaccggaaatcggcatcactagacagtcctgtcctattggtcatcaaagatatggataatcagatttttggagcatatgcaactcatcctttcaagttcagtgaccactattatggcacaggcgaaacttttctctacacattcagccctcattttaaggtctttaagtggagtggagaaaattcatactttatcaatggagacataagttctttagaacttggtggtggagggggacgatttggtttatggctagatgctgatttataccacggacgaagcaactcttgcagcactttcaataatgatattctttccaaaaaggaagacttcatagttcaggatctggaggtgtgggcatttgattgaaattcagactgccttaaaatataacattaaaaagactgggttcgatcagccctcctaaagctggctggaaaaagaagccccagcccagcctgcctcatcccaccccaatgcttcctttctgccatcatctcagagcatgatcacattgcagaaagattctggaaggtccatgtagagggcagacattgaagaaagaaacttaaaatccaggttgttgaaaagactttgtactcccacttcctccaaatccatacag

SEQ ID NO: 43780 - DNA, 765 bp, Artificial Sequence
  derived and/or modified sequence
gacccctccttccacccgccgagaggatgcgctccccggcgcccagcagcagaggccaccgctcccagaaatgcatgcgaccgatccccttctcccggaccccaggagccggcgcccccgccctgtagggttacgactcactgattaaaaagagggactttttcaaatactttgcacttttgattgtgtattatggataccaaggaagagaagaaggaacggaaacaaagttattttgctcgactgaaaaagaaaaaacaagccaaacaaaatgcagagacagcctcagctgtagctacaaggactcatactgggaaggaagataataatacagtagttttagagccagacaagtgcaacattgctgtggaagaggaatatatgactgatgagaaaaaaaagagaaaaagtaatcagttaaaggagatcaggcgtacagaactaaagagatattatagtattgatgacaatcaaaacaaaacacatgataaaaaagagaagaagatggtggttcagaagccccatgggactatggaatacactgctggaaaccaggacaccctaaactccatagcactgaaatttaacatcactcccaataaattggtggaactgaataaacttttcacacatactattgttccaggccaggtcctttttgtgccagatgccaactctccttccagtaccttaaggctatcatcatccagtcctggtgctactgtctctccttcatcatcagatgcagaatatgataaattgcct

SEQ ID NO: 43781 - DNA, 488 bp, Artificial Sequence
  derived and/or modified sequence
actccattttatttttcacattggccagtgtaaacttttaagtttacagttgctttgttatcttttcttacagggttacgactcactgattaaaaagagggactttttcaaatactttgcacttttgattgtgtattatggataccaaggaagagaagaaggaacggaaacaaagttattttgctcgactgaaaaagaaaaaacaagccaaacaaaatgcagagacagcctcagctgtagctacaaggactcatactgggaaggaagataataatacagtagttttagagccagacaagtgcaacattgctgtggaagaggaatatatgactgatgagaaaaaaaagagaaaaagtaatcagttaaaggagatcaggcgtacagaactaaagagatattatagtattgatgacaatcaaaacaaaacacatgataaaaaagagaagaagatggtggttcagaagccccatgggactatggaatacact

SEQ ID NO: 43782 - DNA, 548 bp, Artificial Sequence
  derived and/or modified sequence
agaatttgcaagttaagacacatgtacctagccactgggacagggaggtcattgaggacctccagctgtgtgacccacagctgtgtgggtcagtttggtgtagttaaggggtctctgctggttctgttcttttaaatggtgccatgtgtacaaacaaggaacacttttctgatgattcaaaaaatactttgtcttcatcacagctcttttgagggttacgactcactgattaaaaagagggactttttcaaatactttgcacttttgattgtgtattatggataccaaggaagagaagaaggaacggaaacaaagttattttgctcgactgaaaaagaaaaaacaagccaaacaaaatgcagagacagcctcagctgtagctacaaggactcatactgggaaggaagataataatacagtagttttagagccagacaagtgcaacattgctgtggaagaggaatatatgactgatgagaaaaaaaagagaaaaagtaatcagttaaaggagatcaggcgtacagaactaaagagatattatagtattg

SEQ ID NO: 43783 - DNA, 581 bp, Artificial Sequence
  derived and/or modified sequence
gacccctccttccacccgccgagaggatgcgctccccggcgcccagcagcagaggccaccgctcccagaaatgcatgcgaccgatccccttctcccggaccccaggagccggcgcccccgccctgtagattcccactctgtcgcccaggctggagtgcagtgatgtaatctcggctcactgcaacctccacttcccaggttcaagtgattctcctgcctcagcctccagagtagctgggattacagggttacgactcactgattaaaaagagggactttttcaaatactttgcacttttgattgtgtattatggataccaaggaagagaagaaggaacggaaacaaagttattttgctcgactgaaaaagaaaaaacaagccaaacaaaatgcagagacagcctcagctgtagctacaaggactcatactgggaaggaagataataatacagtagttttagagccagacaagtgcaacattgctgtggaagaggaatatatgactgatgagaaaaaaaagagaaaaagtaatcagttaaaggagatcaggcgtacagaactaaagagatattatagtattg

SEQ ID NO: 43784 - DNA, 576 bp, Artificial Sequence
  derived and/or modified sequence
atggataccaaggaggagaaaaaagagcgcaagcagtcctactttgcgagattgaaaaaaaagaagcaggccaaacagaatgccgagaccgcatccgctgtcgccacgaggacacacactgggaaagaagacaacaataccgtcgttctcgagcctgataagtgtaacatcgcagtggaggaagaatacatgacagatgagaagaaaaaacgaaagtccaatcagctcaaggagatcagaagaacagagctgaaaagatactatagcattgatgataatcagaacaagacccacgataaaaaggaaaaaaaaatggtcgtccagaagccacatggcacaatggaatacactgccggaaaccaggataccctgaatagcatcgcactgaaatttaatatcacacctaataagctggtcgaactaaacaagctgttcacccacacaatcgtccccggacaggtcctatttgtgcctgatgccaattccccttcctcaacactgaggctgtctagttcctccccaggcgctacggtgtcccccagcagttccgatgccgagtacgataaacttccatag

SEQ ID NO: 43785 - DNA, 354 bp, Artificial Sequence
  derived and/or modified sequence
atggatacgaaggaggagaagaaagagcgcaaacaatcttattttgcacgactgaagaaaaagaagcaggcgaagcagaatgcagagacagcttctgccgtggccactaggacgcataccggaaaagaagataacaacacggtggtgctagagccagacaagtgcaacattgcagtagaagaagaatacatgactgatgaaaaaaaaaagcggaagtcgaatcagctgaaagaaatccgaaggacagagctgaaacgttactattctatagacgataaccagaataagacccacgacaagaaagagaagaagatggtggttcagaagcctcacggaactatggagtatacctag

SEQ ID NO: 43786 - DNA, 273 bp, Artificial Sequence
  derived and/or modified sequence
atggacaccaaagaggagaaaaaagagcgcaagcagtcttactttgccagactgaaaaagaagaagcaggccaagcagaacgccgaaacagcctctgccgtggccacccgcacacacactgggaaggaagataacaatactgtggtgctggagcccgacaagtgcaatatagcagttgaggaagaatatatgactgacgagaaaaagaagcgcaagtccaatcagctgaaggaaatcaggaggacagagctaaaacgctattactctatatag

SEQ ID NO: 43787 - DNA, 273 bp, Artificial Sequence
  derived and/or modified sequence
atggacaccaaagaagagaagaaagagagaaagcagagctactttgccaggctcaagaaaaagaagcaggccaaacaaaatgccgaaaccgccagcgccgtcgccactcgtactcatactggcaaagaagacaacaacactgtggtattggagcccgacaagtgcaacatagctgtagaagaggaatatatgaccgacgagaaaaaaaagcgcaagtccaaccaactcaaggaaattcgcagaaccgaactgaagcgctactacagcatttag

SEQ ID NO: 43788 - DNA, 273 bp, Artificial Sequence
  derived and/or modified sequence
atggataccaaggaagaaaaaaaagaacgcaagcagtcctattttgctagactcaaaaaaaagaaacaggccaaacagaatgcagagacagcaagcgctgtggctacacgaactcacacggggaaagaagataataatacagtggtgctggaacctgacaaatgcaacattgctgttgaagaagagtatatgactgacgaaaaaaagaaacgtaaatcaaatcaactgaaagagatccgtaggacagagctaaaacgctactactctatttag

SEQ ID NO: 43789 - DNA, 576 bp, Artificial Sequence
  derived and/or modified sequence
atggacaccaaggaggagaagaaggagagaaagcagagctacttcgccagactgaagaagaagaagcaggccaagcagaacgccgagaccgccagcgccgtggccaccagaacccacaccggcaaggaggacaacaacaccgtggtgctggagcccgacaagtgcaacatcgccgtggaggaggagtacatgaccgacgagaagaagaagagaaagagcaaccagctgaaggagatcagaagaaccgagctgaagagatactacagcatcgacgacaaccagaacaagacccacgacaagaaggagaagaagatggtggtgcagaagccccacggcaccatggagtacaccgccggcaaccaggacaccctgaacagcatcgccctgaagttcaacatcacccccaacaagctggtggagctgaacaagctgttcacccacaccatcgtgcccggccaggtgctgttcgtgcccgacgccaacagccccagcagcaccctgagactgagcagcagcagccccggcgccaccgtgagccccagcagcagcgacgccgagtacgacaagctgccctag

SEQ ID NO: 43790 - DNA, 354 bp, Artificial Sequence
  derived and/or modified sequence
atggacaccaaggaggagaagaaggagagaaagcagagctacttcgccagactgaagaagaagaagcaggccaagcagaacgccgagaccgccagcgccgtggccaccagaacccacaccggcaaggaggacaacaacaccgtggtgctggagcccgacaagtgcaacatcgccgtggaggaggagtacatgaccgacgagaagaagaagagaaagagcaaccagctgaaggagatcagaagaaccgagctgaagagatactacagcatcgacgacaaccagaacaagacccacgacaagaaggagaagaagatggtggtgcagaagccccacggcaccatggagtacacctag

SEQ ID NO: 43791 - DNA, 273 bp, Artificial Sequence
  derived and/or modified sequence
atggacaccaaggaggagaagaaggagagaaagcagagctacttcgccagactgaagaagaagaagcaggccaagcagaacgccgagaccgccagcgccgtggccaccagaacccacaccggcaaggaggacaacaacaccgtggtgctggagcccgacaagtgcaacatcgccgtggaggaggagtacatgaccgacgagaagaagaagagaaagagcaaccagctgaaggagatcagaagaaccgagctgaagagatactacagcatctag

SEQ ID NO: 43792 - DNA, 744 bp, Artificial Sequence
  derived and/or modified sequence
atgggcggatgtacagcccttgtggcagtgagcctgcaggggaagctgtacatggccaacgcaggcgactcccgcgctatactcgtaaggcgcgacgaaatcaggcctctgtctttcgagtttactcctgagaccgaaaggcaaaggatccagcagctggccttcgtgtaccccgaactgctggctggcgagttcacgcggttggagttccctcgtagattgaaaggcgacgacctcgggcagaaggtgttgtttcgtgaccaccacatgtctgggtggtcttacaaacgtgtggaaaaatccgatctaaagtatcccctgatccacggccaaggaaggcaggctcggctcctgggcaccctcgccgtttcacggggactgggcgatcatcaattaagagttctcgataccaatatacagctgaaacctttcctgctgagcgtgccccaggtgacagtccttgacgtagatcagcttgagctccaggaggatgatgtggtggttatggcgaccgacggtctttgggatgtgctttctaatgagcaggtggcgtggctcgtccggagcttcctcccaggcaatcaggaggatccacatcggttttcaaaactagcgcagatgctaattcacagcactcagggcaaagaggatagccttaccgaggagggtcaggtgtcttacgatgacgtgtctgttttcgtcatcccattacatagtcagggccaagagagctcggaccactag

SEQ ID NO: 43793 - DNA, 744 bp, Artificial Sequence
  derived and/or modified sequence
atgggcggctgcacagccctggtggccgtgtccctgcagggcaagctgtacatggccaatgctggggacagccgggccatcctggtgagaagagatgagatccggcccctgagctttgagttcaccccagagacagagcggcagaggatccagcagctggcctttgtgtacccagagctgctggccggggagttcacccggctggagttcccccggcggctgaagggagatgacctgggccagaaggtgctcttccgggaccaccacatgagcggctggagctacaagagggtggagaagagtgacctgaagtaccccctcatccacggccagggccggcaggcccggctgctgggcaccctggccgtgtcccggggcctgggggaccaccagctgcgggtgctggacaccaacatccagctgaagcccttcctgctgtctgtgccccaggtgacagtgctggatgtggaccagctggagctgcaggaggatgatgtggtggtgatggccacagatggcctgtgggatgtgctgagcaatgagcaggtggcctggctggtgcgctccttcctgcccggcaaccaggaggacccccaccgcttcagcaagctggcccagatgctgatccacagcacccagggcaaggaggacagcctgacagaggagggccaggtgtcctatgatgatgtgtctgtgtttgtgatccccctgcacagccagggccaggagagcagtgaccactag

SEQ ID NO: 43794 - DNA, 744 bp, Artificial Sequence
  derived and/or modified sequence
atgggcggctgcaccgccctggtggccgtgagcctgcagggcaagttgtacatggcaaacgccggcgactcacgagcaatcctggttagacgcgatgaaatcaggccccttagttttgaattcacaccagagacagagcggcagaggatccaacagcttgcatttgtctatcctgagttgctggccggggaatttacccgcctggagtttcctcgcagactgaaaggcgacgatctgggacagaaagtgctcttccgtgatcatcacatgtcgggctggagttataaaagagtggagaagagtgaccttaaatatcctctgattcatgggcaaggacgtcaggcacgtctcctcggaactctagccgtctctagggggctgggggatcatcaattacgcgttctggataccaacatacaactcaagccatttctgttatcggtccctcaggtgaccgtcttggacgtggatcagctggagctgcaggaagacgacgtagtagtgatggccaccgacggcttgtgggacgtcctcagtaacgagcaggttgcctggcttgtgcgctcattcctacctggtaatcaggaggacccacatcgcttcagtaagctggcacaaatgctgattcatagtactcaagggaaagaggattctctcacggaggaagggcaggtctcttacgacgatgtttccgttttcgttatccctctgcactcccagggtcaggaaagcagcgatcactag

SEQ ID NO: 43795 - DNA, 744 bp, Artificial Sequence
  derived and/or modified sequence
atggggggttgcaccgccctcgtagccgtcagcctccaggggaagctctacatggccaacgccggagactcccgagcgatcctggtgagaagggacgaaatcaggccactgtcatttgagttcactcccgagaccgagcggcagcgcattcagcaacttgccttcgtatatcctgaattacttgcgggagagtttactcggctggagtttcctcggagactgaaaggtgacgacctgggtcagaaggtcctattccgcgatcaccacatgtccggatggtcctataaaagagtagagaagtctgacctgaaatatccactcatacacggccagggcaggcaggccaggctcctgggaacactggccgtgtctcgagggctcggtgatcatcagctccgcgtgctcgacactaatatccaacttaagccctttttactgagcgtgccccaggtcacagtacttgatgttgaccagctcgagctgcaggaggacgatgttgtagtgatggctactgatggtctgtgggacgtcttgagcaatgaacaggtcgcttggctggttcgtagcttcctgccaggcaatcaagaagacccacaccggttctctaaactggcccaaatgctcatccacagcacccagggcaaagaagatagcctgacagaagagggacaagtctcttacgacgatgtgtctgtcttcgtgatccctcttcattcccagggacaggaaagctcggaccattag

SEQ ID NO: 43796 - DNA, 744 bp, Artificial Sequence
  derived and/or modified sequence
atgggcggctgcaccgccctggtggccgtgagcctgcagggcaagctgtacatggccaacgccggcgacagcagagccatcctggtgagaagagacgagatcagacccctgagcttcgagttcacccccgagaccgagagacagagaatccagcagctggccttcgtgtaccccgagctgctggccggcgagttcaccagactggagttccccagaagactgaagggcgacgacctgggccagaaggtgctgttcagagaccaccacatgagcggctggagctacaagagagtggagaagagcgacctgaagtaccccctgatccacggccagggcagacaggccagactgctgggcaccctggccgtgagcagaggcctgggcgaccaccagctgagagtgctggacaccaacatccagctgaagcccttcctgctgagcgtgccccaggtgaccgtgctggacgtggaccagctggagctgcaggaggacgacgtggtggtgatggccaccgacggcctgtgggacgtgctgagcaacgagcaggtggcctggctggtgagaagcttcctgcccggcaaccaggaggacccccacagattcagcaagctggcccagatgctgatccacagcacccagggcaaggaggacagcctgaccgaggagggccaggtgagctacgacgacgtgagcgtgttcgtgatccccctgcacagccagggccaggagagcagcgaccactag

SEQ ID NO: 43797 - protein, 169 aa, Artificial Sequence
  derived and/or modified sequence
MARGAALALLLFGLLGVLVAAPDGGFDLSDALPGDDFDLGDAVVDGENDDPRPPNPPKPMPNPNPNHPSSSGSFSDADLADGVSGGEGKGGSDGGGSHRKEGEEADAPGVIPGIVGAVVVAVAGAISSFIAYQKKKLCFKENAEQGEVDMESHRNANAEPAVQRTLLEK

SEQ ID NO: 43798 - DNA, 510 bp, Artificial Sequence
  derived and/or modified sequence
atggctcgcggggctgctttagcccttctgttatttggcctgctcggcgtcctggtcgctgcccccgatggcggcttcgatttgtctgacgctttgccgggcgacgacttcgatctgggggacgccgtcgtggatggcgagaacgatgatccacgcccacccaatcctcccaaacctatgccgaaccccaacccaaaccacccatcctcctccgggtctttctctgacgcagacttagccgacggcgtttcaggcggggaaggtaaagggggctcggacggtggcggttcacatcgtaaagagggagaagaggcagacgccccaggcgttattcctggaatcgtgggtgccgtcgtcgtggcagttgcaggtgccataagctctttcatcgcctatcagaagaaaaaactgtgcttcaaggaaaatgcagaacaaggcgaggtagacatggaatcacatcgaaacgccaatgcggagccagctgtacagagaacactacttgagaagtag

SEQ ID NO: 43799 - DNA, 510 bp, Artificial Sequence
  derived and/or modified sequence
atggcccggggagctgccctggccctgctgctgtttggcctgctgggcgtgctggtggccgccccagatggcggctttgacctgagtgatgccctgcctggagatgactttgacctgggagatgctgtggtggatggagaaaatgatgaccccaggcctcccaacccccccaagcccatgcccaaccccaaccccaaccaccccagcagcagcggcagcttcagtgatgctgacctggctgatggagtgtctggaggagagggcaaaggaggcagtgatggcggcggcagccacaggaaggagggggaggaggctgatgcccctggggtcatccctggcatcgtgggcgctgtggtggtggccgtggccggggccatcagcagcttcatcgcctaccagaagaagaagctgtgcttcaaggaaaatgctgagcagggcgaggtggacatggagagccacagaaatgccaatgctgagcctgctgtgcagaggaccctgctggagaagtag

SEQ ID NO: 43800 - DNA, 510 bp, Artificial Sequence
  derived and/or modified sequence
atggcccggggcgccgccctggccctgctgctgttcggcctgctgggagtgctagttgccgcgccagacgggggatttgatctttctgacgcacttcccggggatgactttgatctcggcgatgccgtggtcgacggggagaacgacgatccacggccgccgaatcctcctaagcccatgcccaaccccaatccaaatcacccctctagtagcggatccttctccgacgccgacctcgctgatggagtgtcaggaggtgaaggcaaaggtggttctgacggcggtggtagtcatagaaaggagggggaggaggcagacgcacccggtgtgatccccggcatcgtaggcgccgtcgtggtcgccgtcgcaggcgccatctcttcttttatagcctaccagaaaaagaagttgtgtttcaaagaaaatgcagagcagggcgaggtcgacatggaaagccacaggaacgcaaatgcggaacccgccgtgcaaaggactctcctcgagaagtag

SEQ ID NO: 43801 - DNA, 510 bp, Artificial Sequence
  derived and/or modified sequence
atggctagaggagccgctttagccttgttattgttcggactgctgggcgtccttgtcgccgctcccgacggtggttttgacctctccgacgccctgcccggagatgatttcgatcttggcgacgcggtagtggatggggagaatgatgatccacgccctccaaatcccccaaagcccatgcccaatccaaaccctaaccatccatcttcctcgggatctttttctgacgccgacctggcagatggagtgtctgggggagagggaaagggaggtagtgacggtggtggctcacatcggaaggagggcgaggaggccgatgcgccaggggtgatccccggaatcgtaggcgcagtggtggtggctgtggctggggcaattagttcattcattgcctaccagaagaagaagctgtgtttcaaggagaatgccgaacaaggcgaagttgatatggaatcccatagaaacgccaatgccgaacctgccgtacaacgcacactgctggaaaagtag

SEQ ID NO: 43802 - DNA, 892 bp, Artificial Sequence
  derived and/or modified sequence
acccggcccgtgggggagtatctgtcctgccgccttcgcccacgccctgcactccgggaccgtccctgcgcgctctgggcgcaccatggcccgcggggctgcgctggcgctgctgctcttcggcctgctgggtgttctggtcgccgccccggatggtggtttcgatttatccgatgcccttcctggggatgactttgacttaggagatgctgttgttgatggagaaaatgacgacccacgaccaccgaacccacccaaaccgatgccaaatccaaaccccaaccaccctagttcctccggtagcttttcagatgctgaccttgcggatggcgtttcaggtggagaaggaaaaggaggcagtgatggtggaggcagccacaggaaagaaggggaagaggccgacgccccaggcgtgatccccgggattgtgggggctgtcgtggtcgccgtggctggagccatctctagcttcattgcttaccagaaaaagaagctatgcttcaaagaaaatgcagaacaaggggaggtggacatggagagccaccggaatgccaacgcagagccagctgttcagcgtactcttttagagaaatagaagattgtcggcagaaacagcccaggcgttggcagcagggttagaacagctgcctgaggctcctccctgaaggacacctgcctgagagcagagatggaggccttctgttcacggcggattctttgttttaatcttgcgatgtgctttgcttgttgctgggcggatgatgtttactaacgatgaattttacatccaaagggggataggcacttggacccccattctccaaggcccgggggggcggtttcccatgggatgtgaaaggctggccattattaagtccctgtaactcaaatg

SEQ ID NO: 43803 - DNA, 510 bp, Artificial Sequence
  derived and/or modified sequence
atggccagaggcgccgccctggccctgctgctgttcggcctgctgggcgtgctggtggccgcccccgacggcggcttcgacctgagcgacgccctgcccggcgacgacttcgacctgggcgacgccgtggtggacggcgagaacgacgaccccagaccccccaacccccccaagcccatgcccaaccccaaccccaaccaccccagcagcagcggcagcttcagcgacgccgacctggccgacggcgtgagcggcggcgagggcaagggcggcagcgacggcggcggcagccacagaaaggagggcgaggaggccgacgcccccggcgtgatccccggcatcgtgggcgccgtggtggtggccgtggccggcgccatcagcagcttcatcgcctaccagaagaagaagctgtgcttcaaggagaacgccgagcagggcgaggtggacatggagagccacagaaacgccaacgccgagcccgccgtgcagagaaccctgctggagaagtag

SEQ ID NO: 43804 - protein, 338 aa, Artificial Sequence
  derived and/or modified sequence
MASSGYVLQAELSPSTENSSQLDFEDVWNSSYGVNDSFPDGDYGANLEAAAPCHSCNLLDDSALPFFILTSVLGILASSTVLFMLFRPLFRWQLCPGWPVLAQLAVGSALFSIVVPVLAPGLGSTRSSALCSLGYCVWYGSAFAQALLLGCHASLGHRLGAGQVPGLTLGLTVGIWGVAALLTLPVTLASGASGGLCTLIYSTELKALQATHTVACLAIFVLLPLGLFGAKGLKKALGMGPGPWMNILWAWFIFWWPHGVVLGLDFLVRSKLLLLSTCLAQQALDLLLNLAEALAILHCVATPLLLALFCHQATRTLLPSLPLPEGWSSHLDTLGSKS

SEQ ID NO: 43805 - protein, 155 aa, Artificial Sequence
  derived and/or modified sequence
MASSGYVLQAELSPSTENSSQLDFEDVWNSSYGVNDSFPDGDYGANLEAAAPCHSCNLLDDSALPFFILTSVLGILASSTVLFMLFRPLFRWQLCPGWPVLAQLAVGSALFSIVVPVLAPGLGSTRSSALCSLGYCVWYGSAFAQALLLGCHASL

SEQ ID NO: 43806 - DNA, 1017 bp, Artificial Sequence
  derived and/or modified sequence
atggcctcctctgggtacgtactacaagcagagctatctccaagcacagagaattcctctcaactcgattttgaagacgtttggaacagtagctatggggtgaatgacagcttccctgatggggattatggcgccaacctggaagccgcggccccctgccattcctgtaatttactcgacgattctgcgctacctttcttcatcctgacttccgtgctggggatccttgcaagttcaactgtgctgttcatgctttttagaccactgtttcgatggcagctttgtccaggatggcccgtcctcgcccagctggccgttgggagcgccctattctccatcgttgtgcctgtgctggctcctgggctagggtccacgaggagtagcgcactctgtagtttgggctattgcgtctggtacggtagcgcatttgcccaggcattgctgttggggtgtcatgcctctctcggccaccggctgggggccggacaggtacctggcctcaccctggggctgaccgtagggatttggggagttgccgccttactcacccttccggtgacacttgcttcaggcgcgagtgggggactctgcacgctgatatattctacagaattaaaggcacttcaggctactcataccgtggcttgtctggcaattttcgtgctccttcctctcgggctcttcggggccaagggcttaaaaaaggcactgggcatgggaccgggaccctggatgaacattttgtgggcgtggtttattttctggtggcctcacggcgttgtgttgggtttggatttcctggttagaagcaagctgctactgctgtctacctgtctggcccagcaggccttagatttgctgctgaatctcgctgaggctctggcgattctgcactgcgtagcaaccccgttactgctggcacttttttgccatcaggcaacccgcacgctgctcccctcgctgccgctaccagaaggctggtccagtcacttagatactctcgggagtaagtcttag

SEQ ID NO: 43807 - DNA, 468 bp, Artificial Sequence
  derived and/or modified sequence
atggcctcttccgggtatgttttgcaggctgaactgtccccttcgacggagaatagttcccagctagactttgaggacgtgtggaattcatcctacggagttaatgacagcttcccagatggggattatggcgccaatctggaggctgccgccccttgtcatagctgtaatctgctggacgatagcgctttgccattcttcatcttgacatcagtcctgggcatcctcgcatccagcacagtgctctttatgctgtttaggccactttttagatggcaattatgcccaggttggccagtgttggctcagttagccgtcgggtcagctctttttagcatcgtggtgccagtcctggcacctgggctgggctctacacggtccagtgcactgtgtagcctgggatactgcgtgtggtatggatccgcttttgctcaggcactgctgctggggtgtcacgcaagcttatag

SEQ ID NO: 43808 - DNA, 1017 bp, Artificial Sequence
  derived and/or modified sequence
atggccagcagcggctacgtgctgcaggccgagctgagccccagcacagagaacagcagccagctggactttgaagatgtgtggaacagcagctatggagtgaatgacagcttcccagatggagactatggagccaacctggaggccgccgccccctgccacagctgcaacctgctggatgacagcgccctgcccttcttcatcctgacctctgtgctgggcatcctggccagcagcacagtgctcttcatgctgttccggcccctcttccgctggcagctgtgccccggctggcctgtgctggcccagctggccgtgggcagcgccctcttcagcatcgtggtgcctgtgctggcccctggcctgggcagcaccaggagcagcgccctgtgcagcctgggctactgtgtgtggtacggcagcgcctttgcccaggccctgctgctgggctgccacgccagcctgggccaccggctgggcgccggccaggtgcccggcctgaccctgggcctgactgtgggcatctggggcgtggccgccctgctgaccctgcctgtgaccctggccagcggggccagcggcggcctgtgcaccctcatctacagcacagagctgaaggccctgcaggccacccacacagtggcctgcctggccatctttgtgctgctgcccctgggcctgtttggagccaagggcctgaagaaggccctgggcatgggccctggcccctggatgaacatcctgtgggcctggttcatcttctggtggccccacggcgtggtgctgggcctggacttcctggtgcgcagcaagctgctgctgctgagcacctgcctggcccagcaggccctggacctgctgctgaacctggccgaggccctggccatcctgcactgtgtggccacccccctgctgctggccctcttctgccaccaggccaccaggaccctgctgcccagcctgcccctgcctgagggctggagcagccacctggacaccctgggcagcaagagctag

SEQ ID NO: 43809 - DNA, 468 bp, Artificial Sequence
  derived and/or modified sequence
atggccagcagcggctacgtgctgcaggccgagctgagccccagcacagagaacagcagccagctggactttgaagatgtgtggaacagcagctatggagtgaatgacagcttcccagatggagactatggagccaacctggaggccgccgccccctgccacagctgcaacctgctggatgacagcgccctgcccttcttcatcctgacctctgtgctgggcatcctggccagcagcacagtgctcttcatgctgttccggcccctcttccgctggcagctgtgccccggctggcctgtgctggcccagctggccgtgggcagcgccctcttcagcatcgtggtgcctgtgctggcccctggcctgggcagcaccaggagcagcgccctgtgcagcctgggctactgtgtgtggtacggcagcgcctttgcccaggccctgctgctgggctgccacgccagcctgtag

SEQ ID NO: 43810 - DNA, 1017 bp, Artificial Sequence
  derived and/or modified sequence
atggccagcagcggctacgtgctgcaggccgagctgagccccagcacagagaatagttcacagctggattttgaggacgtgtggaatagtagttatggagttaacgattctttccctgatggggactacggtgcgaatctggaggctgccgcaccatgtcacagttgtaatctgttagacgactctgccctgccattctttattctcacatccgtattagggatcttggctagctccacagttctgttcatgcttttcagacccctgtttcggtggcagctatgtcccggatggcccgttctcgcgcagttggcagtggggtccgccttgttcagcatcgtagtgcccgtgttggcacctgggctgggctctacaagatccagcgcactttgttctctgggctattgtgtgtggtacggttcagcctttgcacaggccctgctgctggggtgtcacgcatcattgggccacaggctaggtgctggtcaagttcccggcctcaccctagggctgaccgttggcatttggggagtggctgcccttctgaccttgcccgttacgctggctagcggagcaagtgggggcttgtgcacactgatttacagcacagaactcaaggcactccaggctacgcataccgtggcatgcctcgcaattttcgtcttgctccctttaggtctctttggggcgaaggggctcaaaaaagcgctcgggatgggccccggcccctggatgaatattctctgggcttggtttatcttctggtggcctcatggcgtcgtactgggactagattttcttgtcaggtccaagctgcttttgctgagcacttgtctggcccagcaggcactggatcttttgcttaaccttgcagaggcactggctattctgcactgtgttgctactcccctactgctggcgctcttctgccaccaggccactaggacccttctcccttcattacctctccccgagggttggtcatcccatctagataccctgggatccaaatcatag

SEQ ID NO: 43811 - DNA, 468 bp, Artificial Sequence
  derived and/or modified sequence
atggccagcagcggctacgtgctgcaggccgagctgagccccagcacagaaaactccagccagctggactttgaggacgtgtggaacagctcatatggagtcaatgactcctttcccgacggcgactacggagccaacctggaagccgccgctccatgccactcctgcaacttactcgatgattccgcactgccattttttatcctaactagcgtgttgggcatactggccagtagtacagtattgttcatgctattccgtccactgttcaggtggcagctgtgccccggttggccagtcctggcgcagcttgccgtggggtccgctctgttctctatagtcgtccccgtgctggctcctggactcggctcgaccaggtccagcgctctctgctcattaggctattgtgtgtggtatgggtcagccttcgcgcaggcgttgctacttggttgtcatgcaagcctctag

SEQ ID NO: 43812 - DNA, 1017 bp, Artificial Sequence
  derived and/or modified sequence
atggcctcctcaggctacgttctgcaggctgagctcagccctagcacagagaactcatctcagttggatttcgaggatgtgtggaattcttcgtacggtgtgaacgacagcttccccgatggtgactatggagctaatctggaggcagctgccccttgtcatagctgtaatctcttggatgactctgccttaccatttttcatcttgacatcagtgttgggcatactggctagcagcacagttcttttcatgctgtttagaccgttgtttcggtggcaactctgcccaggatggcccgtacttgcccagcttgccgtaggctcagccctgttcagcattgttgtgccagtcttagcacctgggctgggctcaacacgttcttccgcgctttgttccctgggctattgcgtttggtacggcagcgcctttgcacaggccttgttactgggctgtcacgcctccctgggacaccgtctgggcgcaggacaagttcctggcttaacactcgggctgacagtaggcatttggggagttgcagctcttctgacactgcctgtaacattggcctctggagcctcaggcggactgtgtacccttatttattcgacggagctgaaggcccttcaggccactcacaccgttgcttgccttgccatatttgtactgcttcccttgggccttttcggcgctaagggactgaaaaaggctcttgggatgggacccggaccgtggatgaatatactctgggcttggtttattttttggtggcctcacggcgtggtcttgggcctggattttctcgtgagatcaaaattgctactgctatctacatgcctggcccagcaagctctggacctgttgctcaacctcgccgaagcattagccattttgcactgtgtggccacccctttgctcctggctctgttttgccaccaggctacccgaacgctgcttccatctcttccgctgccagagggatggagctctcatctcgatacactcggttccaaatcatag

SEQ ID NO: 43813 - DNA, 468 bp, Artificial Sequence
  derived and/or modified sequence
atggcctcctcaggctatgtcttgcaggccgaactgtctccatcaaccgagaatagctctcagctggattttgaggacgtgtggaacagttcatatggtgtcaatgatagcttcccagacggggactacggcgcaaacctggaagccgcagcgccttgtcactcctgtaatcttcttgacgattcagcactgccattctttatcctgacgtctgtgcttggtatactggcttccagcaccgttttgttcatgctctttcgccctctgtttcggtggcagctgtgtccgggttggccagtcctcgcacagctggcagtgggatcagccctgttttcaatcgtggtgcctgtgctagctcctgggctgggttcaacacggtcttcagcactttgctccctcggctactgtgtttggtacggttcagctttcgctcaagcgctgctgcttggctgtcacgctagcctatag

SEQ ID NO: 43814 - DNA, 1017 bp, Artificial Sequence
  derived and/or modified sequence
atggccagcagcggctacgtgctgcaggccgagctgagccccagcaccgagaacagcagccagctggacttcgaggacgtgtggaacagcagctacggcgtgaacgacagcttccccgacggcgactacggcgccaacctggaggccgccgccccctgccacagctgcaacctgctggacgacagcgccctgcccttcttcatcctgaccagcgtgctgggcatcctggccagcagcaccgtgctgttcatgctgttcagacccctgttcagatggcagctgtgccccggctggcccgtgctggcccagctggccgtgggcagcgccctgttcagcatcgtggtgcccgtgctggcccccggcctgggcagcaccagaagcagcgccctgtgcagcctgggctactgcgtgtggtacggcagcgccttcgcccaggccctgctgctgggctgccacgccagcctgggccacagactgggcgccggccaggtgcccggcctgaccctgggcctgaccgtgggcatctggggcgtggccgccctgctgaccctgcccgtgaccctggccagcggcgccagcggcggcctgtgcaccctgatctacagcaccgagctgaaggccctgcaggccacccacaccgtggcctgcctggccatcttcgtgctgctgcccctgggcctgttcggcgccaagggcctgaagaaggccctgggcatgggccccggcccctggatgaacatcctgtgggcctggttcatcttctggtggccccacggcgtggtgctgggcctggacttcctggtgagaagcaagctgctgctgctgagcacctgcctggcccagcaggccctggacctgctgctgaacctggccgaggccctggccatcctgcactgcgtggccacccccctgctgctggccctgttctgccaccaggccaccagaaccctgctgcccagcctgcccctgcccgagggctggagcagccacctggacaccctgggcagcaagagctag

SEQ ID NO: 43815 - DNA, 468 bp, Artificial Sequence
  derived and/or modified sequence
atggccagcagcggctacgtgctgcaggccgagctgagccccagcaccgagaacagcagccagctggacttcgaggacgtgtggaacagcagctacggcgtgaacgacagcttccccgacggcgactacggcgccaacctggaggccgccgccccctgccacagctgcaacctgctggacgacagcgccctgcccttcttcatcctgaccagcgtgctgggcatcctggccagcagcaccgtgctgttcatgctgttcagacccctgttcagatggcagctgtgccccggctggcccgtgctggcccagctggccgtgggcagcgccctgttcagcatcgtggtgcccgtgctggcccccggcctgggcagcaccagaagcagcgccctgtgcagcctgggctactgcgtgtggtacggcagcgccttcgcccaggccctgctgctgggctgccacgccagcctgtag

SEQ ID NO: 43816 - DNA, 1088 bp, Artificial Sequence
  derived and/or modified sequence
gagactcttccggtgtaactctgatggcctcctctgggtatgtcctccaggcggagctctccccctcaactgagaactcaagtcagctggacttcgaagatgtatggaattcttcctatggtgtgaatgattccttcccagatggagactatggtgccaacctggaagcagctgccccctgccactcctgtaacctgctggatgactctgcactgcccttcttcatcctcaccagtgtcctgggtatcctagctagcagcactgtcctcttcatgcttttcagacctctcttccgctggcagctctgccctggctggcctgtcctggcacagctggctgtgggcagtgccctcttcagcattgtggtgcccgtcttggccccagggctaggtagcactcgcagctctgccctgtgtagcctgggctactgtgtctggtatggctcagcctttgcccaggctttgctgctagggtgccatgcctccctgggccacagactgggtgcaggccaggtcccaggcctcaccctggggctcactgtgggaatttggggagtggctgccctactgacactgcctgtcaccctggccagtggtgcttctggtggactctgcaccctgatatacagcacggagctgaaggctttgcaggccacacacactgtagcctgtcttgccatctttgtcttgttgccattgggtttgtttggagccaaggggctgaagaaggcattgggtatggggccaggcccctggatgaatatcctgtgggcctggtttattttctggtggcctcatggggtggttctaggactggatttcctggtgaggtccaagctgttgctgttgtcaacatgtctggcccagcaggctctggacctgctgctgaacctggcagaagccctggcaattttgcactgtgtggctacgcccctgctcctcgccctattctgccaccaggccacccgcaccctcttgccctctctgcccctccctgaaggatggtcttctcatctggacacccttggaagcaaatcctagttctcttcccacctgtcaacctgaattaaagtctacactgcctttgtg

SEQ ID NO: 43817 - DNA, 550 bp, Artificial Sequence
  derived and/or modified sequence
gtcccagcccttctgtctgcgggcctgaaccaaacggtgccatggggaactgtctgcacagggagactcttccggtgtaactctgatggcctcctctgggtatgtcctccaggcggagctctccccctcaactgagaactcaagtcagctggacttcgaagatgtatggaattcttcctatggtgtgaatgattccttcccagatggagactatggtgccaacctggaagcagctgccccctgccactcctgtaacctgctggatgactctgcactgcccttcttcatcctcaccagtgtcctgggtatcctagctagcagcactgtcctcttcatgcttttcagacctctcttccgctggcagctctgccctggctggcctgtcctggcacagctggctgtgggcagtgccctcttcagcattgtggtgcccgtcttggccccagggctaggtagcactcgcagctctgccctgtgtagcctgggctactgtgtctggtatggctcagcctttgcccaggctttgctgctagggtgccatgcctccctg

SEQ ID NO: 43818 - protein, 462 aa, Artificial Sequence
  derived and/or modified sequence
MSTEKVDQKEEAGEKEVCGDQIKGPDKEEEPPAAASHGQGWRPGGRAARNARPEPGARHPALPAMVNDPPVPALLWAQEVGQVLAGRARRLLLQFGVLFCTILLLLWVSVFLYGSFYYSYMPTVSHLSPVHFYYRTDCDSSTTSLCSFPVANVSLTKGGRDRVLMYGQPYRVTLELELPESPVNQDLGMFLVTISCYTRGGRIISTSSRSVMLHYRSDLLQMLDTLVFSSLLLFGFAEQKQLLEVELYADYRENSYVPTTGAIIEIHSKRIQLYGAYLRIHAHFTGLRYLLYNFPMTCAFIGVASNFTFLSVIVLFSYMQWVWGGIWPRHRFSLQVNIRKRDNSRKEVQRRISAHQPGPEGQEESTPQSDVTEDGESPEDPSGTEGQLSEEEKPDQQPLSGEEELEPEASDGSGSWEDAALLTEANLPAPAPASASAPVLETLGSSEPAGGALRQRPTCSSS

SEQ ID NO: 43819 - protein, 398 aa, Artificial Sequence
  derived and/or modified sequence
MVNDPPVPALLWAQEVGQVLAGRARRLLLQFGVLFCTILLLLWVSVFLYGSFYYSYMPTVSHLSPVHFYYRTDCDSSTTSLCSFPVANVSLTKGGRDRVLMYGQPYRVTLELELPESPVNQDLGMFLVTISCYTRGGRIISTSSRSVMLHYRSDLLQMLDTLVFSSLLLFGFAEQKQLLEVELYADYRENSYVPTTGAIIEIHSKRIQLYGAYLRIHAHFTGLRYLLYNFPMTCAFIGVASNFTFLSVIVLFSYMQWVWGGIWPRHRFSLQVNIRKRDNSRKEVQRRISAHQPGPEGQEESTPQSDVTEDGESPEDPSGTEGQLSEEEKPDQQPLSGEEELEPEASDGSGSWEDAALLTEANLPAPAPASASAPVLETLGSSEPAGGALRQRPTCSSS

SEQ ID NO: 43820 - protein, 223 aa, Artificial Sequence
  derived and/or modified sequence
MVNDPPVPALLWAQEVGQVLAGRARRLLLQFGVLFCTILLLLWVSVFLYGSFYYSYMPTVSHLSPVHFYYRTDCDSSTTSLCSFPVANVSLTKGGRDRVLMYGQPYRVTLELELPESPVNQDLGMFLVTISCYTRGGRIISTSSRSVMLHYRSDLLQMLDTLVFSSLLLFGFAEQKQLLEVELYADYRENSYVPTTGAIIEIHSKRIQLYGAYLRIHAHFTGL

SEQ ID NO: 43821 - protein, 93 aa, Artificial Sequence
  derived and/or modified sequence
MSTEKVDQKEEAGEKEVCGDQIKGPDKEEEPPAAASHGQGWRPGGRAARNARPEPGARHPALPAMVNDPPVPALLWAQEVGQVLAGRARRLLL

SEQ ID NO: 43822 - protein, 226 aa, Artificial Sequence
  derived and/or modified sequence
MSTEKVDQKEEAGEKEVCGDQIKGPDKEEEPPAAASHGQGWRPGGRAARNARPEPGARHPALPAMVNDPPVPALLWAQEVGQVLAGRARRLLLQFGVLFCTILLLLWVSVFLYGSFYYSYMPTVSHLSPVHFYYRTDCDSSTTSLCSFPVANVSLTKGGRDRVLMYGQPYRVTLELELPESPVNQDLGMFLVTISCYTRGGRIISTSSRSVMLHYRSDLLQMLDTL

SEQ ID NO: 43823 - protein, 23 aa, Artificial Sequence
  derived and/or modified sequence
MSTEKVDQKEEAGEKEVCGDQIK

SEQ ID NO: 43824 - protein, 28 aa, Artificial Sequence
  derived and/or modified sequence
MSTEKVDQKEEAGEKEVCGDQIKGPDKE

SEQ ID NO: 43825 - protein, 123 aa, Artificial Sequence
  derived and/or modified sequence
MSTEKVDQKEEAGEKEVCGDQIKGPDKEEEPPAAASHGQGWRPGGRAARNARPEPGARHPALPAMVNDPPVPALLWAQEVGQVLAGRARRLLLQFGVLFCTILLLLWVSVFLYGSFYYSYMPT

SEQ ID NO: 43826 - DNA, 1389 bp, Artificial Sequence
  derived and/or modified sequence
atgagcacggaaaaggtcgaccagaaagaggaggcgggggaaaaggaggtgtgcggggatcagataaagggtcccgataaagaagaggaaccccctgctgccgcctcgcatgggcagggttggagaccaggagggcgtgcagcacgaaacgccaggccggagccaggtgcccgccacccggctctgccagcgatggtaaatgaccccccagtgcccgcgctgctgtgggctcaggaagtgggtcaggtcctcgccggtagagctaggcggcttctgttgcagtttggggtgctgttttgtaccatcctgctgcttctgtgggtgtcagtgttcctttacggctccttttactatagttatatgcctactgtatcccacctgagtccagtacacttctattaccgcactgactgtgactcttccactacaagtctgtgctcattccctgtggctaacgtgtccctcacaaaggggggcagagatcgagtgctgatgtatggacagccatatcgcgtgaccctggaactggaattacctgaaagccccgtcaatcaggacctggggatgtttttggtgacaattagctgttataccaggggtggaaggatcatttccacttccagtaggagtgtcatgttgcactatcgtagcgacctgctccaaatgctggacactctagtgtttagttcattactgttatttggttttgctgagcagaagcagctcttggaagtcgagctgtacgcggactacagagagaattcttacgtgccaactacaggcgcaatcattgagatacatagcaagaggattcagctgtacggcgcgtatctgcgcatccacgctcacttcaccggccttagatacctcctgtacaattttccaatgacttgcgccttcatcggagtggcctccaactttacgtttttgtcagtgatcgtgctcttctcttacatgcaatgggtgtggggaggaatttggcctcggcataggttctcgttgcaagtgaacatcaggaagcgggacaactcaaggaaagaagtacaacggagaatttctgcgcaccagcccggtcctgagggtcaggaggaatccactccccagagcgacgttactgaagacggggaatcccccgaagacccaagcggcaccgaaggacagctgtctgaagaagaaaagcccgatcagcaacctctgagcggagaggaggagcttgaacctgaggcgtccgatggcagtggctcctgggaggacgctgcccttctcaccgaagcaaacctgcccgccccggccccagcttcggccagcgcaccagttctggagaccttgggaagttccgagccagctgggggagctctcaggcagcgccctacctgctctagctcctag

SEQ ID NO: 43827 - DNA, 1389 bp, Artificial Sequence
  derived and/or modified sequence
atgagcactgagaaggtcgaccagaaggaagaggctggcgaaaaggaggtctgcggggaccagatcaaaggaccggataaagaggaggaaccacctgccgctgctagccatggacagggctggagaccagggggtagagccgctcggaacgctagaccagaacctggtgccagacacccagcccttcctgcaatggttaatgaccccccggtgcccgccctgctttgggcccaagaggtgggccaggttctcgccggtagagcccggcgactgttgttgcagttcggagtgctgttctgcacgatcctactgctgctatgggtgagtgtttttctgtatggtagcttttactatagttacatgccgacagtctcgcacctgagtcccgtgcacttctactataggaccgactgtgacagcagcaccacatctctgtgttcttttcccgtggcaaacgtgtccctcactaagggagggagagacagagtgctgatgtatggccagccatacagagttacacttgaactggaacttcctgagtccccggtgaatcaggacctgggtatgtttttggtgactatctcatgctatacccgcgggggccgaattatatctacaagttctcgctcagtgatgctccattacaggtccgatctgcttcaaatgctcgacaccctggttttcagttctctcctgctttttgggttcgctgagcagaaacagctccttgaagtggagctgtacgcggattaccgagaaaattcatacgtgccaaccactggcgccatcatcgaaatccacagtaagcgaatccagctgtatggggcttatctgagaattcatgcacatttcacagggcttcgttatctcctgtacaatttcccaatgacatgcgccttcatcggcgtcgctagtaatttcacatttctctcggtgattgtgctgtttagctacatgcagtgggtgtggggaggaatttggcccagacacaggttcagcctccaggtcaatattcggaagagggataatagccgcaaagaagtgcagcgcaggatcagcgcgcaccagcccggacccgagggccaggaagagtcaacacctcagagcgatgtaactgaagacggagagagtcctgaagacccaagcgggacagaaggtcagctctctgaggaagagaagccagatcagcagccactgagcggcgaggaggagctcgaacccgaagctagcgacggcagcggttcttgggaggatgcagcactgttaactgaggctaacctgcctgccccggcccccgccagtgcatcagcccccgtgttggagaccctcgggagttccgagccagcgggtggcgcactgcggcagagacctacttgctcctccagttag

SEQ ID NO: 43828 - DNA, 282 bp, Artificial Sequence
  derived and/or modified sequence
atgtccacagaaaaggtagatcagaaggaagaggctggggaaaaagaagtgtgcggtgatcagattaaaggccctgacaaggaagaagagccacctgctgctgcgtcacacggccagggatggcgcccgggcggaagagcggcgcgcaatgccagaccagagcccggtgctcggcatcccgccttgcctgccatggtcaacgacccccctgttccggccctgttatgggcgcaggaggttggacaggtactggcaggtagggctaggaggctgctgttatag

SEQ ID NO: 43829 - DNA, 681 bp, Artificial Sequence
  derived and/or modified sequence
atgtcaacagagaaggtggaccagaaagaggaagccggggagaaggaggtctgtggcgaccagatcaaggggccagataaagaggaagagccgccagcggctgcatcacatggacagggctggcgtcccggtggtcgcgctgcgaggaatgcgagacctgaacccggagcacgtcaccccgctctgcctgcaatggtcaatgatccacctgtgcccgctctgctttgggcgcaggaggtcggccaggtgctggctgggagggctagacgcctgcttttgcagtttggcgtactgttttgtacaatcctgctattgctgtgggtatcagtgtttctctatggttcattttattactcatatatgcccaccgtgtctcacctgagtcccgtgcacttctattatcggacggactgtgattctagcacaacgagtctctgttcatttcctgtagccaacgtctcactaactaaaggagggcgcgatagggtgcttatgtacggtcagccatatagagtgacattggaacttgaactcccagagagtccggtgaatcaggatctcggcatgtttctggtcaccatatcatgctacaccagaggggggaggattatttctaccagctcaagaagcgtaatgctacattataggtcagatctgctccagatgctagatacactatag

SEQ ID NO: 43830 - DNA, 72 bp, Artificial Sequence
  derived and/or modified sequence
atgtcaacagagaaggtcgatcagaaggaggaggccggtgagaaggaggtctgtggggaccagattaaatag

SEQ ID NO: 43831 - DNA, 87 bp, Artificial Sequence
  derived and/or modified sequence
atgtcgacagagaaagtagatcagaaagaggaagccggcgaaaaagaagtctgtggggatcagatcaaaggcccggacaaagaatag

SEQ ID NO: 43832 - DNA, 372 bp, Artificial Sequence
  derived and/or modified sequence
atgtcaaccgagaaagtggaccagaaagaggaggccggcgagaaggaagtgtgcggagaccagatcaaaggccctgataaagaagaggaaccccctgcagctgcctctcacggccaagggtggcgtcccggcgggcgcgccgctagaaatgcccggccagaacctggtgcccggcacccggccctgcccgccatggtaaatgaccctcccgtccccgcgctgttatgggcacaggaagtgggccaggtgctcgccggacgggctcgccgcctgttgctccaatttggtgtcctcttttgtacaattctgttgcttctgtgggtcagcgtgttcctatatgggtccttttactatagctacatgcccacgtag

SEQ ID NO: 43833 - DNA, 1389 bp, Artificial Sequence
  derived and/or modified sequence
atgagcacagagaaggtggaccagaaggaggaggccggggagaaggaggtgtgtggggaccagatcaagggccctgacaaggaggaggagcccccagctgctgccagccacggccagggctggaggcctgggggccgggccgccagaaatgcccggcctgagcccggggcccggcacccagccctgcctgccatggtgaatgacccccctgtgcctgccctgctgtgggcccaggaggtgggccaggtgctggccggccgggcccggcggctgctgctgcagtttggagtgctcttctgcaccatcctgctgctgctgtgggtgtctgtgttcctgtatggcagcttctactacagctacatgcccaccgtgagccacctgagccctgtgcacttctactacagaacagactgtgacagcagcaccaccagcctgtgcagcttccctgtggccaacgtgtccctgaccaagggcggccgggacagagtgctgatgtatggccagccctacagagtgaccctggagctggagctgcctgagagccctgtgaaccaggacctgggcatgttcctggtgaccatcagctgctacacccggggcggccgcatcatcagcaccagcagccgctctgtgatgctgcactacagaagtgacctgctgcagatgctggacaccctggtgttcagcagcctgctgctgtttggatttgctgagcagaagcagctgctggaggtggagctgtatgctgactacagagaaaattcctatgtgcccaccaccggggccatcatcgagatccacagcaagaggatccagctgtatggagcctacctgcgcatccacgcccacttcaccggcctgcgctacctgctgtacaacttccccatgacctgtgccttcatcggcgtggccagcaacttcaccttcctgtctgtgattgtgctcttctcctacatgcagtgggtgtggggcggcatctggcccaggcaccgcttcagcctgcaggtgaacatcaggaagagggacaacagcaggaaggaggtgcagaggcgcatcagcgcccaccagcccggccctgagggccaggaggagagcaccccccagagtgatgtgacagaagatggagagagccctgaggaccccagcggcacagagggccagctgtctgaggaggagaagccagaccagcagcccctgagcggggaggaggagctggagcctgaggccagtgatggcagcggctcctgggaggatgctgccctgctgacagaggccaacctgcctgccccagccccagccagcgccagcgcccctgtgctggagaccctgggcagcagcgagcctgctggaggagccctgcggcagaggcccacctgcagcagcagctag

SEQ ID NO: 43834 - DNA, 282 bp, Artificial Sequence
  derived and/or modified sequence
atgagcacagagaaggtggaccagaaggaggaggccggggagaaggaggtgtgtggggaccagatcaagggccctgacaaggaggaggagcccccagctgctgccagccacggccagggctggaggcctgggggccgggccgccagaaatgcccggcctgagcccggggcccggcacccagccctgcctgccatggtgaatgacccccctgtgcctgccctgctgtgggcccaggaggtgggccaggtgctggccggccgggcccggcggctgctgctgtag

SEQ ID NO: 43835 - DNA, 681 bp, Artificial Sequence
  derived and/or modified sequence
atgagcacagagaaggtggaccagaaggaggaggccggggagaaggaggtgtgtggggaccagatcaagggccctgacaaggaggaggagcccccagctgctgccagccacggccagggctggaggcctgggggccgggccgccagaaatgcccggcctgagcccggggcccggcacccagccctgcctgccatggtgaatgacccccctgtgcctgccctgctgtgggcccaggaggtgggccaggtgctggccggccgggcccggcggctgctgctgcagtttggagtgctcttctgcaccatcctgctgctgctgtgggtgtctgtgttcctgtatggcagcttctactacagctacatgcccaccgtgagccacctgagccctgtgcacttctactacagaacagactgtgacagcagcaccaccagcctgtgcagcttccctgtggccaacgtgtccctgaccaagggcggccgggacagagtgctgatgtatggccagccctacagagtgaccctggagctggagctgcctgagagccctgtgaaccaggacctgggcatgttcctggtgaccatcagctgctacacccggggcggccgcatcatcagcaccagcagccgctctgtgatgctgcactacagaagtgacctgctgcagatgctggacaccctgtag

SEQ ID NO: 43836 - DNA, 72 bp, Artificial Sequence
  derived and/or modified sequence
atgagcacagagaaggtggaccagaaggaggaggccggggagaaggaggtgtgtggggaccagatcaagtag

SEQ ID NO: 43837 - DNA, 87 bp, Artificial Sequence
  derived and/or modified sequence
atgagcacagagaaggtggaccagaaggaggaggccggggagaaggaggtgtgtggggaccagatcaagggccctgacaaggagtag

SEQ ID NO: 43838 - DNA, 372 bp, Artificial Sequence
  derived and/or modified sequence
atgagcacagagaaggtggaccagaaggaggaggccggggagaaggaggtgtgtggggaccagatcaagggccctgacaaggaggaggagcccccagctgctgccagccacggccagggctggaggcctgggggccgggccgccagaaatgcccggcctgagcccggggcccggcacccagccctgcctgccatggtgaatgacccccctgtgcctgccctgctgtgggcccaggaggtgggccaggtgctggccggccgggcccggcggctgctgctgcagtttggagtgctcttctgcaccatcctgctgctgctgtgggtgtctgtgttcctgtatggcagcttctactacagctacatgcccacctag

SEQ ID NO: 43839 - DNA, 1389 bp, Artificial Sequence
  derived and/or modified sequence
atgagcaccgagaaggtggaccagaaggaggaggccggcgagaaggaagtctgtggagatcagattaagggacccgacaaagaggaagagcctccagccgccgcctcccacggccagggatggcggcccggcggccgggccgcaagaaacgcccgaccagagcccggggctcgccacccagccctccccgccatggtgaacgaccctcctgttcccgccctgctttgggctcaggaggtcgggcaggttctggcaggaagagccaggcggctgttattacagttcggtgtgctcttttgtaccatcttactcttgttgtgggtttccgtttttctttacggatccttttactattcatatatgcccaccgtatctcacctttctcccgttcatttctactaccgaactgattgtgattctagtacgacgagcttgtgcagttttccggtagcgaacgtaagcttgaccaaaggcgggagggaccgggtactgatgtacggacagccttatcgcgtcacactcgagctcgagctccccgagtcccctgtgaatcaagacctgggaatgtttctagtcaccatttcctgctacacgcgcgggggccgaataattagtacctcatcaaggtcagtcatgctgcactataggtccgacctattgcagatgctggacacacttgtgtttagcagtcttttgctgttcgggtttgccgaacagaaacaactcctggaggtcgagctctacgctgactaccgggaaaacagctacgtccctaccaccggggccataatcgagattcacagcaaacgtatccagctgtatggggcttacctgaggatccatgctcacttcaccggtctgcgttatctgttgtacaacttccctatgacatgcgcctttatcggggtggcaagtaactttacctttttgtctgtgattgtcttgtttagctatatgcagtgggtgtggggtgggatctggcctaggcatcggttctcactccaggtcaacattagaaaacgcgataattcccgaaaagaagtccagagaaggatctccgctcatcagccgggtcccgaaggccaggaagaaagcacccctcagtcagacgtcacagaggacggggaatcaccagaagacccctccggaaccgaggggcagctctccgaagaagagaaacccgaccagcagccgctttctggagaagaagagctcgaaccagaggcctcagacggctccggcagttgggaagacgctgctcttcttacggaagccaaccttcctgcccccgccccagcttccgctagtgcacctgtgctggagactttgggctcttctgaaccagcaggaggggccttgaggcaacgacccacttgctcctcctcctag

SEQ ID NO: 43840 - DNA, 1389 bp, Artificial Sequence
  derived and/or modified sequence
atgagcaccgagaaggtggaccagaaggaggaggccggcgagaaggaggtgtgtggggaccagatcaaaggccctgacaaggaagaagagcctcctgcagccgctagccatgggcaggggtggcgccctggcggcagggcagcaagaaatgcacggccagagccaggggcaagacacccagccctgcccgcaatggttaacgatccaccagtccccgccctgctgtgggctcaggaggttggtcaggttctggccggccgagctcgcaggctgctgctgcaattcggggtgcttttctgcaccatcttactgctgttgtgggtctctgtctttctctatgggtctttctattactcatatatgcccaccgtttcccacctttccccggtgcatttctactaccgtacggactgtgattcctctacaacctctttgtgttcattcccagtagcaaatgtgtccctgacaaagggcggcagagaccgcgttctgatgtacgggcagccttatagggttacgcttgaactagagctcccagaatctcctgtgaaccaggacctagggatgtttctggtcacgatctcttgctacacccgtggtggacgtatcatatccacatccagtcgcagcgttatgctccactataggtccgatctcctccagatgctagatacattggtgttcagttctcttctgctgtttggcttcgccgagcagaagcagctgctggaggtggagctgtacgcggactacagggagaatagctatgtgccgacaactggggcaatcatcgagattcacagcaagcgtatccagctttacggggcgtacctccgcatacacgctcatttcaccggattacggtatctcctgtacaacttccccatgacctgcgcattcatcggggtggcctctaattttacgtttttgagtgtgatcgtgcttttctcctatatgcagtgggtttggggaggcatttggcctaggcataggtttagtctccaggtcaatataagaaagagagataacagccgtaaagaggtccagcgacggatcagtgcacaccagccgggcccagaaggccaagaagagtctactcctcaatctgatgtgactgaggacggcgaaagtccagaggatccctccgggaccgaagggcagctttccgaagaggagaaacccgatcagcagccgctgtcgggcgaggaagagctcgagcccgaagctagcgatggaagcggcagttgggaagacgccgctttactgacagaggccaatttgcccgctcctgcacctgctagtgcaagtgcccccgtccttgaaaccctcgggtcttcagaaccggccggcggagctctgagacaaaggcccacctgctcttcgtcttag

SEQ ID NO: 43841 - DNA, 282 bp, Artificial Sequence
  derived and/or modified sequence
atgagcaccgagaaggtggaccagaaggaggaggccggcgagaaggaggtgtgtggtgaccagataaagggacccgataaggaagaagagcctcccgctgccgccagccatggccaggggtggaggcctggagggcgggcggcgagaaacgcccgccctgagccaggggcgcgtcaccctgctctccctgccatggtgaatgaccctcctgtgcctgcactcctttgggctcaggaagtggggcaggtattggcagggcgcgcgcggagattgctgctatag

SEQ ID NO: 43842 - DNA, 681 bp, Artificial Sequence
  derived and/or modified sequence
atgagcaccgagaaggtggaccagaaggaggaggccggcgagaaggaagtctgtggagatcagatcaagggccccgacaaagaagaggagcccccggcagctgcctcccacggtcagggctggcgccccggcggacgcgcggcgagaaacgctcgtcccgagcccggagcgcgccaccctgccttgcccgcaatggtaaacgacccgccggtccccgccctgctgtgggcccaggaggtgggccaggttttagccggccgggctcgaaggctgctcctgcagtttggcgtgttattttgcacaatactgctgcttttatgggtgagcgttttcctctacgggagcttctattatagctatatgccaaccgtatctcatctctctcccgtgcacttctattacagaacagactgcgactcaagcacaactagcctgtgctcttttcccgtcgccaacgtcagcctgacaaaaggtggtagagaccgagtcctgatgtatggacagccttatcgagtcactctggagctggaactgcccgagagtcccgtgaaccaggatctgggtatgttcttggtgacaatttcatgttacacaagggggggcagaatcattagcacctcctcacggtccgtcatgctgcactaccgctctgacctacttcaaatgctcgatacgctgtag

SEQ ID NO: 43843 - DNA, 72 bp, Artificial Sequence
  derived and/or modified sequence
atgagcaccgagaaggtggaccagaaggaggaggccggcgagaaggaggtatgcggcgatcaaatcaagtag

SEQ ID NO: 43844 - DNA, 87 bp, Artificial Sequence
  derived and/or modified sequence
atgagcaccgagaaggtggaccagaaggaggaggccggcgagaaggaagtttgtggggatcagattaaaggtcctgacaaagagtag

SEQ ID NO: 43845 - DNA, 372 bp, Artificial Sequence
  derived and/or modified sequence
atgagcaccgagaaggtggaccagaaggaggaggccggcgagaaggaagtatgcggagaccagattaaggggccagataaagaagaagaaccccctgccgccgctagccacggacaaggctggagacccgggggaagagcagctcgaaacgccagaccagagcctggtgctagacacccggcgctacctgctatggtcaacgatccccctgtgcctgccctgttgtgggcccaagaggtggggcaggttttggctggaagggcaagaagattgctgttacagtttggtgttctcttctgcaccatcctactcctgctttgggtcagtgtatttttatatgggagtttctattactcatacatgccgacgtag

SEQ ID NO: 43846 - DNA, 1389 bp, Artificial Sequence
  derived and/or modified sequence
atgtctacggaaaaagttgatcagaaagaggaggccggagaaaaagaggtgtgcggagatcagataaaggggcctgataaagaagaagaaccaccagccgctgcctcccacgggcaaggctggcgaccaggtggccgagcggcacggaatgccagacccgagccaggtgcccgtcaccctgcattgcctgccatggtgaacgatcctcccgtgcccgcactgctgtgggcccaggaggtaggtcaagtgctggcaggcagagctcgcaggctcctattgcagttcggcgtgttattttgtactattctcctcctgctgtgggtttctgtgttcctctatggctcgttttactattcatatatgcctactgtctctcacctgtctccggtgcacttctattatcgaactgactgcgattcttcaacaacttccctgtgcagtttccctgttgcaaatgtgtctctcactaagggcggtagggatcgtgtgctgatgtatggtcagccgtatagggtaacactggaattggagcttccggaatccccagtgaatcaggatctggggatgttcttggttaccatttcgtgctacactcgtggaggcaggattatttctacttcatctcgctcagttatgttgcattaccggtcagacttgctacagatgctggatacacttgtgttcagctcactgctgctcttcggatttgcagaacagaagcaacttctagaggtggaactatacgcagactatagagaaaactcctatgtgcccaccacaggggctattatcgaaatacattctaagcgaatccagctgtacggggcatacctcaggatccacgcccactttacaggactgaggtacctgctgtataacttcccaatgacctgtgccttcattggtgtcgcctccaatttcacctttctgtccgttattgtgctgttctcctatatgcagtgggtgtggggaggaatatggcctcggcacagattctctttgcaggttaacattcggaagcgggacaactcccgcaaggaagtccagaggagaattagcgcgcaccagccagggcctgaaggacaggaggagagcaccccgcagagcgacgtaacagaggacggcgagtctccggaggaccctagtggcaccgaaggccagttgtccgaggaggagaaacccgaccagcagcctttatcaggcgaagaggaactggagcctgaggcgtcagatggctcgggctcatgggaagatgccgcattgttgactgaggcaaacctgcccgctccggcacctgcaagcgctagcgcccctgttcttgaaactttagggtcaagcgaacctgcgggaggagcactccgccaaaggccaacatgtagttcatcttag

SEQ ID NO: 43847 - DNA, 1389 bp, Artificial Sequence
  derived and/or modified sequence
atgtctaccgaaaaggtcgatcagaaagaggaggcaggagaaaaagaggtgtgtggagaccagatcaagggcccagataaggaagaagagccccctgctgcagcatcccacggccagggatggcgacctggaggcagggccgctcggaatgccagacctgaacctggcgctcgccaccctgcattgcccgctatggtcaacgatccaccagtccccgcactcttgtgggcacaagaagttggacaggtgctggcaggcagagccaggcgactcctgctccagttcggcgttctgttttgtactatcctgttactactgtgggtttcagtgttcttgtatggatctttctattactcttacatgcccactgtgagccacctgtctcccgtgcacttctactacagaaccgattgcgactcttcgacgacaagcttgtgtagtttccccgtggcaaatgtgtctctcaccaagggaggaagagatcgggttctgatgtatggccagccctacagggtcactctggaattagagttgcccgaatccccagtaaatcaggacctgggaatgtttctagtgactatttcctgctatacacgtggcggtcgaattatttctacttcctcccgcagtgtgatgctgcattacagatccgatctgctccaaatgttggacaccctggtctttagtagtctactgctgttcgggttcgccgagcagaaacagctccttgaggtggaattatacgctgattacagagagaactcttatgttcccactactggagcaatcatcgaaatccacagcaaaagaattcagctttatggggcatatttgaggatccatgctcatttcaccggcctccgctacttgttatacaacttccccatgacatgcgcttttataggcgtcgcctcgaactttactttcctgtcagtgatcgtcctattctcatacatgcagtgggtctggggtggcatatggccgcgacatcggtttagtctgcaggttaatatcagaaaaagggacaattccagaaaagaggtgcaacgcagaatctccgcccatcaacctggcccagaggggcaagaggagtcaacaccccagtccgacgtgaccgaggatggcgaatcaccagaggatccctccgggacagaggggcagttgtcggaggaagagaagcccgaccaacagccactgagcggggaagaagagctcgaacccgaggcctccgatggttccgggagctgggaagatgcagcccttctaaccgaggcgaaccttcctgcccctgcaccagcctcagcgtccgcacctgtgttggagaccttgggaagctccgaacccgcaggtggagccctgcggcaaaggccaacatgtagtagcagctag

SEQ ID NO: 43848 - DNA, 282 bp, Artificial Sequence
  derived and/or modified sequence
atgagcaccgagaaggtggaccagaaggaagaagccggtgaaaaggaagtttgtggcgatcaaataaagggccctgataaagaggaagaaccacctgccgcagcttcccatggacaaggatggagacccggtggcagagccgcacgcaacgctaggcctgagccaggcgcacgccaccctgcactccctgccatggttaatgaccccccagttcccgcactgctgtgggcgcaggaagtgggccaagtgctggctgggcgagcgagaaggctcctcctctag

SEQ ID NO: 43849 - DNA, 681 bp, Artificial Sequence
  derived and/or modified sequence
atgtcaaccgaaaaggtggaccaaaaagaagaagctggtgagaaggaggtctgcggggatcagattaaagggcctgacaaagaggaagaacctcccgctgctgctagccatggacaaggttggcggccaggcggtagggctgcccgtaacgctcggccagagccaggtgcccgacatcccgcattgcccgctatggtgaacgaccccccagtgcccgcacttctgtgggctcaagaagttggacaggtgctcgctggaagggccagacggctgttattacagtttggagtgctgttttgcactattctgcttctactctgggtctctgtgtttctctacggatctttttactatagctatatgcccactgtctctcatctatcacccgtgcatttctattacagaacggattgcgacagctccaccaccagcctctgctccttcccagtagccaatgtgagcctcaccaaaggcggaagagaccgggtacttatgtatggacaaccctaccgcgttaccttggagttagagttgccagaatcaccagttaatcaggacctggggatgtttctggttactatctcctgctatacacggggagggagaattatatccacatcgtccaggtctgtgatgttgcactatcggtctgacctgctacagatgctcgacactttgtag

SEQ ID NO: 43850 - DNA, 72 bp, Artificial Sequence
  derived and/or modified sequence
atgtctacggaaaaagtggaccagaaggaggaggccggagaaaaagaggtctgcggtgaccagattaagtag

SEQ ID NO: 43851 - DNA, 87 bp, Artificial Sequence
  derived and/or modified sequence
atgagtacagagaaagttgatcagaaggaggaggctggggagaaggaggtttgcggggatcagataaaaggccctgacaaggagtag

SEQ ID NO: 43852 - DNA, 372 bp, Artificial Sequence
  derived and/or modified sequence
atgtcaactgagaaagttgatcaaaaagaggaggcgggagaaaaagaggtgtgcggcgaccagattaaaggtccagacaaagaggaagaacctcctgcagcagcaagtcacggacagggatggcggcctggtggacgagctgctcgcaacgcacggcctgaacccggagcaaggcatccagcactaccagccatggttaacgatccaccggttccggcactgttatgggctcaggaggttgggcaggtcctggcaggccgagcgaggcgcctgctgcttcaattcggtgtgctgttttgcaccatacttctgcttctgtgggtatcagtctttctgtacggtagcttctattatagctatatgcctacgtag

SEQ ID NO: 43853 - DNA, 1683 bp, Artificial Sequence
  derived and/or modified sequence
agtcgcccccctcctcctttcctccctctactctgacacagcacttagcacctgaatcttcgtttctctcccagggaccctccattttccatatccaggaaaatgtgatgcgccacaggtatcagcgtctggatcgccacttcacgttttagccacaagtgactcagtggaagatccagagtcaacagaggctcgtcaggaagatgtctacagaaaaggtagaccaaaaggaggaagctggggaaaaagaggtgtgcggagaccagatcaaaggaccggacaaagaggaggaaccaccagctgctgcatcccatggccaggggtggcgtccaggtggcagagcagctaggaacgcaaggcctgaacctggggccagacaccctgctctcccggccatggtcaacgaccctccagtacctgccttactgtgggcccaggaggtgggccaagtcttggcaggccgtgcccgcaggctgctgctgcagtttggggtgctcttctgcaccatcctccttttgctctgggtgtctgtcttcctctatggctccttctactattcctatatgccgacagtcagccacctcagccctgtgcatttctactacaggaccgactgtgattcctccaccacctcactctgctccttccctgttgccaatgtctcgctgactaagggtggacgtgatcgggtgctgatgtatggacagccgtatcgtgttaccttagagcttgagctgccagagtcccctgtgaatcaagatttgggcatgttcttggtcaccatttcctgctacaccagaggtggccgaatcatctccacttcttcgcgttcggtgatgctgcattaccgctcagacctgctccagatgctggacacactggtcttctctagcctcctgctatttggctttgcagagcagaagcagctgctggaggtggaactctacgcagactatagagagaactcgtacgtgccgaccactggagcgatcattgagatccacagcaagcgcatccagctgtatggagcctacctccgcatccacgcgcacttcactgggctcagatacctgctatacaacttcccgatgacctgcgccttcataggtgttgccagcaacttcaccttcctcagcgtcatcgtgctcttcagctacatgcagtgggtgtgggggggcatctggccccgacaccgcttctctttgcaggttaacatccgaaaaagagacaattcccggaaggaagtccaacgaaggatctctgctcatcagccagggcctgaaggccaggaggagtcaactccgcaatcagatgttacagaggatggtgagagccctgaagatccctcagggacagagggtcagctgtccgaggaggagaaaccagatcagcagcccctgagcggagaagaggagctagagcctgaggccagtgatggttcaggctcctgggaagatgcagctttgctgacggaggccaacctgcctgctcctgctcctgcttctgcttctgcccctgtcctagagactctgggcagctctgaacctgctgggggtgctctccgacagcgccccacctgctctagttcctgaagaaaaggggcagactcctcacattccagcactttcccacctgactcctctcccctcgtttttccttcaataaactattttgtgtcagctt

SEQ ID NO: 43854 - DNA, 1693 bp, Artificial Sequence
  derived and/or modified sequence
cggcgggctggtttccatggttgcacgattaggtaggggctccgggcgctttgcccacccccgagctggaggggactggcgggaagcggcggttggctgcagggcgctccgccgggcgtggggtgtagccgtgtcggtgagcgagctctgctcgaggcggagaggagaaactcgggaagcaattgtggctactctaaggctactggtttcgagtcaggccgtgcgaccttaggcaagtcgcacattctctccgtgcagctgcctagcagtgtggattcagtatcaccgtgtgtgtaaagctctttctaagaatcgtaaggaaccaccagctgctgcatcccatggccaggggtggcgtccaggtggcagagcagctaggaacgcaaggcctgaacctggggccagacaccctgctctcccggccatggtcaacgaccctccagtacctgccttactgtgggcccaggaggtgggccaagtcttggcaggccgtgcccgcaggctgctgctgcagtttggggtgctcttctgcaccatcctccttttgctctgggtgtctgtcttcctctatggctccttctactattcctatatgccgacagtcagccacctcagccctgtgcatttctactacaggaccgactgtgattcctccaccacctcactctgctccttccctgttgccaatgtctcgctgactaagggtggacgtgatcgggtgctgatgtatggacagccgtatcgtgttaccttagagcttgagctgccagagtcccctgtgaatcaagatttgggcatgttcttggtcaccatttcctgctacaccagaggtggccgaatcatctccacttcttcgcgttcggtgatgctgcattaccgctcagacctgctccagatgctggacacactggtcttctctagcctcctgctatttggctttgcagagcagaagcagctgctggaggtggaactctacgcagactatagagagaactcgtacgtgccgaccactggagcgatcattgagatccacagcaagcgcatccagctgtatggagcctacctccgcatccacgcgcacttcactgggctcagatacctgctatacaacttcccgatgacctgcgccttcataggtgttgccagcaacttcaccttcctcagcgtcatcgtgctcttcagctacatgcagtgggtgtgggggggcatctggccccgacaccgcttctctttgcaggttaacatccgaaaaagagacaattcccggaaggaagtccaacgaaggatctctgctcatcagccagggcctgaaggccaggaggagtcaactccgcaatcagatgttacagaggatggtgagagccctgaagatccctcagggacagagggtcagctgtccgaggaggagaaaccagatcagcagcccctgagcggagaagaggagctagagcctgaggccagtgatggttcaggctcctgggaagatgcagctttgctgacggaggccaacctgcctgctcctgctcctgcttctgcttctgcccctgtcctagagactctgggcagctctgaacctgctgggggtgctctccgacagcgccccacctgctctagttcctgaagaaaaggggcagactcctcacattccagcactttcccacctgactcctctcccctcgtttttccttcaata

SEQ ID NO: 43855 - DNA, 1516 bp, Artificial Sequence
  derived and/or modified sequence
tacaaaagcggccggcggagaggggcgggacttccccgggagccggaagtcccgtctcacggttgccctggcagcgcgcgaggctggtgagtcggcagccctgtggcagccggcgggctggtttccatggttgcacgattaggaaccaccagctgctgcatcccatggccaggggtggcgtccaggtggcagagcagctaggaacgcaaggcctgaacctggggccagacaccctgctctcccggccatggtcaacgaccctccagtacctgccttactgtgggcccaggaggtgggccaagtcttggcaggccgtgcccgcaggctgctgctgcagtttggggtgctcttctgcaccatcctccttttgctctgggtgtctgtcttcctctatggctccttctactattcctatatgccgacagtcagccacctcagccctgtgcatttctactacaggaccgactgtgattcctccaccacctcactctgctccttccctgttgccaatgtctcgctgactaagggtggacgtgatcgggtgctgatgtatggacagccgtatcgtgttaccttagagcttgagctgccagagtcccctgtgaatcaagatttgggcatgttcttggtcaccatttcctgctacaccagaggtggccgaatcatctccacttcttcgcgttcggtgatgctgcattaccgctcagacctgctccagatgctggacacactggtcttctctagcctcctgctatttggctttgcagagcagaagcagctgctggaggtggaactctacgcagactatagagagaactcgtacgtgccgaccactggagcgatcattgagatccacagcaagcgcatccagctgtatggagcctacctccgcatccacgcgcacttcactgggctcagatacctgctatacaacttcccgatgacctgcgccttcataggtgttgccagcaacttcaccttcctcagcgtcatcgtgctcttcagctacatgcagtgggtgtgggggggcatctggccccgacaccgcttctctttgcaggttaacatccgaaaaagagacaattcccggaaggaagtccaacgaaggatctctgctcatcagccagggcctgaaggccaggaggagtcaactccgcaatcagatgttacagaggatggtgagagccctgaagatccctcagggacagagggtcagctgtccgaggaggagaaaccagatcagcagcccctgagcggagaagaggagctagagcctgaggccagtgatggttcaggctcctgggaagatgcagctttgctgacggaggccaacctgcctgctcctgctcctgcttctgcttctgcccctgtcctagagactctgggcagctctgaacctgctgggggtgctctccgacagcgccccacctgctctagttcctgaagaaaaggggcagactcctcacattccagcactttcccacctgactcctctcccctcgtttttccttcaata

SEQ ID NO: 43856 - DNA, 1440 bp, Artificial Sequence
  derived and/or modified sequence
tacaaaagcggccggcggagaggggcgggacttccccgggagccggaagtcccgtctcacggttgccctggcagcgcgcgaggctggaaccaccagctgctgcatcccatggccaggggtggcgtccaggtggcagagcagctaggaacgcaaggcctgaacctggggccagacaccctgctctcccggccatggtcaacgaccctccagtacctgccttactgtgggcccaggaggtgggccaagtcttggcaggccgtgcccgcaggctgctgctgcagtttggggtgctcttctgcaccatcctccttttgctctgggtgtctgtcttcctctatggctccttctactattcctatatgccgacagtcagccacctcagccctgtgcatttctactacaggaccgactgtgattcctccaccacctcactctgctccttccctgttgccaatgtctcgctgactaagggtggacgtgatcgggtgctgatgtatggacagccgtatcgtgttaccttagagcttgagctgccagagtcccctgtgaatcaagatttgggcatgttcttggtcaccatttcctgctacaccagaggtggccgaatcatctccacttcttcgcgttcggtgatgctgcattaccgctcagacctgctccagatgctggacacactggtcttctctagcctcctgctatttggctttgcagagcagaagcagctgctggaggtggaactctacgcagactatagagagaactcgtacgtgccgaccactggagcgatcattgagatccacagcaagcgcatccagctgtatggagcctacctccgcatccacgcgcacttcactgggctcagatacctgctatacaacttcccgatgacctgcgccttcataggtgttgccagcaacttcaccttcctcagcgtcatcgtgctcttcagctacatgcagtgggtgtgggggggcatctggccccgacaccgcttctctttgcaggttaacatccgaaaaagagacaattcccggaaggaagtccaacgaaggatctctgctcatcagccagggcctgaaggccaggaggagtcaactccgcaatcagatgttacagaggatggtgagagccctgaagatccctcagggacagagggtcagctgtccgaggaggagaaaccagatcagcagcccctgagcggagaagaggagctagagcctgaggccagtgatggttcaggctcctgggaagatgcagctttgctgacggaggccaacctgcctgctcctgctcctgcttctgcttctgcccctgtcctagagactctgggcagctctgaacctgctgggggtgctctccgacagcgccccacctgctctagttcctgaagaaaaggggcagactcctcacattccagcactttcccacctgactcctctc

SEQ ID NO: 43857 - DNA, 2038 bp, Artificial Sequence
  derived and/or modified sequence
atcttaggtataaaatcggctccagtcgcggtaactgaagccaagctccgcccctaccctcctaagagttcctctgctgtacgactgcactcccgcaccctcccctaaatcccccctcttcggcctgtttaccttttaacttggcttcgttgcacgtttgtgtgtgtgtgtttgctcttcgcagcctcttgagcgtcttttgtacttaattcttacactgtggacgctctctcgcgcccgccatcccccgacccctctgatctccgatccttgacgatgtctagcctgcattgattggcccttttccctgggtatggcagatctattgcttgatgatcctctccccccaagaattctaacacaggagctgtcctgaggctctggatgactttattcttcaaatggctttaccctcccagtagctccagggaccctccattttccatatccaggaaaatgtgatgcgccacaggtatcagcgtctggatcgccacttcacgttttagccacaagtgactcagtggaagatccagagtcaacagaggctcgtcaggaagatgtctacagaaaaggtagaccaaaaggaggaagctggggaaaaagaggtgtgcggagaccagatcaaaggaccggacaaagaggaggaaccaccagctgctgcatcccatggccaggggtggcgtccaggtggcagagcagctaggaacgcaaggcctgaacctggggccagacaccctgctctcccggccatggtcaacgaccctccagtacctgccttactgtgggcccaggaggtgggccaagtcttggcaggccgtgcccgcaggctgctgctgcagtttggggtgctcttctgcaccatcctccttttgctctgggtgtctgtcttcctctatggctccttctactattcctatatgccgacagtcagccacctcagccctgtgcatttctactacaggaccgactgtgattcctccaccacctcactctgctccttccctgttgccaatgtctcgctgactaagggtggacgtgatcgggtgctgatgtatggacagccgtatcgtgttaccttagagcttgagctgccagagtcccctgtgaatcaagatttgggcatgttcttggtcaccatttcctgctacaccagaggtggccgaatcatctccacttcttcgcgttcggtgatgctgcattaccgctcagacctgctccagatgctggacacactggtcttctctagcctcctgctatttggctttgcagagcagaagcagctgctggaggtggaactctacgcagactatagagagaactcgtacgtgccgaccactggagcgatcattgagatccacagcaagcgcatccagctgtatggagcctacctccgcatccacgcgcacttcactgggctcagatacctgctatacaacttcccgatgacctgcgccttcataggtgttgccagcaacttcaccttcctcagcgtcatcgtgctcttcagctacatgcagtgggtgtgggggggcatctggccccgacaccgcttctctttgcaggttaacatccgaaaaagagacaattcccggaaggaagtccaacgaaggatctctgctcatcagccagggcctgaaggccaggaggagtcaactccgcaatcagatgttacagaggatggtgagagccctgaagatccctcagggacagagggtcagctgtccgaggaggagaaaccagatcagcagcccctgagcggagaagaggagctagagcctgaggccagtgatggttcaggctcctgggaagatgcagctttgctgacggaggccaacctgcctgctcctgctcctgcttctgcttctgcccctgtcctagagactctgggcagctctgaacctgctgggggtgctctccgacagcgccccacctgctctagttcctgaagaaaaggggcagactcctcacattccagcactttcccacctgactcctctcccctcgtttttccttcaataaactattttgtgtcagcttc

SEQ ID NO: 43858 - DNA, 992 bp, Artificial Sequence
  derived and/or modified sequence
atggttgcacgattaggtaggggctccgggcgctttgcccacccccgagctggaggggactggcgggaagcggcggttggctgcagggcgctccgccgggcgtggggtgtagccgtgtcggtgagcgagctctgctcgaggcggagaggagaaactcgggaagcaattgtggctactctaaggctactggtttcgagtcaggccgtgcgaccttaggaaccaccagctgctgcatcccatggccaggggtggcgtccaggtggcagagcagctaggaacgcaaggcctgaacctggggccagacaccctgctctcccggccatggtcaacgaccctccagtacctgccttactgtgggcccaggaggtgggccaagtcttggcaggccgtgcccgcaggctgctgctgcagtttggggtgctcttctgcaccatcctccttttgctctgggtgtctgtcttcctctatggctccttctactattcctatatgccgacagtcagccacctcagccctgtgcatttctactacaggaccgactgtgattcctccaccacctcactctgctccttccctgttgccaatgtctcgctgactaagggtggacgtgatcgggtgctgatgtatggacagccgtatcgtgttaccttagagcttgagctgccagagtcccctgtgaatcaagatttgggcatgttcttggtcaccatttcctgctacaccagaggtggccgaatcatctccacttcttcgcgttcggtgatgctgcattaccgctcagacctgctccagatgctggacacactggtcttctctagcctcctgctatttggctttgcagagcagaagcagctgctggaggtggaactctacgcagactatagagagaactcgtacgtgccgaccactggagcgatcattgagatccacagcaagcgcatccagctgtatggagcctacctccgcatccacgcgcacttcactgggctcag

SEQ ID NO: 43859 - DNA, 794 bp, Artificial Sequence
  derived and/or modified sequence
agtgattcttcgttatggccgcccgtgtgccttcgactcaatcgggaggacaccgaaatccagatttcggggttgcagggcgcgggccccggcttggttagggcaggggcagccattttgagaccagaagagggcggaagggaccatattgagaacgccggttgcctgggggccgccattttaagagaagccctgtacggtaaactccgtgacgtgggggctgccatgttggtacggccatcttggaatgggagtggctgtgggcgcagccatcttagatctattgcttgatgatcctctccccccaagaattctaacacaggagctgtcctgaggctctggatgactttattcttcaaatggctttaccctcccagtagctccagggaccctccattttccatatccaggaaaatgtgatgcgccacaggtatcagcgtctggatcgccacttcacgttttagccacaagtgactcagtggaagatccagagtcaacagaggctcgtcaggaagatgtctacagaaaaggtagaccaaaaggaggaagctggggaaaaagaggtgtgcggagaccagatcaaaggaccggacaaagaggaggaaccaccagctgctgcatcccatggccaggggtggcgtccaggtggcagagcagctaggaacgcaaggcctgaacctggggccagacaccctgctctcccggccatggtcaacgaccctccagtacctgccttactgtgggcccaggaggtgggccaagtcttggcaggccgtgcccgcaggctgctgctg

SEQ ID NO: 43860 - DNA, 865 bp, Artificial Sequence
  derived and/or modified sequence
ctctgatctccgatccttgacgatgtctagcctgcattgattggcccttttccctggggaccctccattttccatatccaggaaaatgtgatgcgccacaggtatcagcgtctggatcgccacttcacgttttagccacaagtgactcagtggaagatccagagtcaacagaggctcgtcaggaagatgtctacagaaaaggtagaccaaaaggaggaagctggggaaaaagaggtgtgcggagaccagatcaaaggaccggacaaagaggaggaaccaccagctgctgcatcccatggccaggggtggcgtccaggtggcagagcagctaggaacgcaaggcctgaacctggggccagacaccctgctctcccggccatggtcaacgaccctccagtacctgccttactgtgggcccaggaggtgggccaagtcttggcaggccgtgcccgcaggctgctgctgcagtttggggtgctcttctgcaccatcctccttttgctctgggtgtctgtcttcctctatggctccttctactattcctatatgccgacagtcagccacctcagccctgtgcatttctactacaggaccgactgtgattcctccaccacctcactctgctccttccctgttgccaatgtctcgctgactaagggtggacgtgatcgggtgctgatgtatggacagccgtatcgtgttaccttagagcttgagctgccagagtcccctgtgaatcaagatttgggcatgttcttggtcaccatttcctgctacaccagaggtggccgaatcatctccacttcttcgcgttcggtgatgctgcattaccgctcagacctgctccagatgctggacacactgg

SEQ ID NO: 43861 - DNA, 539 bp, Artificial Sequence
  derived and/or modified sequence
agtgattcttcgttatggccgcccgtgtgccttcgactcaatcgggaggacaccgaaatccagatttcggggttgcagggcgcgggccccggcttggttagggcaggggcagccattttgagaccagaagagggcggaagggaccatattgagaacgccggttgcctgggggccgccattttaagagaagccctctctgaagacctcaaccaaccctgatgaggagggcacatcacccctgtctgctccagtgagccccaacaggagaaaaacaggccattacttacctgaagccacaagcggcagtagcagccctgggtgtaggggaccctccattttccatatccaggaaaatgtgatgcgccacaggtatcagcgtctggatcgccacttcacgttttagccacaagtgactcagtggaagatccagagtcaacagaggctcgtcaggaagatgtctacagaaaaggtagaccaaaaggaggaagctggggaaaaagaggtgtgcggagaccagatcaaaggaccggacaaagagg

SEQ ID NO: 43862 - DNA, 662 bp, Artificial Sequence
  derived and/or modified sequence
attttgagaccagaagagggcggaagggaccatattgagaacgccggttgcctgggggccgccattttaagagaagccctgtacggtaaactccgtgacgtgggggctgccatgttggtacggccatcttggaatgggagtggctgtgggcgcagccatcttagggaccctccattttccatatccaggaaaatgtgatgcgccacaggtatcagcgtctggatcgccacttcacgttttagccacaagtgactcagtggaagatccagagtcaacagaggctcgtcaggaagatgtctacagaaaaggtagaccaaaaggaggaagctggggaaaaagaggtgtgcggagaccagatcaaaggaccggacaaagaggaggaaccaccagctgctgcatcccatggccaggggtggcgtccaggtggcagagcagctaggaacgcaaggcctgaacctggggccagacaccctgctctcccggccatggtcaacgaccctccagtacctgccttactgtgggcccaggaggtgggccaagtcttggcaggccgtgcccgcaggctgctgctgcagtttggggtgctcttctgcaccatcctccttttgctctgggtgtctgtcttcctctatggctccttctactattcctatatgccgaca

SEQ ID NO: 43863 - DNA, 585 bp, Artificial Sequence
  derived and/or modified sequence
acctgaatcttcgtttctctcccagggaccctccattttccatatccaggaaaatgtgatgcgccacaggtatcagcgtctggatcgccacttcacgttttagccacaagtgactcagtggaagatccagagtcaacagaggctcgtcaggaagatgtctacagaaaaggtagaccaaaaggaggaagctggggaaaaagaggtgtgcggagaccagatcaaaggaccggacaaagaggaggaacgcaaggcctgaacctggggccagacaccctgctctcccggccatggtcaacgaccctccagtacctgccttactgtgggcccaggaggtgggccaagtcttggcaggccgtgcccgcaggctgctgctgcagtttggggtgctcttctgcaccatcctccttttgctctgggtgtctgtcttcctctatggctccttctactattcctatatgccgacagtcagccacctcagccctgtgcatttctactacaggaccgactgtgattcctccaccacctcactctgctccttccctgttgccaatgtctcgctgactaagggtggacgtgatcgggtgc

SEQ ID NO: 43864 - DNA, 1389 bp, Artificial Sequence
  derived and/or modified sequence
atgagcaccgagaaggtggaccagaaggaggaggccggcgagaaggaggtgtgcggcgaccagatcaagggccccgacaaggaggaggagccccccgccgccgccagccacggccagggctggagacccggcggcagagccgccagaaacgccagacccgagcccggcgccagacaccccgccctgcccgccatggtgaacgacccccccgtgcccgccctgctgtgggcccaggaggtgggccaggtgctggccggcagagccagaagactgctgctgcagttcggcgtgctgttctgcaccatcctgctgctgctgtgggtgagcgtgttcctgtacggcagcttctactacagctacatgcccaccgtgagccacctgagccccgtgcacttctactacagaaccgactgcgacagcagcaccaccagcctgtgcagcttccccgtggccaacgtgagcctgaccaagggcggcagagacagagtgctgatgtacggccagccctacagagtgaccctggagctggagctgcccgagagccccgtgaaccaggacctgggcatgttcctggtgaccatcagctgctacaccagaggcggcagaatcatcagcaccagcagcagaagcgtgatgctgcactacagaagcgacctgctgcagatgctggacaccctggtgttcagcagcctgctgctgttcggcttcgccgagcagaagcagctgctggaggtggagctgtacgccgactacagagagaacagctacgtgcccaccaccggcgccatcatcgagatccacagcaagagaatccagctgtacggcgcctacctgagaatccacgcccacttcaccggcctgagatacctgctgtacaacttccccatgacctgcgccttcatcggcgtggccagcaacttcaccttcctgagcgtgatcgtgctgttcagctacatgcagtgggtgtggggcggcatctggcccagacacagattcagcctgcaggtgaacatcagaaagagagacaacagcagaaaggaggtgcagagaagaatcagcgcccaccagcccggccccgagggccaggaggagagcaccccccagagcgacgtgaccgaggacggcgagagccccgaggaccccagcggcaccgagggccagctgagcgaggaggagaagcccgaccagcagcccctgagcggcgaggaggagctggagcccgaggccagcgacggcagcggcagctgggaggacgccgccctgctgaccgaggccaacctgcccgcccccgcccccgccagcgccagcgcccccgtgctggagaccctgggcagcagcgagcccgccggcggcgccctgagacagagacccacctgcagcagcagctag

SEQ ID NO: 43865 - DNA, 282 bp, Artificial Sequence
  derived and/or modified sequence
atgagcaccgagaaggtggaccagaaggaggaggccggcgagaaggaggtgtgcggcgaccagatcaagggccccgacaaggaggaggagccccccgccgccgccagccacggccagggctggagacccggcggcagagccgccagaaacgccagacccgagcccggcgccagacaccccgccctgcccgccatggtgaacgacccccccgtgcccgccctgctgtgggcccaggaggtgggccaggtgctggccggcagagccagaagactgctgctgtag

SEQ ID NO: 43866 - DNA, 681 bp, Artificial Sequence
  derived and/or modified sequence
atgagcaccgagaaggtggaccagaaggaggaggccggcgagaaggaggtgtgcggcgaccagatcaagggccccgacaaggaggaggagccccccgccgccgccagccacggccagggctggagacccggcggcagagccgccagaaacgccagacccgagcccggcgccagacaccccgccctgcccgccatggtgaacgacccccccgtgcccgccctgctgtgggcccaggaggtgggccaggtgctggccggcagagccagaagactgctgctgcagttcggcgtgctgttctgcaccatcctgctgctgctgtgggtgagcgtgttcctgtacggcagcttctactacagctacatgcccaccgtgagccacctgagccccgtgcacttctactacagaaccgactgcgacagcagcaccaccagcctgtgcagcttccccgtggccaacgtgagcctgaccaagggcggcagagacagagtgctgatgtacggccagccctacagagtgaccctggagctggagctgcccgagagccccgtgaaccaggacctgggcatgttcctggtgaccatcagctgctacaccagaggcggcagaatcatcagcaccagcagcagaagcgtgatgctgcactacagaagcgacctgctgcagatgctggacaccctgtag

SEQ ID NO: 43867 - DNA, 72 bp, Artificial Sequence
  derived and/or modified sequence
atgagcaccgagaaggtggaccagaaggaggaggccggcgagaaggaggtgtgcggcgaccagatcaagtag

SEQ ID NO: 43868 - DNA, 87 bp, Artificial Sequence
  derived and/or modified sequence
atgagcaccgagaaggtggaccagaaggaggaggccggcgagaaggaggtgtgcggcgaccagatcaagggccccgacaaggagtag

SEQ ID NO: 43869 - DNA, 372 bp, Artificial Sequence
  derived and/or modified sequence
atgagcaccgagaaggtggaccagaaggaggaggccggcgagaaggaggtgtgcggcgaccagatcaagggccccgacaaggaggaggagccccccgccgccgccagccacggccagggctggagacccggcggcagagccgccagaaacgccagacccgagcccggcgccagacaccccgccctgcccgccatggtgaacgacccccccgtgcccgccctgctgtgggcccaggaggtgggccaggtgctggccggcagagccagaagactgctgctgcagttcggcgtgctgttctgcaccatcctgctgctgctgtgggtgagcgtgttcctgtacggcagcttctactacagctacatgcccacctag

SEQ ID NO: 43870 - protein, 439 aa, Artificial Sequence
  derived and/or modified sequence
MAANLSRNGPALQEAYVRVVTEKSPTDWALFTYEGNSNDIRVAGTGEGGLEEMVEELNSGKVMYAFCRVKDPNSGLPKFVLINWTGEGVNDVRKGACASHVSTMASFLKGAHVTINARAEEDVEPECIMEKVAKASGANYSFHKESGRFQDVGPQAPVGSVYQKTNAVSEIKRVGKDSFWAKAEKEEENRRLEEKRRAEEAQRQLEQERRERELREAARREQRYQEQGGEASPQSRTWEQQQEVVSRNRNEQGSTCASLQESAVHPREIFKQKERAMSTTSISSPQPGKLRSPFLQKQLTQPETHFGREPAAAISRPRADLPAEEPAPSTPPCLVQAEEEAVYEEPPEQETFYEQPPLVQQQGAGSEHIDHHIQGQGLSGQGLCARALYDYQAADDTEISFDPENLITGIEVIDEGWWRGYGPDGHFGMFPANYVELIE

SEQ ID NO: 43871 - DNA, 1320 bp, Artificial Sequence
  derived and/or modified sequence
atggccgccaacctgagcagaaacggccccgccctgcaggaggcctacgtgagagtggtgaccgagaagagccccaccgactgggccctgttcacctacgagggcaacagcaacgacatcagagtggccggcaccggcgagggcggcctggaggagatggtggaggagctgaacagcggcaaggtgatgtacgccttctgcagagtgaaggaccccaacagcggcctgcccaagttcgtgctgatcaactggaccggcgagggcgtgaacgacgtgagaaagggcgcctgcgccagccacgtgagcaccatggccagcttcctgaagggcgcccacgtgaccatcaacgccagagccgaggaggacgtggagcccgagtgcatcatggagaaggtggccaaggccagcggcgccaactacagcttccacaaggagagcggcagattccaggacgtgggcccccaggcccccgtgggcagcgtgtaccagaagaccaacgccgtgagcgagatcaagagagtgggcaaggacagcttctgggccaaggccgagaaggaggaggagaacagaagactggaggagaagagaagagccgaggaggcccagagacagctggagcaggagagaagagagagagagctgagagaggccgccagaagagagcagagataccaggagcagggcggcgaggccagcccccagagcagaacctgggagcagcagcaggaggtggtgagcagaaacagaaacgagcagggcagcacctgcgccagcctgcaggagagcgccgtgcaccccagagagatcttcaagcagaaggagagagccatgagcaccaccagcatcagcagcccccagcccggcaagctgagaagccccttcctgcagaagcagctgacccagcccgagacccacttcggcagagagcccgccgccgccatcagcagacccagagccgacctgcccgccgaggagcccgcccccagcacccccccctgcctggtgcaggccgaggaggaggccgtgtacgaggagccccccgagcaggagaccttctacgagcagccccccctggtgcagcagcagggcgccggcagcgagcacatcgaccaccacatccagggccagggcctgagcggccagggcctgtgcgccagagccctgtacgactaccaggccgccgacgacaccgagatcagcttcgaccccgagaacctgatcaccggcatcgaggtgatcgacgagggctggtggagaggctacggccccgacggccacttcggcatgttccccgccaactacgtggagctgatcgagtag

SEQ ID NO: 43872 - DNA, 1320 bp, Artificial Sequence
  derived and/or modified sequence
atggcggccaatttgtcgcgcaatggccccgccctccaagaggcctatgtaagagtagtgactgaaaagagccccacggactgggccctgtttacatacgaaggaaactcaaacgacattcgcgtagccggcaccggcgaaggtggcctggaagaaatggtggaggagttgaatagcgggaaagtcatgtacgccttctgtagggtgaaggaccctaatagtggcctcccaaagtttgtcttaataaattggaccggggagggagtaaacgacgtgcgaaagggtgcttgtgcatctcacgtaagcacaatggcctctttcttgaagggagcacatgtgaccatcaatgcccgtgccgaggaggacgtagagcccgagtgtatcatggagaaagtggccaaggccagcggcgctaactactcattccacaaagagagcggtagatttcaggacgtgggaccacaggcccccgtggggagcgtgtaccagaaaacaaatgccgtgtccgagatcaaaagagtcggtaaggacagtttctgggccaaagctgaaaaggaagaggagaatagacgtctggaagagaagcggcgcgctgaggaggcccagaggcaactcgaacaggagaggagagaaagagagctgcgcgaggcggcccgcagggaacagcgttatcaagagcagggcggggaagccagcccacaatcacgaacgtgggaacagcaacaggaagtggtttcacgcaatcgtaatgaacaaggatccacctgcgcctccctgcaagagtcagctgttcatccaagagagatcttcaagcagaaggaaagggccatgtccacaaccagtatttcatccccccaacccggcaaactgaggtccccctttctgcaaaagcaattgactcagcccgagactcattttggccgcgagccagccgcggctatcagtaggcctcgtgccgacctgccagcagaggaacctgctccttccacccccccctgcctggtgcaggctgaagaggaagcagtgtacgaagagccgcctgagcaggagaccttctacgagcagccacccctcgtccagcaacagggcgctggttccgagcacatcgaccatcacatacaggggcagggtttgtcggggcagggtttgtgcgctcgggccctttacgattaccaggcagcagacgacactgaaattagttttgatcctgaaaaccttatcacaggcattgaagttatcgacgagggatggtggcgtggttacgggccagacggccacttcggcatgtttccagccaattacgtggaactgattgaatag

SEQ ID NO: 43873 - DNA, 1320 bp, Artificial Sequence
  derived and/or modified sequence
atggccgccaacctgagcagaaatggacctgccctgcaggaggcctacgtgcgggtggtgacagagaagagccccacagactgggccctcttcacctatgagggcaacagcaatgacatccgggtggccggcactggagagggcggcctggaggagatggtggaggagctgaacagcggcaaggtgatgtatgccttctgccgggtgaaggaccccaacagcggcctgcccaagtttgtgctgatcaactggacaggagagggcgtgaatgatgtgaggaagggggcctgtgccagccacgtgtccaccatggccagcttcctgaagggggcccacgtgaccatcaatgcccgggcagaagaagatgtggagcctgagtgcatcatggagaaggtggccaaggccagcggggccaactacagcttccacaaggagagcggccgcttccaggatgtgggcccccaggcccctgtgggctctgtgtaccagaagaccaatgctgtgtctgagatcaagagggtgggcaaggacagcttctgggccaaggccgagaaggaggaggagaacagaaggctggaggagaagagaagagctgaggaggcccagaggcagctggagcaggagcggcgggagcgggagctgcgggaggccgcccggcgggagcagcgctaccaggagcagggcggggaggccagcccccagagcaggacctgggagcagcagcaggaggtggtgtccaggaacagaaatgagcagggcagcacctgtgccagcctgcaggagagcgctgtgcacccccgggagatcttcaagcagaaggagcgggccatgagcaccaccagcatcagcagcccccagcccgggaagctgcggagccccttcctgcagaagcagctgacccagcctgagacccacttcggccgggagcctgctgctgccatcagccggcccagggctgacctgcctgctgaggagcccgcccccagcaccccaccctgcctggtgcaggccgaggaggaggccgtgtatgaggagcccccagagcaggagaccttctatgagcagccccccctggtgcagcagcagggcgccggcagcgagcacatcgaccaccacatccagggccagggcctgagcggccagggcctgtgtgcccgggccctgtatgactaccaggccgcagatgacacagagatcagctttgatcctgagaacctgatcaccggcatcgaggtgattgatgagggctggtggaggggctacggcccagatggccacttcggcatgtttcctgccaactacgtggagctgattgaatag

SEQ ID NO: 43874 - DNA, 1320 bp, Artificial Sequence
  derived and/or modified sequence
atggccgccaacctgagccggaacggccccgccctgcaggaggcctatgtgcgggttgtgaccgagaaaagtccgacagactgggccctttttacctatgagggcaatagcaacgacatccgggtggccggcaccggcgaagggggtctggaggagatggtagaggaattgaattcgggcaaagttatgtacgcgttctgtcgtgtgaaggatccgaactcagggctgcctaagtttgtcctcattaattggacaggcgagggggttaacgacgtgcggaagggtgcctgtgcctcacacgtgagtaccatggcttcctttcttaagggggctcacgtgaccatcaacgccagggcagaagaggatgttgagccagagtgcatcatggagaaagtggctaaagctagtggcgctaactactcttttcataaggagtctggcagattccaagacgtggggcctcaggcacccgttggctctgtatatcaaaagacgaatgcggtaagtgagatcaagcgggtgggcaaagattccttctgggctaaagccgaaaaagaagaggagaacagacgccttgaggaaaaacgtcgcgccgaggaggcccagaggcagcttgaacaggaacgtcgcgagagggaactgcgtgaagcggcccgtagagagcaacgctaccaggagcagggtggagaagctagccctcagagtagaacttgggagcagcagcaggaggtagtgtcgcgtaaccggaatgaacagggttctacatgtgcaagtttgcaggagagcgctgtgcatccgcgggaaatatttaagcagaaagaaagggcaatgtcaactacaagcatttcctcaccacaacctggaaagctgcgctccccttttcttcaaaaacagttgacccaacctgaaacgcactttggtcgcgagccggccgccgctatttctcgcccacgtgcagacctgccagcagaggaacccgcccctagcacccccccatgcctggtacaagctgaagaggaagctgtgtatgaagaaccccccgaacaggagactttctacgaacagccacctcttgtgcagcagcagggcgccggctccgagcatatcgaccaccacattcaaggccaaggcctttccggtcagggcctgtgtgctcgcgccctgtacgattaccaagctgccgatgacactgaaattagtttcgacccagaaaatctcatcactggaattgaagtcattgatgaagggtggtggcgcggttatgggccggacgggcactttggcatgttccctgccaattatgttgaactcatcgaatag

SEQ ID NO: 43875 - DNA, 1320 bp, Artificial Sequence
  derived and/or modified sequence
atggcggctaatctgtcccgtaacggcccagccctccaggaggcctatgtgcgcgtggtgactgaaaaaagccccaccgactgggccctgtttacttatgaagggaactccaatgatatcagggtggccggaactggggagggaggcttggaggagatggtcgaagagctgaatagcgggaaggttatgtatgccttttgccgcgtgaaagaccctaattccggcctgcctaagtttgtgttgatcaactggaccggggagggcgtgaatgacgttcggaaaggggcatgcgcatcacatgtgtcaaccatggcgtcattcctgaagggagcccatgtgacaattaacgctcgtgcggaggaggatgttgaacccgaatgtatcatggaaaaggtggccaaagctagtggagcgaactactccttccacaaagagagcggcagatttcaagacgtgggcccacaggcccctgtgggctctgtataccagaagaccaatgccgtgtccgagatcaaacgggtcggcaaggatagtttttgggccaaagcggaaaaggaggaggagaatcgccgtctcgaggaaaagagaagagctgaggaggctcagcgtcagttggaacaagaacgacgcgagcgggagctccgtgaggcagcgaggagggagcagagataccaagagcagggcggagaggcttccccacaatctcgtacctgggagcagcaacaggaagtggtttccagaaatagaaacgaacagggaagcacctgtgcaagtctccaggagtcagcggtgcatccacgcgagattttcaagcaaaaggagcgcgctatgtctaccactagtatctcatccccacagcctggcaagttaaggtcccctttcctgcagaaacagcttactcagcctgagacacatttcggtagggaaccggctgctgccattagccgccctcgagccgatctcccagcagaagaacccgctccttctacacctccatgcctggtacaggcagaggaggaggccgtttacgaagaaccacctgaacaggagaccttttacgaacagccacctctagtgcagcagcaaggcgcaggcagcgaacacatcgaccaccacatacagggtcaaggcctatcaggtcagggtttgtgcgccagagcactgtacgactatcaagcagctgatgacactgagatttcattcgaccctgaaaacctgattacaggaattgaggtgatcgatgaaggatggtggagaggctatggaccagatggacattttggcatgtttcccgctaattacgttgagctgatagaatag

SEQ ID NO: 43876 - DNA, 2068 bp, Artificial Sequence
  derived and/or modified sequence
agcggcgcggagactgcggggcgggccatggcggcgaacctgagccggaacgggccagcgctgcaagaggcctacgtgcgggtggtcaccgagaagtccccgaccgactgggctctctttacctatgaaggcaacagcaatgacatccgcgtggctggcacaggggagggtggcctggaggagatggtggaggagctcaacagcgggaaggtgatgtacgccttctgcagagtgaaggaccccaactctggactgcccaaatttgtcctcatcaactggacaggcgagggcgtgaacgatgtgcggaagggagcctgtgccagccacgtcagcaccatggccagcttcctgaagggggcccatgtgaccatcaacgcacgggccgaggaggatgtggagcctgagtgcatcatggagaaggtggccaaggcttcaggtgccaactacagctttcacaaggagagtggccgcttccaggacgtgggaccccaggccccagtgggctctgtgtaccagaagaccaatgccgtgtctgagattaaaagggttggtaaagacagcttctgggccaaagcagagaaggaggaggagaaccgtcggctggaggaaaagcggcgggccgaggaggcacagcggcagctggagcaggagcgccgggagcgtgagctgcgtgaggctgcacgccgggagcagcgctatcaggagcagggtggcgaggccagcccccagagcaggacgtgggagcagcagcaagaagtggtttcaaggaaccgaaatgagcaggggtcaacatgtgcttccctccaggagtctgccgtgcacccgagggagattttcaagcagaaggagagggccatgtccaccacctccatctccagtcctcagcctggcaagctgaggagccccttcctgcagaagcagctcacccaaccagagacccactttggcagagagccagctgctgccatctcaaggcccagggcagatctccctgctgaggagccggcgcccagcactcctccatgtctggtgcaggcagaagaggaggctgtgtatgaggaacctccagagcaggagaccttctacgagcagcccccactggtgcagcagcaaggtgctggctctgagcacattgaccaccacattcagggccaggggctcagtgggcaagggctctgtgcccgtgccctgtacgactaccaggcagccgacgacacagagatctcctttgaccccgagaacctcatcacgggcatcgaggtgatcgacgaaggctggtggcgtggctatgggccggatggccattttggcatgttccctgccaactacgtggagctcattgagtgaggctgagggcacatcttgcccttcccctctcagacatggcttccttattgctggaagaggaggcctgggagttgacattcagcactcttccaggaataggacccccagtgaggatgaggcctcagggctccctccggcttggcagactcagcctgtcaccccaaatgcagcaatggcctggtgattcccacacatccttcctgcatcccccgaccctcccagacagcttggctcttgcccctgacaggatactgagccaagccctgcctgtggccaagccctgagtggccactgccaagctgcggggaagggtcctgagcaggggcatctgggaggctctggctgccttctgcatttatttgccttttttctttttctcttgcttctaaggggtggtggccaccactgtttagaatgacccttgggaacagtgaacgtagagaattgtttttagcagagtttgtgaccaaagtcagagtggatcatggtggtttggcagcagggaatttgtcttgttggagcctgctctgtgctccccactccatttctctgtccctctgcctgggctatgggaagtggggatgcagatggccaagctcccaccctgggtattcaaaaacggcagacacaacatgttcctccacgcggctcactcgatgcctgcaggccccagtgtgtgcctcaactgattctgacttcaggaaaagtaacacagagtggc

SEQ ID NO: 43877 - DNA, 1098 bp, Artificial Sequence
  derived and/or modified sequence
atgatcctggccagcgtgctgagaagcggccccggcggcggcctgcccctgagacccctgctgggccccgccctggccctgagagccagaagcaccagcgccaccgacacccaccacgtggagatggccagagagagaagcaagaccgtgaccagcttctacaaccagagcgccatcgacgccgccgccgagaagcccagcgtgagactgacccccaccatgatgctgtacgccggcagaagccaggacggcagccacctgctgaagagcgccagatacctgcagcaggagctgcccgtgagaatcgcccacagaatcaagggcttcagatgcctgcccttcatcatcggctgcaaccccaccatcctgcacgtgcacgagctgtacatcagagccttccagaagctgaccgacttcccccccatcaaggaccaggccgacgaggcccagtactgccagctggtgagacagctgctggacgaccacaaggacgtggtgaccctgctggccgagggcctgagagagagcagaaagcacatcgaggacgagaagctggtgagatacttcctggacaagaccctgaccagcagactgggcatcagaatgctggccacccaccacctggccctgcacgaggacaagcccgacttcgtgggcatcatctgcaccagactgagccccaagaagatcatcgagaagtgggtggacttcgccagaagactgtgcgagcacaagtacggcaacgcccccagagtgagaatcaacggccacgtggccgccagattccccttcatccccatgcccctggactacatcctgcccgagctgctgaagaacgccatgagagccaccatggagagccacctggacaccccctacaacgtgcccgacgtggtgatcaccatcgccaacaacgacgtggacctgatcatcagaatcagcgacagaggcggcggcatcgcccacaaggacctggacagagtgatggactaccacttcaccaccgccgaggccagcacccaggaccccagaatcagccccctgttcggccacctggacatgcacagcggcgcccagagcggccccatgcacggctag

SEQ ID NO: 43878 - DNA, 1098 bp, Artificial Sequence
  derived and/or modified sequence
atgatcctagctagcgtgctaaggtccggccccgggggaggcttaccgctcaggcctctgctcgggcctgctcttgcccttagggcccgctcaacctcggccacagacacacaccacgtggagatggctcgcgaacgttccaaaacggtgacatctttttataatcaaagcgctatcgatgcagctgctgagaaaccgagcgtgagactgactcctaccatgatgctatacgcgggccgctctcaggatgggagccatctgttgaagtcagctcgttatctgcagcaagaactgcccgtccgcattgcccaccgtataaaaggcttccgctgccttccatttattatcggttgtaatcctacaattctgcatgtccatgaactgtatatcagagccttccagaagctgactgattttccgcccattaaggatcaagcagatgaagctcagtattgtcagctagtgcgccagctgctggacgaccacaaggacgtagtgacattactcgcagaaggcctgcgcgagtctaggaagcacattgaagatgaaaaactggtcaggtactttctggacaaaactcttacctcaagattaggaatcagaatgctggctactcatcatctggccctgcacgaggacaaacctgattttgtcggtatcatctgcacccgcctgtccccaaaaaagataatagagaagtgggtagattttgcccggagactttgcgagcataaatacgggaacgctccccgggtgcgcatcaacggacacgtagccgccagatttccttttatacccatgccattagactacattttgcccgagctcttgaaaaatgctatgcgggctactatggagagtcacctggacacgccatataatgtgcccgatgtagtcattaccattgcgaacaatgatgtagatctgatcatcaggatctctgaccgaggcggtggcatcgctcacaaggaccttgaccgagtgatggactatcactttaccaccgccgaagcctccactcaggacccgcgtattagccccctgtttgggcatctggacatgcatagtggcgcccagtctgggcccatgcacggctag

SEQ ID NO: 43879 - DNA, 1098 bp, Artificial Sequence
  derived and/or modified sequence
atgatcctggcctctgtgctgcggagcggccctgggggcggcctgcccctgcggcccctgctgggccctgccctggccctgcgggcccggagcaccagcgccacagacacccaccacgtggagatggcccgggagaggagcaagacagtgaccagcttctacaaccagagcgccattgatgctgctgctgagaagcccagcgtgcggctgacccccaccatgatgctgtatgccggccgcagccaggacggcagccacctgctgaagagcgcccgctacctgcagcaggagctgcctgtgcgcatcgcccaccgcatcaagggcttccgctgcctgcccttcatcatcggctgcaaccccaccatcctgcacgtgcatgagctgtacatccgggccttccagaagctgacagacttcccccccatcaaggaccaggctgatgaggcccagtactgccagctggtgcggcagctgctggatgaccacaaggatgtggtgaccctgctggccgagggcctgcgggagagcaggaagcacattgaagatgagaagctggtgcgctacttcctggacaagaccctgaccagccggctgggcatccgcatgctggccacccaccacctggccctgcacgaggacaagccagactttgtgggcatcatctgcacccggctgagccccaagaagatcatcgagaagtgggtggactttgcccggcggctgtgtgagcacaagtatggaaatgccccccgggtgcgcatcaatggacatgtggccgcccgcttccccttcatccccatgcccctggactacatcctgcctgagctgctgaagaatgccatgagggccaccatggagagccacctggacaccccctacaacgtgcctgatgtggtgatcaccatcgccaacaatgatgtggacctgatcatccgcatcagtgacagaggaggcggcatcgcccacaaggacctggacagagtgatggactaccacttcaccacagctgaggccagcacccaggacccccgcatcagccccctgtttggccacctggacatgcacagcggggcccagagcggccccatgcacggctag

SEQ ID NO: 43880 - DNA, 1098 bp, Artificial Sequence
  derived and/or modified sequence
atgatcctggccagcgtgctgcggagcggccccggcggcggcctgcccctgcgtcctctcctcgggcccgcattggctttgagggcgcgatcaactagcgccaccgatactcaccatgtggagatggcaagggaacggagcaagaccgtgacctcattttacaatcaaagtgctattgatgcagcggctgaaaaaccaagcgtgaggctaacaccgactatgatgctgtacgctggccgatcccaggacggctcccatctcctgaaaagcgcccggtacttgcagcaagagctgcctgtgagaatcgctcatcggattaaggggttcagatgtctacctttcatcatcggctgtaaccccactattctccacgtgcatgagctgtacatccgtgcattccagaaactgaccgacttcccaccaatcaaagatcaagccgacgaagctcaatattgccagctcgtgagacaactcctggacgatcataaggacgttgtgaccctgctggcagagggattacgagaatcaagaaagcacattgaggacgagaaactggttaggtacttcctggataagaccctgaccagccggctgggcattcggatgttagccactcaccatctcgcacttcatgaggacaaaccagactttgtgggcatcatatgcacccgcctgtctccaaaaaagataatcgagaagtgggtggactttgccagacgactctgcgaacataaatacgggaatgccccccgtgtgcgtattaatgggcacgtggctgcccgttttccatttatcccaatgcctttagattacatattacccgagctcctcaagaacgcgatgcgggctacgatggaaagccatcttgacacgccttacaatgtgcctgatgtagtcatcacaattgctaataacgatgtagacctaatcatccggatcagcgacagaggtggtgggatcgcgcacaaagatttggaccgcgttatggattaccacttcaccaccgccgaagcaagcacccaagatcccagaatctctccccttttcgggcacctggacatgcactcaggagcacaatctggccctatgcacggctag

SEQ ID NO: 43881 - DNA, 1098 bp, Artificial Sequence
  derived and/or modified sequence
atgatactggcaagcgtcctgcgctctgggccagggggaggccttcccctgcgcccactgctcgggcctgcgctggcactacgggctcggtccacatccgcaacggatactcatcatgtcgagatggccagagagcgttcaaagacggtcacaagcttttataatcagtccgccattgacgcggcagccgagaagccaagtgtgcggctgacacctactatgatgctgtacgcaggcagatcccaagacgggagtcacttactcaaatctgctaggtacctgcagcaggagctgcccgtacgcatcgcacaccgtattaaaggtttcagatgcctcccttttatcattggctgcaaccccacaattctgcacgtgcacgagctttacatccgagctttccaaaagctgaccgatttcccgcctattaaggatcaagcagacgaggcgcagtactgtcagctggtgcggcagctactggatgatcataaggacgtggtgaccttactcgctgaaggactcagggagagccgaaagcacatcgaagatgaaaagctcgtgagatacttcctggacaaaacacttacttcccgcctcggaattcgtatgctggcaacccaccacctggcattgcatgaggataagcctgatttcgtcggaatcatttgcacgcggctcagtcctaagaagatcatcgaaaaatgggtggattttgcaaggagactgtgcgagcataagtacggcaacgcgccaagagtgcgtattaacggccacgtagctgcacggttcccgtttatccccatgccgttggactatatattgcccgaacttctaaaaaacgctatgcgcgctactatggaaagtcacctggacacaccctacaatgtccctgatgtggtcatcaccattgctaataatgatgtcgacctcattatacgcatttcggatcgcggtggcggaatcgcccacaaggacctggacagagtaatggattaccatttcaccaccgccgaagccagtacgcaggacccaaggattagcccgctgttcggacatcttgatatgcactcaggtgcccagtccggccctatgcacgggtag

SEQ ID NO: 43882 - protein, 849 aa, Artificial Sequence
  derived and/or modified sequence
MSDTRRRVKVYTLNEDRQWDDRGTGHVSSTYVEELKGMSLLVRAESDGSLLLESKINPNTAYQKQQDTLIVWSEAENYDLALSFQEKAGCDEIWEKICQVQGKDPSVEVTQDLIDESEEERFEEMPETSHLIDLPTCELNKLEEIADLVTSVLSSPIRREKLALALENEGYIKKLLQLFQACENLENTEGLHHLYEIIRGILFLNKATLFEVMFSDECIMDVVGCLEYDPALAQPKRHREFLTKTAKFKEVIPITDSELRQKIHQTYRVQYIQDIILPTPSVFEENFLSTLTSFIFFNKVEIVSMLQEDEKFLSEVFAQLTDEATDDDKRRELVNFFKEFCAFSQTLQPQNRDAFFKTLAKLGILPALEIVMGMDDLQVRSAATDIFSYLVEFSPSMVREFVMQEAQQSDDDILLINVVIEQMICDTDPELGGAVQLMGLLRTLIDPENMLATTNKTEKSEFLNFFYNHCMHVLTAPLLTNTSEDKCEKDFFLKHYRYSWSFICTPSHSHSHSTPSSSISQDNIVGSNKNNTICPDNYQTAQLLALILELLTFCVEHHTYHIKNYIMNKDLLRRVLVLMNSKHTFLALCALRFMRRIIGLKDEFYNRYITKGNLFEPVINALLDNGTRYNLLNSAVIELFEFIRVEDIKSLTAHIVENFYKALESIEYVQTFKGLKTKYEQEKDRQNQKLNSVPSILRSNRFRRDAKALEEDEEMWFNEDEEEEGKAVVAPVEKPKPEDDFPDNYEKFMETKKAKESEDKENLPKRTSPGGFKFTFSHSASAANGTNSKSVVAQIPPATSNGSSSKTTNLPTSVTATKGSLVGLVDYPDDEEEDEEEESSPRKRPRLGS

SEQ ID NO: 43883 - DNA, 2550 bp, Artificial Sequence
  derived and/or modified sequence
atgagcgacaccagaagaagagtgaaggtgtacaccctgaacgaggacagacagtgggacgacagaggcaccggccacgtgagcagcacctacgtggaggagctgaagggcatgagcctgctggtgagagccgagagcgacggcagcctgctgctggagagcaagatcaaccccaacaccgcctaccagaagcagcaggacaccctgatcgtgtggagcgaggccgagaactacgacctggccctgagcttccaggagaaggccggctgcgacgagatctgggagaagatctgccaggtgcagggcaaggaccccagcgtggaggtgacccaggacctgatcgacgagagcgaggaggagagattcgaggagatgcccgagaccagccacctgatcgacctgcccacctgcgagctgaacaagctggaggagatcgccgacctggtgaccagcgtgctgagcagccccatcagaagagagaagctggccctggccctggagaacgagggctacatcaagaagctgctgcagctgttccaggcctgcgagaacctggagaacaccgagggcctgcaccacctgtacgagatcatcagaggcatcctgttcctgaacaaggccaccctgttcgaggtgatgttcagcgacgagtgcatcatggacgtggtgggctgcctggagtacgaccccgccctggcccagcccaagagacacagagagttcctgaccaagaccgccaagttcaaggaggtgatccccatcaccgacagcgagctgagacagaagatccaccagacctacagagtgcagtacatccaggacatcatcctgcccacccccagcgtgttcgaggagaacttcctgagcaccctgaccagcttcatcttcttcaacaaggtggagatcgtgagcatgctgcaggaggacgagaagttcctgagcgaggtgttcgcccagctgaccgacgaggccaccgacgacgacaagagaagagagctggtgaacttcttcaaggagttctgcgccttcagccagaccctgcagccccagaacagagacgccttcttcaagaccctggccaagctgggcatcctgcccgccctggagatcgtgatgggcatggacgacctgcaggtgagaagcgccgccaccgacatcttcagctacctggtggagttcagccccagcatggtgagagagttcgtgatgcaggaggcccagcagagcgacgacgacatcctgctgatcaacgtggtgatcgagcagatgatctgcgacaccgaccccgagctgggcggcgccgtgcagctgatgggcctgctgagaaccctgatcgaccccgagaacatgctggccaccaccaacaagaccgagaagagcgagttcctgaacttcttctacaaccactgcatgcacgtgctgaccgcccccctgctgaccaacaccagcgaggacaagtgcgagaaggacttcttcctgaagcactacagatacagctggagcttcatctgcacccccagccacagccacagccacagcacccccagcagcagcatcagccaggacaacatcgtgggcagcaacaagaacaacaccatctgccccgacaactaccagaccgcccagctgctggccctgatcctggagctgctgaccttctgcgtggagcaccacacctaccacatcaagaactacatcatgaacaaggacctgctgagaagagtgctggtgctgatgaacagcaagcacaccttcctggccctgtgcgccctgagattcatgagaagaatcatcggcctgaaggacgagttctacaacagatacatcaccaagggcaacctgttcgagcccgtgatcaacgccctgctggacaacggcaccagatacaacctgctgaacagcgccgtgatcgagctgttcgagttcatcagagtggaggacatcaagagcctgaccgcccacatcgtggagaacttctacaaggccctggagagcatcgagtacgtgcagaccttcaagggcctgaagaccaagtacgagcaggagaaggacagacagaaccagaagctgaacagcgtgcccagcatcctgagaagcaacagattcagaagagacgccaaggccctggaggaggacgaggagatgtggttcaacgaggacgaggaggaggagggcaaggccgtggtggcccccgtggagaagcccaagcccgaggacgacttccccgacaactacgagaagttcatggagaccaagaaggccaaggagagcgaggacaaggagaacctgcccaagagaaccagccccggcggcttcaagttcaccttcagccacagcgccagcgccgccaacggcaccaacagcaagagcgtggtggcccagatcccccccgccaccagcaacggcagcagcagcaagaccaccaacctgcccaccagcgtgaccgccaccaagggcagcctggtgggcctggtggactaccccgacgacgaggaggaggacgaggaggaggagagcagccccagaaagagacccagactgggcagctag

SEQ ID NO: 43884 - DNA, 4384 bp, Artificial Sequence
  derived and/or modified sequence
ggcggatctgtagtagttaccgcggcggcgggagagcaagcgagccctggggggcaaagagacgggagagtgggtgtatgcgcgggtgaagtgagaggtaacggggctccgggcggagaggcctcagtggctcttgtcaccccttctcgcggctgaacctttggagccatggtgaattcgggcctctccgaagccgccgccgccgccaccgccactactgcctttaccgtctcctaagagtgaggagcgcggacgaggtaagcgaggaggcggcggctagagcggtggagacagcagccaccatgtcggatacgcggcggcgagtgaaggtctataccctgaacgaagaccggcaatgggacgaccgaggcaccgggcacgtctcctccacttacgtggaggagctcaaggggatgtcgctgctggttcgggcagagtccgacggatcactactcttggaatcaaagataaatccaaatactgcatatcagaaacaacaggatacattaattgtttggtcagaagcagagaactatgatttggctctgagttttcaggagaaagctggctgtgatgagatctgggaaaaaatttgtcaggttcaaggtaaagacccatcagtggaagtcacacaggacctcattgatgaatctgaagaagaacgatttgaagaaatgcctgaaactagtcatctgattgacctgcccacatgtgaactcaataaacttgaagagattgctgacttagttacctcagtgctctcctcacctatccgtagggaaaagctggctctcgccttggaaaatgaaggctatattaaaaaactattgcagctgttccaagcttgcgagaacctagaaaacactgaaggcttacaccatttgtatgaaattattagaggaatcttattcctaaataaggcaactctttttgaggtaatgttttctgatgagtgtatcatggatgtcgtgggatgccttgaatatgaccctgctttggctcagccaaaaagacatagagaattcttgaccaaaactgcaaagttcaaggaagttataccaataacagactctgaactaaggcaaaaaatacatcagacttacagggtacagtacattcaggacatcattttgcccacaccatctgtttttgaagagaattttctttctactcttacgtcttttattttcttcaacaaagttgagatagtcagcatgttgcaggaagatgagaagtttttgtctgaagtttttgcacaattaacagatgaggctacagatgatgataaacggcgtgaattggttaattttttcaaggagttttgtgcattttctcagacattacaacctcaaaacagggatgcatttttcaaaacattggcaaaattgggaattcttcctgctcttgaaattgtaatgggcatggatgatttgcaagtcagatcagctgctacagatatattttcttatctagtagaatttagtccatctatggtccgagagtttgtaatgcaagaagctcagcagagtgatgacgatattcttcttattaatgtggtaattgaacaaatgatctgtgatactgatcctgagctaggaggcgctgttcagttaatgggacttcttcgtactctaattgatccagagaacatgctggctacaactaataaaaccgaaaaaagtgaatttctaaattttttctacaaccattgtatgcatgttctcacagcaccacttttgaccaatacttcagaagacaaatgtgaaaaggatttttttttaaaacattacagatatagttggagtttcatatgtaccccttcacattcccattcccattctaccccctcttcctccatctctcaagataatatagttggatcaaacaaaaacaacacaatttgtcccgataattatcaaacagcacagctacttgccttaattttagagttactcacattttgtgtggaacatcacacatatcacataaaaaactatattatgaacaaggacttgctaagaagagtcttggtcttgatgaattcaaagcacacttttctggccttgtgtgcccttcgctttatgaggcggataattggacttaaagatgaattttataatcgttacatcaccaagggaaatctttttgagccagttataaatgcacttctggataatggaactcggtataatctgttgaattcagctgttattgagttgtttgaatttataagagtggaagatatcaagtctcttactgcccatatagttgaaaacttttataaagcacttgaatcgattgaatatgttcagacattcaaaggattgaagactaaatatgagcaagaaaaagacagacaaaatcagaaactgaacagtgtaccatctatattgcgtagtaacagatttcgcagagatgcaaaagccttggaagaggatgaagaaatgtggtttaatgaagatgaagaagaggaaggaaaagcagttgtggcaccagtggaaaaacctaagccagaagatgattttccagataattatgaaaagtttatggagactaaaaaagcaaaagaaagtgaagacaaggaaaaccttcccaaaaggacatctcctggtggcttcaaatttactttctcccactctgccagtgctgctaatggaacaaacagtaaatctgtagtggctcagataccaccagcaacttctaatggatcctcttccaaaaccacaaacttgcctacgtcagtaacagccaccaagggaagtttggttggcttagtggattatccagatgatgaagaggaagatgaagaagaagaatcgtcccccaggaaaagacctcgtcttggctcataaaatatttattaggggaccctcaacatgtggtcttacaatgctgcaactgttcagtgagctgaaaatctgaatcagaaagctttctcaattgaacttataaaatatacaaggagtagcaaaagacagtatatcagctaagagagtttagttctaataaaaatcaggcttcccaggaacttgattgcttgctagtaattaaggggtttgccttttaggctgtcaaaacaaacattagtaaccagaacctgggagacagcttctcagcaaggaaaagtcacaggtttggggacggtttaggggaggggaaaaggttgatataataatgcagggttgctcctcggggtgtcgatctagaaacaattttacagaacttcagttgtaaactcaataacattacttgtataatggtgctggccatgttgttgttttaatcagttgcctctttttaaaagaaatttttatggaaaacacattcaactatcattaaaaaaatgaagttaagctgttgggaccatttctttaagatttaacaaaagttcagccttttaggtagttgaagggaagtacaccccgtattcagcacatgttgagttttctacaccaggaattttcaatatgtatattgatgaaaacaagctcaattcaaactggacagttttaagataatgttaaaatcagcacttttagagacaacgaaggccaagaatcagtacagtagtattccaaaatgattttctctagaaatttgaaagtagatcgaacagaatgttgtcaaccgcctaccagtacaatcttttgtggaagatactttgaaatcactttctactttgttagtaaagttctgtctttccagagctgcaagttttaaagtgttacttatacagaccaaccaagaatagtgctgaattaagtggcatttagtatctagaagccattttgatccaagaagctacttaagtgtcaaagtcagcatgcagcacatgtagcttttctgtaaacaagggtgtgatatgaaagctgcttttttaagaagagtaaaagcacattccatatacgtaagtgaattttaaaaataaattgaggcaaacagttaagttttatttttagagcaacaagttaactgtaaatattttaatgttagtttgctcatctatgatctgagatcatgccgaagtgagaaaaatctccccaaaatacaatttaatgcattgggaaaaaaaaactttaacagtaattccagccacaatctttagatcacccttgtaatgtgttacgggtccatttttcctggaatcgtttaatctaaagcagtttcccctgttttggagattttgtagttaattttaattttggctattgtttggaaaagatgagctgtctgtgtagatatgaagtatagttttttccataaaacagatgtttattttgtattaaaaaataccactgtacttgttttacaccatttgtatacatgtggtgatattaatgctaaactgtaaaattcaggaattaaaatgtgaccctgtaattcc

SEQ ID NO: 43885 - DNA, 2550 bp, Artificial Sequence
  derived and/or modified sequence
atgtccgacacccgacggcgcgttaaggtttacaccctcaacgaagacagacaatgggatgaccgtggaaccggacatgtgagttctacttacgtggaagagctgaaaggtatgtcattgcttgtaagagcggaaagcgatggctctcttctcctggagtctaagattaacccgaatactgcctaccagaaacaacaggacaccctgatcgtttggtccgaggcagaaaattatgatctcgcactgtctttccaggaaaaagccggctgcgatgagatatgggaaaaaatctgccaggtgcaggggaaggacccctctgtggaagtcacgcaggacctcatcgatgaaagtgaagaggagcgctttgaagaaatgcccgagacaagccacttgattgacttgccaacgtgcgaacttaacaaactggaggaaattgccgatttagtgactagtgtgctgtcttcacccattaggagggagaagctggccctggccctcgaaaacgagggctatataaagaagctgctccagctatttcaggcctgtgaaaacctggagaataccgagggccttcatcacttatacgaaattataaggggcatcctgtttctaaacaaagcaacgctttttgaggtgatgtttagcgacgaatgtattatggacgtggtgggttgcctcgaatacgatcctgctcttgctcagccaaagaggcatcgtgagttccttacaaagaccgccaaatttaaggaagtgatccccatcaccgacagcgaactaaggcaaaagattcaccagacatacagagtgcagtatatccaagatatcatcctccctacaccatcagttttcgaagaaaatttcctgtctacgctcacaagctttatcttttttaataaagtggagatcgttagcatgctacaggaagatgaaaagtttttgtccgaggtgttcgcgcagctcacagatgaagccacagacgatgataaacgtagggagttagtcaatttcttcaaagagttctgcgctttttctcagaccttgcagcctcagaatcgcgatgccttctttaagactttggcaaaacttggtatccttcctgcgctggagatagtaatgggcatggacgacctgcaagtgagaagcgcagccacagatatcttctcatacctggtcgagttttctccctccatggtcagagaattcgtaatgcaggaggcacagcaaagtgacgacgatattttacttatcaatgtcgttatcgagcagatgatttgtgatacagaccccgagttgggaggggctgtccaactcatgggcttactgaggacgttaattgatccagaaaacatgttagccaccacaaataaaacggaaaaaagtgagtttctgaatttcttctacaaccactgtatgcatgtcctgaccgccccgcttctgacgaacacttccgaggataaatgcgagaaggattttttcctgaagcattacagatacagctggagctttatctgtacccctagtcactctcactcacattcgaccccatcctccagcatttctcaggacaatattgtggggagtaacaaaaacaatactatctgtcccgacaactaccaaaccgcccaactgttagctctgatcctcgagctcctgactttctgtgtggagcatcatacgtatcatattaagaactacatcatgaacaaggacctgctgcggagggttctggtccttatgaacagtaaacacacattccttgcgctctgtgctcttcgctttatgagaagaatcatcggccttaaggatgaattttacaatcgctacattacaaagggcaacctttttgaacccgtgatcaacgcattacttgataatggcacccgttacaatctgctcaacagtgcggtcattgaactgtttgaattcatcagagtcgaagacatcaaaagcttgaccgctcatatagtggagaacttttataaagccctcgagagtatcgagtacgtacagaccttcaaggggctgaagaccaagtacgaacaagagaaggataggcagaatcagaagcttaattccgtaccaagcattctgcggtccaatcgatttcggcgagatgcaaaagccctggaagaggatgaagaaatgtggtttaacgaagacgaggaggaggaggggaaagccgtggtggcaccagtggagaagcctaagcctgaggatgacttccctgacaattatgaaaaattcatggaaactaaaaaggctaaagagtctgaggacaaggagaacctacctaagcggacgagccccggaggcttcaaatttacattttcgcattcagcttcagctgccaacgggaccaacagtaaatcagtagtcgcacaaattccccctgccacttcaaatgggtcatcttccaaaacaactaatctaccaacctccgtgaccgcaaccaaaggctccctcgtgggattggtggattacccagatgatgaggaggaagacgaagaagaagaatctagtccccgcaaaaggccacgactcgggtcttag

SEQ ID NO: 43886 - DNA, 2550 bp, Artificial Sequence
  derived and/or modified sequence
atgtctgacacccggcggcgggtgaaggtgtacaccctgaatgaagatcggcagtgggatgaccggggcaccggccacgtgagcagcacctacgtggaggagctgaagggcatgagcctgctggtgcgggcagagagtgatggcagcctgctgctggagagcaagatcaaccccaacacagcctaccagaagcagcaggacaccctcatcgtgtggagcgaggccgagaactatgacctggccctgtccttccaggagaaggccggctgtgatgagatctgggagaagatctgccaggtgcagggcaaggaccccagcgtggaggtgacccaggacctgattgatgaaagtgaggaggagagatttgaggagatgcctgagaccagccacctgattgacctgcccacctgtgagctgaacaagctggaggagattgctgacctggtgacctctgtgctgagcagccccatccggcgggagaagctggccctggccctggagaatgaaggctacatcaagaagctgctgcagctgttccaggcctgtgagaacctggagaacacagagggcctgcaccacctgtatgagatcatccggggcatcctcttcctgaacaaggccaccctgtttgaggtgatgttcagtgatgagtgcatcatggatgtggtgggctgcctggagtatgaccctgccctggcccagcccaagaggcaccgggagttcctgaccaagacagccaagttcaaggaggtgatccccatcacagattctgagctgcggcagaagatccaccagacctacagagtgcagtacatccaggacatcatcctgcccaccccatctgtgtttgaggagaacttcctgagcaccctgaccagcttcatcttcttcaacaaggtggagatcgtgtccatgctgcaggaggatgagaagttcctgtctgaggtgtttgcccagctgacagatgaggccacagatgatgacaagaggcgggagctggtgaacttcttcaaggagttctgtgccttcagccagaccctgcagccccagaacagagatgccttcttcaagaccctggccaagctgggcatcctgcctgccctggagatcgtgatgggcatggatgacctgcaggtgcgctctgctgccacagacatcttctcctacctggtggagttcagccccagcatggtgcgggagtttgtgatgcaggaggcccagcagagtgatgatgacatcctgctgatcaacgtggtgattgagcagatgatctgtgacacagatcctgagctgggcggcgctgtgcagctgatgggcctgctgcggaccctgattgatcctgagaacatgctggccaccaccaacaagacagagaagtctgagttcctgaacttcttctacaaccactgcatgcacgtgctgacagcccccctgctgaccaacaccagcgaggacaagtgtgagaaggacttcttcctgaagcactaccgctacagctggagcttcatctgcacccccagccacagccacagccacagcacccccagcagcagcatcagccaggacaacatcgtgggcagcaacaagaacaacaccatctgcccagacaactaccagacagcccagctgctggccctgatcctggagctgctgaccttctgtgtggagcaccacacctaccacatcaagaactacatcatgaacaaggacctgctgcggcgggtgctggtgctgatgaacagcaagcacaccttcctggccctgtgtgccctgcgcttcatgaggcgcatcatcggcctgaaggatgagttctacaaccgctacatcaccaagggcaacctgtttgagcctgtgatcaatgccctgctggacaatggcacccgctacaacctgctgaacagcgctgtgattgagctgtttgagttcatccgggtggaggacatcaagagcctgacagcccacatcgtggagaacttctacaaggccctggagagcattgaatatgtgcagaccttcaagggcctgaagaccaagtatgagcaggagaaggaccggcagaaccagaagctgaacagcgtgcccagcatcctgcggagcaaccgcttcagaagagatgccaaggccctggaggaggatgaggagatgtggttcaatgaagatgaggaggaggagggcaaggctgtggtggcccctgtggagaagcccaagccagaagatgacttcccagacaactatgagaagttcatggagaccaagaaggccaaggagagcgaggacaaggagaacctgcccaagaggaccagccctgggggcttcaagttcaccttcagccacagcgccagcgctgccaacggcaccaacagcaagtctgtggtggcccagatccccccagccaccagcaatggcagcagcagcaagaccaccaacctgcccacctctgtgacagccaccaagggcagcctggtgggcctggtggactacccagatgatgaggaggaggatgaggaggaggagagcagccccaggaagaggccccggctgggcagctag

SEQ ID NO: 43887 - DNA, 2550 bp, Artificial Sequence
  derived and/or modified sequence
atgagcgacacccggcggcgggtgaaggtgtacaccctgaacgaggacagacagtgggacgaccgggggacggggcacgtgagttcaacctacgtggaagagctcaaagggatgtccctgttagtgcgcgccgaatctgacggtagtctgctcctagaatcgaagatcaaccccaacacagcctatcagaaacaacaggacacgctgatcgtctggtctgaagctgagaactacgatctggccctgtcttttcaggagaaggctggttgcgatgagatatgggaaaagatatgccaggtgcaaggcaaggacccctcagtggaagtgacccaggacctgatcgatgaatctgaagaggagcgctttgaagagatgccagaaacctctcacctcatcgatctgcccacgtgtgaactgaacaaacttgaagagattgctgatcttgttacttcggtgttatccagccctatacggagagaaaaactggcattagcattggaaaatgagggttatataaaaaagctgctccagctgtttcaggcatgcgaaaacctcgagaacaccgagggactccaccatttgtatgagatcatccgcggcattctgttcctgaacaaagccaccctctttgaagtaatgtttagtgacgaatgcataatggacgttgtaggctgccttgagtacgatccagccttagcccagcccaaacgccaccgcgagtttctcactaagaccgccaaatttaaagaagtgattcccattactgatagtgaactgaggcagaagatccatcagacctacagggtccagtacatccaggatatcattctgcctactcctagtgtcttcgaagagaattttttaagcacgcttacttcctttattttcttcaacaaggttgagatcgttagcatgctgcaggaagacgaaaaatttctgtctgaagtgttcgctcagttgactgatgaggccaccgacgatgacaaacgacgggagttagtgaacttctttaaagagttttgcgcattttctcagaccctccagccccaaaacagagacgcgttctttaagacactcgctaagcttggaatcctcccagccctggaaatagttatgggcatggacgacctccaggtgcgatccgctgctaccgatattttttcctacctggtggagttctctccttctatggtgagggagttcgttatgcaggaggcacaacagtctgatgacgacattctgctcattaacgtcgtcattgagcagatgatctgtgacaccgatcccgaactcggcggggcggttcaactcatgggactgctgagaaccctgatcgacccagagaatatgctggctacaacaaataaaaccgaaaagtccgaattcctgaactttttttacaatcattgcatgcatgtgctcactgctcccctcctgaccaatacttccgaggataagtgtgaaaaggactttttcttgaagcactacagatacagctggtcgtttatatgtactccctcgcactcccactctcatagtactccctcctcatcaatttctcaggataatatcgtaggatcgaataaaaacaacaccatctgccccgacaactatcagaccgcccagctgttggctcttatactggaactcctaacattttgtgtggagcatcatacttaccacatcaagaattacattatgaataaggacctgctaagacgggtgctggtgctaatgaattcgaagcatacattcctcgcattgtgcgctctcagattcatgaggcgcatcattggactgaaggacgaattctacaacagatacatcaccaaaggtaacttgttcgaaccagtaataaacgcccttctggacaatgggactaggtacaatttgctaaattctgccgtgattgaactgttcgaattcattagagtggaggacatcaagtctctgaccgcccacatcgtcgaaaacttttacaaagctctggaatccattgaatatgtccagacctttaagggcctcaagacaaaatacgagcaagaaaaggatagacagaaccaaaaactgaatagcgtgccgtcaatccttaggtctaacaggttcaggcgagatgctaaggccctcgaagaggacgaggagatgtggtttaacgaggacgaggaagaggagggtaaagccgtggttgcccctgtggagaaaccaaaacctgaggatgattttcccgataactacgaaaagttcatggaaactaagaaagctaaagaaagcgaggacaaagaaaatttacctaagagaaccagcccagggggcttcaaattcactttctcccactccgcttctgcggccaatggaacgaatagtaaatcggttgtggcgcagatccctcctgccacaagcaacggctcctcgagtaagacaactaatctacccacgtctgtaactgctaccaagggttcactggtcgggttggtggattatcccgatgacgaggaagaggatgaggaggaagaaagttccccacggaaaaggccgagacttgggagctag

SEQ ID NO: 43888 - DNA, 2550 bp, Artificial Sequence
  derived and/or modified sequence
atgtctgatactaggagaagagtaaaggtgtatacattaaatgaagacaggcagtgggatgataggggcaccggacacgtgtccagcacatacgtggaggagctgaagggaatgtctctgttggtgagggccgaatccgacggatccctgctgcttgagtcgaaaatcaacccaaataccgcatatcagaaacagcaggatacccttattgtgtggagcgaggccgagaattacgacctggcactgagctttcaggaaaaggccggttgtgatgagatatgggagaaaatctgtcaggtacagggcaaagatccctcagtcgaggtcactcaggatctgatcgatgaaagcgaggaggaaaggttcgaggaaatgcctgagacttcccatctgatcgacctacccacatgcgaacttaacaagcttgaagaaattgcagatctcgtaacaagtgtgctcagtagccccatacggcgagagaaactcgcgcttgccctggagaacgagggatacatcaagaaactgctgcagctgtttcaggcctgcgaaaacttggaaaatacagaaggtctccaccatttatatgagataatccgcggaatcctgttcctcaacaaggcaaccctcttcgaggtgatgttctccgacgagtgtatcatggatgtggtggggtgcctggaatacgacccagcactggcgcagcccaaacgacatagagagttcctgaccaaaactgctaagtttaaagaagtcattccgataacggacagcgaattgcgacagaagattcatcaaacgtacagagtgcagtacattcaggacatcattctgcccactccttccgtgtttgaagaaaattttctgagtactcttacatcttttattttttttaacaaagtagagatcgtttctatgctccaagaggacgagaagtttctgtccgaagtgtttgctcagctgacagacgaggctacggacgatgacaagagaagagagttagtcaattttttcaaagagttttgcgcgttttcgcaaacactgcaaccccagaatcgagatgcgttcttcaaaactctcgcaaagctggggatattgccagccctcgaaattgttatggggatggacgacctacaagtgcgcagcgccgctacagacattttttcgtatttggtagaattcagcccaagcatggtccgtgagtttgtaatgcaagaagcccaacagagtgatgacgacatactgctaatcaatgtggtgatcgaacagatgatatgcgacacagatcctgagctggggggagcagtacagctgatgggtctcctccggaccctgatcgaccccgagaatatgctggctacgaccaataagaccgagaaatccgagtttctcaatttcttctacaatcattgcatgcacgtgctcaccgcacctctgctcacgaatactagcgaagataaatgcgagaaggatttttttctcaagcactaccggtacagctggtcctttatttgcacgccatctcattctcactctcattctacaccctcttcctccatcagccaggacaacattgtggggtccaacaaaaataataccatctgtcccgacaattaccagacagctcaactcctggccctgatcctggaactactgacgttctgtgtggaacatcatacataccatattaagaactatataatgaataaggatctcctgcgccgagtgctggtgctgatgaattcaaagcatacttttctggcgttgtgtgcactaaggtttatgcgcaggatcattgggcttaaggatgagttctacaatagatatatcacgaaaggcaatctgtttgaacccgtcatcaatgcacttctcgataatggtacccgctataacttgctgaacagtgccgttattgaactctttgaattcattagggttgaggacattaaatccctaaccgcgcacatcgtcgagaatttttacaaggctttagaatccattgagtatgttcagacgttcaaagggctcaagaccaagtacgaacaggaaaaagaccgacagaaccaaaaactaaatagcgtcccgtcgatccttagaagcaatcggtttaggcgcgacgccaaggcactggaagaggacgaggagatgtggttcaatgaggacgaggaagaagaaggtaaagccgtggtcgcccctgtggaaaagcccaaacctgaggatgactttccagataattatgaaaaatttatggaaacaaagaaggctaaggagtctgaggataaagagaacctgcccaaaagaacatccccaggcggtttcaagttcacattcagtcactccgcttccgcagcgaacggcactaactctaaatccgtcgtggcacagatccctccggctacgtctaacggatcatcaagcaagacaacaaacctgcctacgagtgtgactgcgaccaaaggcagtctggtcggactggttgactacccagacgatgaagaggaagatgaggaggaggagagttcgcccagaaaacgccctcgactcgggtcttag

SEQ ID NO: 43889 - DNA, 81 bp, Artificial Sequence
  derived and/or modified sequence
atggctccaaaaaagttgagttgcctcaggtcgcttctcctgcccctgtccctgacattgctgctcccacaggccgattag

SEQ ID NO: 43890 - protein, 374 aa, Artificial Sequence
  derived and/or modified sequence
MLSTSRSRFIRNTNESGEEVTTFFDYDYGAPCHKFDVKQIGAQLLPPLYSLVFIFGFVGNMLVVLILINCKKLKCLTDIYLLNLAISDLLFLITLPLWAHSAANEWVFGNAMCKLFTGLYHIGYFGGIFFIILLTIDRYLAIVHAVFALKARTVTFGVVTSVITWLVAVFASVPGIIFTKCQKEDSVYVCGPYFPRGWNNFHTIMRNILGLVLPLLIMVICYSGILKTLLRCRNEKKRHRAVRVIFTIMIVYFLFWTPYNIVILLNTFQEFFGLSNCESTSQLDQATQVTETLGMTHCCINPIIYAFVGEKFRSLFHIALGCRIAPLQKPVCGGPGVRPGKNVKVTTQGLLDGRGKGKSIGRAPEASLQDKEGA

SEQ ID NO: 43891 - DNA, 1125 bp, Artificial Sequence
  derived and/or modified sequence
atgctgagcacttcccggtcaaggttcattcgcaatactaatgaatctggcgaggaggtgactaccttcttcgattacgactacggggccccgtgccacaagttcgacgttaaacagattggcgcacagctgcttccccccttatacagcctggtctttatattcggattcgtgggaaacatgctggtggttctgattctgatcaattgtaaaaaactgaaatgcttaacagacatctacctgttgaatttggcaatttcggacctgctgttccttattactctgcccctctgggcccactctgccgccaatgaatgggtgtttggcaatgcaatgtgtaagctgtttacaggcctataccacattgggtacttcggggggatcttttttatcatccttctgactattgatagatatctggcaattgtgcatgccgtgttcgccctcaaggctagaacagtgacgtttggcgtagtgactagcgtgatcacctggctcgtggccgtgtttgctagcgtcccgggaatcatcttcacgaaatgccaaaaagaggacagcgtgtacgtgtgtggcccgtattttccccgaggctggaataacttccacactatcatgcgcaatattttggggctagttctgcccctgctgatcatggtcatctgttacagtggtatacttaagaccctcctccgttgccgcaatgagaagaaaagacatagagcagttagagtgatctttacaatcatgatcgtgtattttctattctggacaccttataatatcgtcatcttacttaataccttccaggagttctttggcctaagcaattgcgaatcaactagtcagttggaccaggccacacaggtcactgagacgctgggtatgacccactgttgcattaaccccatcatatacgcctttgtgggggaaaagttcaggtctttatttcatattgccctgggttgcaggatcgcccccctgcagaaaccagtctgcggtgggcccggagttaggcccggcaaaaatgtgaaggtaacgacacaggggttgctggatggccgcggaaagggtaaaagcatcggtagggctccagaggcttccctgcaggataaggagggggcatag

SEQ ID NO: 43892 - DNA, 1125 bp, Artificial Sequence
  derived and/or modified sequence
atgctctctacctcaagatcccgctttatccggaatacaaatgaaagcggcgaggaagttacaaccttctttgactacgattacggagcaccttgccacaaattcgatgtgaagcagattggcgctcagctcctgcccccgctgtactcgttggtgttcattttcggtttcgtgggaaacatgctggtggtcctaattcttatcaattgtaagaagctcaaatgtctgactgacatctacttactgaacctcgctatctctgatcttctctttctgatcaccctccctctctgggcccatagcgccgctaacgaatgggtgttcgggaacgccatgtgtaaattatttacggggctctaccatatcggctattttggcggcattttcttcattatccttttaacaatagatagatacctggctatcgtacatgccgtattcgctctgaaggcaagaacggttacattcggcgtcgtgacgagcgtcatcacatggctggtggctgttttcgcttccgtgcctggaataatttttactaaatgccagaaggaggattctgtgtacgtgtgcgggccttacttcccaagaggttggaacaacttccacacaatcatgcgaaacatccttgggttggtgttacctctgctcatcatggtcatctgctacagcggtattctgaagacactgcttagatgcagaaatgagaaaaagaggcatagagcagttcgcgtgatatttacaatcatgattgtgtatttcctcttctggaccccctataacatagtgattcttctcaacaccttccaggagttctttgggctctcaaactgtgagtcaactagccagcttgaccaagcaacacaggtcacagagactctaggaatgacccattgctgtattaaccccattatttatgctttcgtcggtgagaagttcagaagcttattccacattgctctcgggtgtcggatcgctcccttgcagaagcccgtctgtggggggcctggcgtcaggcctggcaagaacgtgaaggtgaccacgcaagggctgctcgacgggagaggtaaaggcaagagtattggaagagctccagaagcaagcctgcaagataaagagggggcgtag

SEQ ID NO: 43893 - DNA, 1125 bp, Artificial Sequence
  derived and/or modified sequence
atgctgagcaccagccgcagccgcttcatccggaacaccaatgaaagtggagaggaggtgaccaccttctttgattatgactatggagccccctgccacaagtttgatgtgaagcagatcggggcccagctgctgccccccctgtacagcctggtgttcatctttggatttgtgggcaacatgctggtggtgctgatcctgatcaactgcaagaagctgaagtgcctgacagacatctacctgctgaacctggccatcagtgacctgctcttcctgatcaccctgcccctgtgggcccacagcgctgccaatgagtgggtgtttggaaatgccatgtgcaagctgttcaccggcctgtaccacatcggctactttggaggcatcttcttcatcatcctgctgaccatcgaccgctacctggccatcgtgcatgctgtgtttgccctgaaggccaggacagtgaccttcggcgtggtgaccagcgtcatcacctggctggtggccgtgtttgcctctgtgcccggcatcatcttcaccaagtgccagaaggaggacagcgtgtatgtgtgtggcccctacttcccccggggctggaacaacttccacaccatcatgaggaacatcctgggcctggtgctgcccctgctgatcatggtgatctgctacagcggcatcctgaagaccctgctgcgctgcagaaatgagaagaagaggcacagagctgtgcgggtcatcttcaccatcatgattgtgtacttcctgttctggaccccctacaacatcgtcatcctgctgaacaccttccaggagttcttcggcctgagcaactgtgagagcaccagccagctggaccaggccacccaggtgacagagaccctgggcatgacccactgctgcatcaaccccatcatctatgcctttgtgggggagaagttccgcagcctcttccacatcgccctgggctgccgcatcgcccccctgcagaagcctgtgtgtggcggccctggggtgcggcctgggaagaatgtgaaggtgaccacccagggcctgctggatggccggggcaagggcaagagcatcggccgggcccctgaggccagcctgcaggacaaggagggcgcctag

SEQ ID NO: 43894 - DNA, 1125 bp, Artificial Sequence
  derived and/or modified sequence
atgctgagcaccagccggagccggttcatccggaacaccaacgagagtggagaggaagtaactacattttttgactacgactacggagccccatgccataaatttgacgtgaagcagatcggcgctcagctgctgcctcccctctacagtcttgtctttatcttcggattcgtggggaatatgttggtggttcttatcttgattaactgtaagaagctgaaatgcctgacagatatctatctgctaaacttagcaatcagtgacctgttgttcctaataacgctcccactttgggcccatagtgccgccaatgagtgggtgtttgggaacgccatgtgcaaattattcacaggactgtaccacattgggtatttcggcggaattttctttattatccttctcaccatcgaccgctatctggccattgtgcacgcggtgttcgcccttaaggctcgaacggtgacctttggggtcgtgaccagtgtgatcacttggctggtcgccgttttcgccagcgtgcccggtatcattttcacaaagtgccagaaggaggattctgtgtacgtgtgcggaccttacttcccacgaggttggaacaattttcatacaatcatgcggaatatcttaggtctggtgctgcctctgttaatcatggttatttgttattccggaatccttaagaccctcctccgttgccgcaacgagaagaagaggcatcgggcagtccgagttatatttaccattatgattgtctacttcctgttctggacaccgtataacatcgtgatactgctcaataccttccaggaattttttgggctgtccaattgtgaatccacatctcagctcgaccaggccacacaagtgaccgagaccctgggcatgacccattgctgcattaaccccattatatacgctttcgtcggggaaaaatttaggtccttgttccacattgcattgggctgtaggattgcgcccctacagaagcctgtgtgcgggggtcccggcgttaggccagggaagaacgtgaaggtcacaacacaggggctgttggacggccgcggaaaagggaaatccattggcagagcgcccgaagcgtctttgcaggataaagagggtgcatag

SEQ ID NO: 43895 - DNA, 1125 bp, Artificial Sequence
  derived and/or modified sequence
atgctgagcaccagccggagccggttcatccggaacaccaacgagtcaggggaagaagtgaccaccttcttcgactacgactacggagctccttgccataagtttgacgtgaagcagataggcgcccagctgctgccccccctgtattctctggtgtttatcttcgggttcgttgggaacatgctggtggtcctgattctgattaactgcaagaagctgaagtgtttaactgacatatatttactcaacttagccatctcagatctcctttttctgataactctgcccttgtgggcacattccgctgccaatgagtgggttttcggcaatgccatgtgtaaattgttcactggcctgtatcacattggctacttcggtggtatcttcttcataatcctgctcaccattgaccgctaccttgccatagtccacgcggtgttcgccttgaaagcgcggaccgttacattcggcgtggtaacctccgtgatcacatggcttgtggccgtgttcgccagcgtgccaggaattattttcaccaaatgtcagaaggaagactctgtgtatgtttgcggcccatacttccccagggggtggaacaacttccataccatcatgcgtaacatactgggattggtattgccactgcttattatggtaatttgttactctggaatcctgaaaactcttcttagatgccggaacgagaagaagaggcatagagccgttcgagttattttcacaattatgatagtctatttccttttctggaccccctataacattgttatactcctgaataccttccaagagttttttggcttatctaattgcgaatctacctctcagcttgaccaggcgacacaggttacagagaccctcggcatgacacactgctgtatcaaccccatcatctatgctttcgtgggggagaaattccgaagcctctttcacatcgcactgggctgtagaatagcacccctgcagaaaccagtgtgtggtggcccgggtgtgcgtccaggaaagaatgtcaaagttactactcaagggttgctggatggaaggggcaagggaaagtccataggcagagctcctgaagccagccttcaggataaggagggcgcatag

SEQ ID NO: 43896 - DNA, 1125 bp, Artificial Sequence
  derived and/or modified sequence
atgctgtcaacaagccggtccaggtttattcgcaacaccaacgagtcaggagaagaggtaaccacgttctttgactatgattacggagccccttgccataagttcgacgttaagcaaattggcgcacaactgctgccaccattgtatagcttggtgtttatctttgggttcgtaggaaatatgctcgttgtgctgatcctgatcaattgcaagaaactgaagtgtctgaccgacatctaccttctcaacctagcaattagcgaccttcttttcctgattacactacctttgtgggcacactccgccgctaatgaatgggtgtttgggaatgccatgtgcaaactgttcactggtctgtatcacatcgggtacttcggcggtatcttctttattatcctgctgactatcgataggtacctggccatagtccatgcagtctttgctttaaaagccagaacagtaacattcggtgtggtcacctccgtgataacgtggctagtggccgttttcgcctctgttcccggtattatcttcacaaagtgtcagaaagaggattctgtgtacgtgtgcggtccatacttcccaagaggatggaacaatttccacactatcatgagaaacatcctgggcttggtccttccactgctcataatggtcatctgttattccggtatcctaaagacactactgcgctgcaggaatgagaagaaacggcaccgagcagtcagggtgattttcacaattatgatagtttatttcctgttttggaccccctataacattgttatcttgctgaacacattccaggagttcttcggcctcagcaattgcgagagcactagccagctagatcaggccacacaggtcacagaaactctgggaatgactcactgttgcatcaatcccatcatatacgcttttgttggagagaagttcaggtccctgtttcatattgctctcgggtgccgaatcgcgcctcttcagaaacctgtgtgtggcggacccggtgttcgcccaggcaagaacgtcaaagttacaacgcaaggcctactcgacggcagggggaagggcaaatctattggaagagccccagaagctagcctacaagataaggagggcgcttag

SEQ ID NO: 43897 - DNA, 1125 bp, Artificial Sequence
  derived and/or modified sequence
atgctcagtacttcaagatccaggttcattcgaaatactaatgagtcaggggaggaggttacaactttcttcgattacgactatggcgcaccatgccataagttcgatgtcaagcagattggggctcagcttctgcctccgctgtacagtctagtgtttattttcggatttgtaggtaatatgttggtggtgctgatcctaattaactgcaagaagcttaagtgcctcactgacatctatctcttaaacctggccatctcggatcttctgtttctgataacacttccactctgggctcactctgctgcaaacgagtgggtgtttggcaacgcgatgtgtaaactgttcactggtctgtatcatatcggctacttcgggggaatctttttcatcatcctgctgacaattgaccgctatctggcaatagttcatgctgtattcgcgctcaaggctagaacggtgacttttggggtcgtcactagcgttatcacttggctggttgctgtatttgcatcagttcctggcatcattttcacaaagtgtcaaaaagaagatagcgtctacgtgtgtggaccgtatttccctcggggatggaacaacttccataccattatgagaaacatactcggacttgtgcttcctcttctgatcatggtaatttgttactccggcatcctgaaaaccctgctccgctgccgtaacgagaagaaaagacacagagccgtacgcgtaatctttactatcatgattgtttattttctgttttggactccctacaatatcgtaatcctgctgaatacttttcaagagtttttcggactctctaactgcgagagtacttctcagctggatcaggcaacccaggtgacggaaactctcgggatgactcattgctgtataaaccccattatctatgcattcgtcggcgaaaagttccgctcactgttccatatcgccctgggatgccggatcgcacctctgcagaaaccagtgtgtggcggtccaggcgtacgcccagggaaaaatgtcaaagtcacaactcagggactcttggacggaagggggaagggtaagagcatcggcagggcacctgaagcatcactgcaggataaagaaggtgcgtag

SEQ ID NO: 43898 - DNA, 2671 bp, Artificial Sequence
  derived and/or modified sequence
tttattctctggaacatgaaacattctgttgtgctcatatcatgcaaattatcactagtaggagagcagagagtggaaatgttccaggtataaagacccacaagataaagaagctcagagtcgttagaaacaggagcagatgtacagggtttgcctgactcacactcaaggttgcataagcaagatttcaaaattaatcctattctggagacctcaacccaatgtacaatgttcctgactggaaaagaagaactatatttttctgattttttttttcaaatctttaccattagttgccctgtatctccgccttcactttctgcaggaaactttatttcctacttctgcatgccaagtttctacctctagatctgtttggttcagttgctgagaagcctgacataccaggactgcctgagacaagccacaagctgaacagagaaagtggattgaacaaggacgcatttccccagtacatccacaacatgctgtccacatctcgttctcggtttatcagaaataccaacgagagcggtgaagaagtcaccaccttttttgattatgattacggtgctccctgtcataaatttgacgtgaagcaaattggggcccaactcctgcctccgctctactcgctggtgttcatctttggttttgtgggcaacatgctggtcgtcctcatcttaataaactgcaaaaagctgaagtgcttgactgacatttacctgctcaacctggccatctctgatctgctttttcttattactctcccattgtgggctcactctgctgcaaatgagtgggtctttgggaatgcaatgtgcaaattattcacagggctgtatcacatcggttattttggcggaatcttcttcatcatcctcctgacaatcgatagatacctggctattgtccatgctgtgtttgctttaaaagccaggacggtcacctttggggtggtgacaagtgtgatcacctggttggtggctgtgtttgcttctgtcccaggaatcatctttactaaatgccagaaagaagattctgtttatgtctgtggcccttattttccacgaggatggaataatttccacacaataatgaggaacattttggggctggtcctgccgctgctcatcatggtcatctgctactcgggaatcctgaaaaccctgcttcggtgtcgaaacgagaagaagaggcatagggcagtgagagtcatcttcaccatcatgattgtttactttctcttctggactccctataatattgtcattctcctgaacaccttccaggaattcttcggcctgagtaactgtgaaagcaccagtcaactggaccaagccacgcaggtgacagagactcttgggatgactcactgctgcatcaatcccatcatctatgccttcgttggggagaagttcagaagcctttttcacatagctcttggctgtaggattgccccactccaaaaaccagtgtgtggaggtccaggagtgagaccaggaaagaatgtgaaagtgactacacaaggactcctcgatggtcgtggaaaaggaaagtcaattggcagagcccctgaagccagtcttcaggacaaagaaggagcctagagacagaaatgacagatctctgctttggaaatcacacgtctggcttcacagatgtgtgattcacagtgtgaatcttggtgtctacgttaccaggcaggaaggctgagaggagagagactccagctgggttggaaaacagtattttccaaactaccttccagttcctcatttttgaatacaggcatagagttcagactttttttaaatagtaaaaataaaattaaagctgaaaactgcaacttgtaaatgtggtaaagagttagtttgagttactatcatgtcaaacgtgaaaatgctgtattagtcacagagataattctagctttgagcttaagaattttgagcaggtggtatgtttgggagactgctgagtcaacccaatagttgttgattggcaggagttggaagtgtgtgatctgtgggcacattagcctatgtgcatgcagcatctaagtaatgatgtcgtttgaatcacagtatacgctccatcgctgtcatctcagctggatctccattctctcaggcttgctgccaaaagccttttgtgttttgttttgtatcattatgaagtcatgcgtttaatcacattcgagtgtttcagtgcttcgcagatgtccttgatgctcatattgttccctattttgccagtgggaactcctaaatcaagttggcttctaatcaaagcttttaaaccctattggtaaagaatggaaggtggagaagctccctgaagtaagcaaagactttcctcttagtcgagccaagttaagaatgttcttatgttgcccagtgtgtttctgatctgatgcaagcaagaaacactgggcttctagaaccaggcaacttgggaactagactcccaagctggactatggctctactttcaggccacatggctaaagaaggtttcagaaagaagtggggacagagcagaactttcaccttcatatatttgtatgatcctaatgaatgcataaaatgttaagttgatggtgatgaaatgtaaatactgtttttaacaactatgatttggaaaataaatcaatgctataactatgttg

SEQ ID NO: 43899 - DNA, 2232 bp, Artificial Sequence
  derived and/or modified sequence
ggattgaacaaggacgcatttccccagtacatccacaacatgctgtccacatctcgttctcggtttatcagaaataccaacgagagcggtgaagaagtcaccaccttttttgattatgattacggtgctccctgtcataaatttgacgtgaagcaaattggggcccaactcctgcctccgctctactcgctggtgttcatctttggttttgtgggcaacatgctggtcgtcctcatcttaataaactgcaaaaagctgaagtgcttgactgacatttacctgctcaacctggccatctctgatctgctttttcttattactctcccattgtgggctcactctgctgcaaatgagtgggtctttgggaatgcaatgtgcaaattattcacagggctgtatcacatcggttattttggcggaatcttcttcatcatcctcctgacaatcgatagatacctggctattgtccatgctgtgtttgctttaaaagccaggacggtcacctttggggtggtgacaagtgtgatcacctggttggtggctgtgtttgcttctgtcccaggaatcatctttactaaatgccagaaagaagattctgtttatgtctgtggcccttattttccacgaggatggaataatttccacacaataatgaggaacattttggggctggtcctgccgctgctcatcatggtcatctgctactcgggaatcctgaaaaccctgcttcggtgtcgaaacgagaagaagaggcatagggcagtgagagtcatcttcaccatcatgattgtttactttctcttctggactccctataatattgtcattctcctgaacaccttccaggaattcttcggcctgagtaactgtgaaagcaccagtcaactggaccaagccacgcaggtgacagagactcttgggatgactcactgctgcatcaatcccatcatctatgccttcgttggggagaagttcagaagcctttttcacatagctcttggctgtaggattgccccactccaaaaaccagtgtgtggaggtccaggagtgagaccaggaaagaatgtgaaagtgactacacaaggactcctcgatggtcgtggaaaaggaaagtcaattggcagagcccctgaagccagtcttcaggacaaagaaggagcctagagacagaaatgacagatctctgctttggaaatcacacgtctggcttcacagatgtgtgattcacagtgtgaatcttggtgtctacgttaccaggcaggaaggctgagaggagagagactccagctgggttggaaaacagtattttccaaactaccttccagttcctcatttttgaatacaggcatagagttcagactttttttaaatagtaaaaataaaattaaagctgaaaactgcaacttgtaaatgtggtaaagagttagtttgagttactatcatgtcaaacgtgaaaatgctgtattagtcacagagataattctagctttgagcttaagaattttgagcaggtggtatgtttgggagactgctgagtcaacccaatagttgttgattggcaggagttggaagtgtgtgatctgtgggcacattagcctatgtgcatgcagcatctaagtaatgatgtcgtttgaatcacagtatacgctccatcgctgtcatctcagctggatctccattctctcaggcttgctgccaaaagccttttgtgttttgttttgtatcattatgaagtcatgcgtttaatcacattcgagtgtttcagtgcttcgcagatgtccttgatgctcatattgttccctattttgccagtgggaactcctaaatcaagttggcttctaatcaaagcttttaaaccctattggtaaagaatggaaggtggagaagctccctgaagtaagcaaagactttcctcttagtcgagccaagttaagaatgttcttatgttgcccagtgtgtttctgatctgatgcaagcaagaaacactgggcttctagaaccaggcaacttgggaactagactcccaagctggactatggctctactttcaggccacatggctaaagaaggtttcagaaagaagtggggacagagcagaactttcaccttcatatatttgtatgatcctaatgaatgcataaaatgttaagttgatggtgatgaaatgtaaatactgtttttaacaactatgatttggaaaataaatcaatgctataactatgttgataaaag

SEQ ID NO: 43900 - DNA, 1125 bp, Artificial Sequence
  derived and/or modified sequence
atgctgagcaccagcagaagcagattcatcagaaacaccaacgagagcggcgaggaggtgaccaccttcttcgactacgactacggcgccccctgccacaagttcgacgtgaagcagatcggcgcccagctgctgccccccctgtacagcctggtgttcatcttcggcttcgtgggcaacatgctggtggtgctgatcctgatcaactgcaagaagctgaagtgcctgaccgacatctacctgctgaacctggccatcagcgacctgctgttcctgatcaccctgcccctgtgggcccacagcgccgccaacgagtgggtgttcggcaacgccatgtgcaagctgttcaccggcctgtaccacatcggctacttcggcggcatcttcttcatcatcctgctgaccatcgacagatacctggccatcgtgcacgccgtgttcgccctgaaggccagaaccgtgaccttcggcgtggtgaccagcgtgatcacctggctggtggccgtgttcgccagcgtgcccggcatcatcttcaccaagtgccagaaggaggacagcgtgtacgtgtgcggcccctacttccccagaggctggaacaacttccacaccatcatgagaaacatcctgggcctggtgctgcccctgctgatcatggtgatctgctacagcggcatcctgaagaccctgctgagatgcagaaacgagaagaagagacacagagccgtgagagtgatcttcaccatcatgatcgtgtacttcctgttctggaccccctacaacatcgtgatcctgctgaacaccttccaggagttcttcggcctgagcaactgcgagagcaccagccagctggaccaggccacccaggtgaccgagaccctgggcatgacccactgctgcatcaaccccatcatctacgccttcgtgggcgagaagttcagaagcctgttccacatcgccctgggctgcagaatcgcccccctgcagaagcccgtgtgcggcggccccggcgtgagacccggcaagaacgtgaaggtgaccacccagggcctgctggacggcagaggcaagggcaagagcatcggcagagcccccgaggccagcctgcaggacaaggagggcgcctag

SEQ ID NO: 43901 - protein, 151 aa, Artificial Sequence
  derived and/or modified sequence
MRMAPTESTEGRRLWPGPREGGSGKETTSEKLSNLPRPHSYSPKRADAESFRGVPAAFKKCREVFRACWGSRELLFLFKAISEAGPAQNSCGITLEKAGGLEDTGSHWLSWARCKVLYINGFTDPWKDAQAWILIVSCKKGKGTPEREGRN

SEQ ID NO: 43902 - DNA, 456 bp, Artificial Sequence
  derived and/or modified sequence
atgagaatggcccccaccgagagcaccgagggcagaagactgtggcccggccccagagagggcggcagcggcaaggagaccaccagcgagaagctgagcaacctgcccagaccccacagctacagccccaagagagccgacgccgagagcttcagaggcgtgcccgccgccttcaagaagtgcagagaggtgttcagagcctgctggggcagcagagagctgctgttcctgttcaaggccatcagcgaggccggccccgcccagaacagctgcggcatcaccctggagaaggccggcggcctggaggacaccggcagccactggctgagctgggccagatgcaaggtgctgtacatcaacggcttcaccgacccctggaaggacgcccaggcctggatcctgatcgtgagctgcaagaagggcaagggcacccccgagagagagggcagaaactag

SEQ ID NO: 43903 - DNA, 2911 bp, Artificial Sequence
  derived and/or modified sequence
cttgcatttggcagacgagtcacccgggcagtgggatgaggatggcaccaacagagtcaacagaaggaagacggctctggccgggccccagggagggaggcagcggtaaggaaacaacttcagagaagttaagcaacttgcccaggccacacagctattcaccaaagagagctgatgctgagtctttcagaggagtgcctgcagcatttaaaaaatgcagagaagtgttcagagcctgctggggaagcagggagctgctatttctgttcaaggcaatcagtgaggctggacctgcccagaattcatgtggaatcaccctagagaaggctggtggcttggaagacactggatctcactggctcagctgggcacggtgcaaggtgctatacataaatggtttcactgacccctggaaggatgctcaggcctggatactcattgtgagctgcaaaaaaggaaaggggacccctgagagggaaggcaggaactagggctcatggccagaggtgtggagctgcattgaaatctcttgagtgggatgcccatgcttccccaccagatcccagaaactcaacgtagtgtcctgatgtcctgactggctctgcagaagcccaggtgtcactccgggtgagtgggctcagatcctccacggtctacatcctccaggcactctgggcatccccgtcctctgggtggggacagctttctagctgtgctgggtgagggtgattatagccagcaatcctggctgggccttcgttcttgatccccggtaaaggcaggggctacagggtgccctggtgcacagaggctcactggctgctcaaggtctcctcccacaaccatctacatcctgactcagcgctgaattgtgatgctctggaggacaaggctggtgctcccacagtgtgtacctgccttcctggaggccaggatgccaagaactgcctcctagccacccgcttcttccaggcccttagaactccagccagagggctgcctgtagggcctgcttctgtgcagctgctcagagcagtgacagcactccttaccccgtccctgtctaccccacaagtgctgcctgcttacttgggtcgtgtccatgctggcctctgctcttggggcctggggagccagagccaccaaggacggacaggccagactcaggaagcagcctgtggtggggcagcccacctacactcgcccctcccttgagccttctcacccggcagcatccctgctggatgcaggttccctccatgcctccacccaggggcatccccacccctcattgcgaccgtctccagagcccttccttccctgcaccatccctgctccttcatctcctgccctttgcctgccctacctgtcgcctcagcaggcactcacatgggcacatcttggcctccctcctgagggccctgcccagaccagccaaaggaaggcaacctcaggcggcaccaggcagtgactgggcagtggggacaaggaccacaatgcccgtggctgtaggtgtcatgggttggggagggggtgtgggttcctggacctttgccctggtcctggggtgggcaggtggggttcctggttgaccctgcacacagcctccggggtggtctccagaggactgtgcagtgggggcagccagtggcagcctaaagagtgcaggatgggggtggggggtgcccactgaaacaaatgctcaagagcagctggttatggcaggactttaagtatatattcctgtacatcttttcaaacatatacacaaagcaattcacattttcatatactggaaaggcaggctaacttttcattttcctgcaacatgtgcatagtaataaaaaattctggccgagcgcagtggctcacccctgtaatcccagcactttggcaggccaaggtgggcggatcacaaggtcaggggttcgagattagcctgaccaacatggtgaaatcccgtctctactaaaaatacaaaaattagccgggcgtggtggcatacacctgtaatcccagctactcaggaggctgaggcaggagaattgcatgaacatgggaggcagaggttgcagtgagccgagactgcgccactgcaccccaggctgggtgacagagctagactcagtctcaaaaaaaaaaaaaagttctatagccttcttccagtttctccccccaattaaatgtaataacaatctaatcagtgcactgaaagttaagataatagaaaaaatttcatccagaatcccatcacccacatgttaccgagggagaaattttaccacctcttgtttcaggccagttcaggcaggtgtacattgtctcagaagggagatatttctttcgtctgatactggagagtcaccagagtcgccagacaacaggacaggacactcatcttgcccacaggctaggtttgctggatgtcactaggtttgccagacaccaactcttgtcagagttattccatttgcctgtttggaaaaggcagccttcacccctgcattcctagctcctgggctgacggcctgcctgacatctgagggtagtggagtgaggttggcacttgccctgcgctgagagtggaggggagataatggtttaggtgggaaagtacagcccctccagcttcagggatcagctcacagcagggggaaaagtcctagaggaagactggggtggggcatgtctgctcactcacaaaagcagattcattattacagggcctttaaagagggatgtgtgtgggtagatgggatcctcaccgaggtgtgacctgctttttctagtgtttgcgaggatgtctcattaacctgcaggaaagtgctggtttcaattcgatggtttgttttctgttctgtttcctttctgttacaaacacaaagggtacattaaagagcctttccccatc

SEQ ID NO: 43904 - DNA, 456 bp, Artificial Sequence
  derived and/or modified sequence
atgcggatggcgcctacagagtctactgaagggagacgcctgtggcccggaccacgcgagggagggtcaggaaaagagaccacctcagagaaattatccaatctcccccggcctcacagctactccccaaaacgcgcggatgctgaaagctttcgaggggtgcccgcagcttttaaaaaatgcagggaagtctttagggcatgttgggggtctagagagttactgttcctgttcaaagcgatcagtgaggcaggacccgctcagaatagctgcggaattactctggagaaagcggggggcctagaggacactggctcgcattggctgtcttgggctcggtgtaaggtcctgtacatcaatggctttaccgacccttggaaggatgcccaagcatggatattgatcgtctcttgtaagaaagggaagggtacacctgagagggagggaagaaactag

SEQ ID NO: 43905 - DNA, 456 bp, Artificial Sequence
  derived and/or modified sequence
atgaggatggcccccacagagagcacagagggccggcggctgtggccaggcccccgggagggcggcagcggcaaggagaccaccagcgagaagctgagcaacctgccccggccccacagctacagccccaagagagcagatgctgagagcttccggggcgtgcctgctgccttcaagaagtgccgggaggtgttccgggcctgctggggcagccgggagctgctcttcctgttcaaggccatcagcgaggccggccctgcccagaacagctgtggcatcaccctggagaaggccggcggcctggaggacaccggcagccactggctgtcctgggcccgctgcaaggtgctgtacatcaatggcttcacagacccctggaaggatgcccaggcctggatcctgattgtgtcctgcaagaagggcaagggcaccccagagcgggagggcaggaactag

SEQ ID NO: 43906 - DNA, 456 bp, Artificial Sequence
  derived and/or modified sequence
atgcggatggcccccaccgagagcaccgagggccggcggctgtggcccgggcccagagagggcggctctgggaaagagacaacctcagagaagttgtctaatctgccccgaccccactcctattcacctaagcgcgccgacgccgagagtttcaggggcgtgccagcggcatttaagaaatgtagggaagtgttccgggcatgttgggggtcccgagagctcttgtttttgttcaaagccatctcggaagcgggtccagcgcagaactcgtgcggaatcaccctcgagaaagctggtgggctggaggatacagggagtcattggttgagttgggctcggtgtaaagtgctttacatcaacggcttcacggacccgtggaaggatgcacaggcgtggattctgattgtgtcttgcaaaaagggcaaaggtacgccagagcgggaaggccgaaactag

SEQ ID NO: 43907 - DNA, 456 bp, Artificial Sequence
  derived and/or modified sequence
atgagaatggccccaaccgagagtacagaggggcgacgcctttggccaggtcctcgagaaggcggatctggcaaggagaccacttcggaaaaactctctaatctgccacggccacacagttattcccctaaacgagccgacgccgaatcctttcgaggggtccccgctgcctttaagaaatgtagggaggtctttagagcctgctgggggtcccgtgaactgctgttcctgttcaaagcaatcagcgaggcaggacccgctcagaattcttgcggaattaccttggagaaggccggaggcttagaggacactggctcacattggctgagctgggcccgttgtaaagttctgtatataaatggtttcactgacccttggaaggatgcccaagcttggatccttatcgtctcatgcaaaaagggcaaaggaacgcctgaaagagaagggaggaattag

SEQ ID NO: 43908 - protein, 776 aa, Artificial Sequence
  derived and/or modified sequence
MAEPRQEFEVMEDHAGTYGLGDRKDQGGYTMHQDQEGDTDAGLKESPLQTPTEDGSEEPGSETSDAKSTPTAEDVTAPLVDEGAPGKQAAAQPHTEIPEGTTAEEAGIGDTPSLEDEAAGHVTQEPESGKVVQEGFLREPGPPGLSHQLMSGMPGAPLLPEGPREATRQPSGTGPEDTEGGRHAPELLKHQLLGDLHQEGPLLKGAGGKERPGSKEEVDEDRDVDESSPQDSPPSKASPAQDGRPPQTAAREATSIPGFPAEGAIPLPVDFLSKVSTEIPASEPNGPSAGRAKGQDAPLEFTFHVEITPNVQKEQAHSEEHLGRAAFPGAPGEGPEARGPSLGEDTKEADLPEPSEKQPAAAPRGKPVSWVPQLKARMVSKSKDGTGSDDKKAKTSTRSSAKTLKNRPCLSPKHPTPGSSDPLIQPSSPAVCPEPPSSPKYVSSVTPRTGSSGAKEMKLKGADGKTKIATPRGAAPPGQKGQANATRIPAKTPPAPKTPPSSATKQVQRRPPPAGPRSERGEPPKSGDRSGYSSPGSPGTPGSRSRTPSLPTPPTREPKKVAVVRTPPKSPSSAKSRLQTAPVPMPDLKNVKSKIGSTENLKHQPGGGKVQIINKKLDLSNVQSKCGSKDNIKHVPGGGSVQIVYKPVDLSKVTSKCGSLGNIHHKPGGGQVEVKSEKLDFKDRVQSKIGSLDNITHVPGGGNKKIETHKLTFRENAKAKTDHGAEIVYKSPVVSGDTSPRHLSNVSSTGSIDMVDSPQLATLADEVSASLAKQGL

SEQ ID NO: 43909 - protein, 776 aa, Artificial Sequence
  derived and/or modified sequence
MAEPRQEFEVMEDHAGTYGLGDRKDQGGYTMHQDQEGDTDAGLKESPLQTPTEDGSEEPGSETSDAKSTPTAEDVTAPLVDEGAPGKQAAAQPHTEIPEGTTAEEAGIGDTPSLEDEAAGHVTQEPESGKVVQEGFLREPGPPGLSHQLMSGMPGAPLLPEGPREATRQPSGTGPEDTEGGRHAPELLKHQLLGDLHQEGPPLKGAGGKERPGSKEEVDEDRDVDESSPQDSPPSKASPAQDGRPPQTAAREATSIPGFPAEGAIPLPVDFLSKVSTEIPASEPDGPSVGRAKGQDAPLEFTFHVEITPNVQKEQAHSEEHLGRAAFPGAPGEGPEARGPSLGEDTKEADLPEPSEKQPAAAPRGKPVSRVPQLKARMVSKSKDGTGSDDKKAKTSTRSSAKTLKNRPCLSPKHPTPGSSDPLIQPSSPAVCPEPPSSPKYVSSVTSRTGSSGAKEMKLKGADGKTKIATPRGAAPPGQKGQANATRIPAKTPPAPKTPPSSATKQVQRRPPPAGPRSERGEPPKSGDRSGYSSPGSPGTPGSRSRTPSLPTPPTREPKKVAVVRTPPKSPSSAKSRLQTAPVPMPDLKNVKSKIGSTENLKHQPGGGKVQIINKKLDLSNVQSKCGSKDNIKHVPGGGSVQIVYKPVDLSKVTSKCGSLGNIHHKPGGGQVEVKSEKLDFKDRVQSKIGSLDNITHVPGGGNKKIETHKLTFRENAKAKTDHGAEIVYKSPVVSGDTSPRHLSNVSSTGSIDMVDSPQLATLADEVSASLAKQGL

SEQ ID NO: 43910 - DNA, 2331 bp, Artificial Sequence
  derived and/or modified sequence
atggccgagcccagacaggagttcgaggtgatggaggaccacgccggcacctacggcctgggcgacagaaaggaccagggcggctacaccatgcaccaggaccaggagggcgacaccgacgccggcctgaaggagagccccctgcagacccccaccgaggacggcagcgaggagcccggcagcgagaccagcgacgccaagagcacccccaccgccgaggacgtgaccgcccccctggtggacgagggcgcccccggcaagcaggccgccgcccagccccacaccgagatccccgagggcaccaccgccgaggaggccggcatcggcgacacccccagcctggaggacgaggccgccggccacgtgacccaggagcccgagagcggcaaggtggtgcaggagggcttcctgagagagcccggcccccccggcctgagccaccagctgatgagcggcatgcccggcgcccccctgctgcccgagggccccagagaggccaccagacagcccagcggcaccggccccgaggacaccgagggcggcagacacgcccccgagctgctgaagcaccagctgctgggcgacctgcaccaggagggccccctgctgaagggcgccggcggcaaggagagacccggcagcaaggaggaggtggacgaggacagagacgtggacgagagcagcccccaggacagcccccccagcaaggccagccccgcccaggacggcagacccccccagaccgccgccagagaggccaccagcatccccggcttccccgccgagggcgccatccccctgcccgtggacttcctgagcaaggtgagcaccgagatccccgccagcgagcccaacggccccagcgccggcagagccaagggccaggacgcccccctggagttcaccttccacgtggagatcacccccaacgtgcagaaggagcaggcccacagcgaggagcacctgggcagagccgccttccccggcgcccccggcgagggccccgaggccagaggccccagcctgggcgaggacaccaaggaggccgacctgcccgagcccagcgagaagcagcccgccgccgcccccagaggcaagcccgtgagctgggtgccccagctgaaggccagaatggtgagcaagagcaaggacggcaccggcagcgacgacaagaaggccaagaccagcaccagaagcagcgccaagaccctgaagaacagaccctgcctgagccccaagcaccccacccccggcagcagcgaccccctgatccagcccagcagccccgccgtgtgccccgagccccccagcagccccaagtacgtgagcagcgtgacccccagaaccggcagcagcggcgccaaggagatgaagctgaagggcgccgacggcaagaccaagatcgccacccccagaggcgccgccccccccggccagaagggccaggccaacgccaccagaatccccgccaagaccccccccgcccccaagaccccccccagcagcgccaccaagcaggtgcagagaagacccccccccgccggccccagaagcgagagaggcgagccccccaagagcggcgacagaagcggctacagcagccccggcagccccggcacccccggcagcagaagcagaacccccagcctgcccaccccccccaccagagagcccaagaaggtggccgtggtgagaaccccccccaagagccccagcagcgccaagagcagactgcagaccgcccccgtgcccatgcccgacctgaagaacgtgaagagcaagatcggcagcaccgagaacctgaagcaccagcccggcggcggcaaggtgcagatcatcaacaagaagctggacctgagcaacgtgcagagcaagtgcggcagcaaggacaacatcaagcacgtgcccggcggcggcagcgtgcagatcgtgtacaagcccgtggacctgagcaaggtgaccagcaagtgcggcagcctgggcaacatccaccacaagcccggcggcggccaggtggaggtgaagagcgagaagctggacttcaaggacagagtgcagagcaagatcggcagcctggacaacatcacccacgtgcccggcggcggcaacaagaagatcgagacccacaagctgaccttcagagagaacgccaaggccaagaccgaccacggcgccgagatcgtgtacaagagccccgtggtgagcggcgacaccagccccagacacctgagcaacgtgagcagcaccggcagcatcgacatggtggacagcccccagctggccaccctggccgacgaggtgagcgccagcctggccaagcagggcctgtag

SEQ ID NO: 43911 - DNA, 2331 bp, Artificial Sequence
  derived and/or modified sequence
atggcggagccgcgacaggaattcgaagtaatggaggaccatgccggcacttacggactaggagaccgcaaagaccaaggcggttacactatgcaccaggatcaggaaggggataccgatgcaggcctgaaagaaagccccctccagacccctaccgaagatgggagcgaagagcccgggtcagagaccagtgatgccaagagcacccctacagccgaggatgtcactgcacccttggtggacgagggggctcccggcaagcaggctgcagctcagccccacacagagatccctgagggcaccaccgccgaggaggcaggaattggggacactcctagtcttgaagacgaagctgccgggcatgtgacacaggaaccagagtccggcaaagtggtccaggagggatttctccgagagccagggccccccggccttagccaccagttgatgtccggcatgccaggagctcctctgctgcccgagggcccccgcgaggcaacccggcaaccatctggcactgggcctgaggacacagagggcggaaggcacgcaccagagctcctcaaacatcagctgcttggggacttgcaccaggaaggaccgttgcttaagggcgccgggggaaaggagcggcccggcagcaaagaagaggttgacgaagatcgtgatgtcgatgagtccagcccccaagactctcccccttctaaagcgtcacccgctcaagacggccgcccacctcagaccgccgctcgggaggccactagcattccaggatttcctgccgaaggagcaatccctctgcccgttgacttcttgtccaaggtctcaactgagatcccagcttccgagccgaacggtcctagcgcaggccgggccaaggggcaagacgcaccccttgaatttacattccatgttgagataaccccgaatgtccagaaggagcaagcacactcagaagagcatttggggcgcgccgcttttccgggtgctcccggggaggggcccgaagcacgtggcccgagcctgggggaagataccaaggaagcagacctcccagagccatccgagaaacagccggctgcggcgccacgcggtaagccggtgtcgtgggtccctcaactgaaggctcgaatggtgagtaagagtaaagacgggaccggctccgacgataagaaggccaagacttccactcggtcttcggccaaaacgctcaagaatcgcccttgcctcagtccgaagcatccaactcctggaagctccgatccattgatccagcccagctcccctgctgtgtgtccggagcctccctcctcacccaaatacgtgtctagtgttacccctagaaccggcagctccggtgcaaaagagatgaagctgaaaggggccgacggcaagactaaaattgccacacctaggggggccgctccgccaggacagaagggacaggctaatgccacaaggatcccagccaaaacaccccctgcccctaagaccccgcctagcagtgcaaccaagcaggtgcaacgccgcccaccccccgcaggtccccgcagcgagagaggagagcccccaaaatcaggcgaccgcagcggatactcatcaccaggaagccctgggacccccggctcacggtcaaggactccaagccttcccaccccccctacccgcgagccaaaaaaggttgcggtggtgcgaactccccccaagagcccctccagtgctaagtcaagacttcagaccgcccctgttcctatgcctgacctcaagaacgtaaaatccaagataggaagcacagagaatctgaagcatcaaccaggcgggggaaaggtgcaaataatcaataaaaagctggacttgagtaatgttcagagcaagtgcggatcaaaggataatatcaaacatgtgcccggaggcggatccgttcaaattgtgtataaaccagttgacttgtcaaaggtcacctcaaagtgcggcagtcttggaaacatccatcacaaacccggaggtgggcaggttgaggtaaaatcggagaagctggatttcaaggatagagtgcaaagtaagatcggatccctggataacatcactcatgtgccagggggcgggaataagaagatcgagactcacaaactgacattccgagaaaacgcaaaagcgaagactgaccatggcgcagagatcgtgtataagtcccccgtcgtgagcggcgatactagcccgcgccacctatccaatgtgtcaagtaccggctcgatagatatggtggatagcccccagctcgctacacttgccgacgaggtgagcgcctctctcgctaagcagggcctgtag

SEQ ID NO: 43912 - DNA, 2331 bp, Artificial Sequence
  derived and/or modified sequence
atggccgagccccggcaggagtttgaggtgatggaggaccatgctggcacctacggcctgggggacaggaaggaccagggcggctacaccatgcaccaggaccaggagggggacacagatgctggcctgaaggagagccccctgcagacccccacagaagatggcagcgaggagcccggcagcgagaccagtgatgccaagagcacccccacagcagaagatgtgacagcccccctggtggatgaaggagcccctgggaagcaggccgccgcccagccccacacagagatccctgagggcaccacagctgaggaggccggcatcggggacacccccagcctggaggatgaggccgccggccacgtgacccaggagcctgagagcggcaaggtggtgcaggagggcttcctgcgggagcccggccccccaggcctgagccaccagctgatgagcggcatgcctggggcccccctgctgcctgagggcccccgggaggccacccggcagcccagcggcactggacctgaggacacagagggcggcagacatgcccctgagctgctgaagcaccagctgctgggggacctgcaccaggagggccccctgctgaagggggccggcggcaaggagcggcccggcagcaaggaggaggtggatgaggacagagatgtggatgagagcagcccccaggacagcccccccagcaaggccagccctgcccaggacggccggcccccccagacagctgcccgggaggccaccagcatccctggcttccctgctgagggcgccatccccctgcctgtggacttcctgagcaaggtgtccacagagatcccagccagcgagcccaacggccccagcgctggccgggccaagggccaggatgcccccctggagttcaccttccacgtggagatcacccccaacgtgcagaaggagcaggcccacagcgaggagcacctgggccgggccgccttccctggggcccctggagagggccctgaggcccggggccccagcctgggggaggacaccaaggaggccgacctgcctgagcccagcgagaagcagcctgctgctgccccccggggcaagcctgtgtcctgggtgccccagctgaaggccaggatggtgtccaagagcaaggatggcaccggcagtgatgacaagaaggccaagaccagcaccaggagcagcgccaagaccctgaagaaccggccctgcctgagccccaagcaccccaccccaggcagcagtgaccccctcatccagcccagcagccctgctgtgtgcccagagccccccagcagccccaagtatgtgtcctctgtgacccccaggacaggcagcagcggggccaaggagatgaagctgaagggagcagatggcaagaccaagatcgccacccccaggggggccgcccctcctggccagaagggccaggccaatgccacccgcatcccagccaagaccccaccagcccccaagaccccacccagcagcgccaccaagcaggtgcagaggaggcctcctcctgctggccccaggtctgagcggggggagccccccaagagcggggacaggagcggctacagcagccctggcagccctggcaccccaggcagccgcagcaggacccccagcctgcccaccccacccacccgggagcccaagaaggtggccgtggtgaggaccccacccaagagccccagcagcgccaagagccggctgcagacagcccctgtgcccatgccagacctgaagaatgtgaagagcaagattggcagcacagagaacctgaagcaccagcccggcggcggcaaggtgcagatcatcaacaagaagctggacctgagcaatgtgcagagcaaatgtggcagcaaggacaacatcaagcacgtgcctgggggcggctctgtgcagatcgtgtacaagcctgtggacctgagcaaggtgaccagcaaatgtggcagcctgggcaacatccaccacaagccaggcggcggccaggtggaggtgaagtctgagaagctggacttcaaggacagagtgcagagcaagattggcagcctggacaacatcacccacgtgcctgggggcggcaacaagaagattgagacccacaagctgaccttcagagaaaatgccaaggccaagacagaccatggagctgagatcgtgtacaagagccctgtggtgtctggggacaccagccccaggcacctgagcaatgtgagcagcacaggcagcattgacatggtggacagcccccagctggccaccctggctgatgaggtgtctgccagcctggccaagcagggcctgtag

SEQ ID NO: 43913 - DNA, 2331 bp, Artificial Sequence
  derived and/or modified sequence
atggccgagccccggcaggagttcgaggtgatggaggaccacgccggaacctatggtctcggagataggaaggaccaggggggatacacgatgcaccaagatcaggagggagatacagatgctggattaaaggagtctcccttgcaaacacccactgaggatgggtctgaggagcccggtagcgagacaagcgacgctaagagtacccccacagccgaggacgtgacagcaccccttgttgatgaaggggcccctggcaaacaagcggccgctcagccacatacagaaatccccgaagggacaaccgcagaggaagcgggcattggtgacaccccaagcctcgaggacgaagccgccggtcacgtgacccaggagcccgagagcggcaaagtggtccaagaggggtttcttagggagccaggcccgccaggcctgagtcaccagctgatgtccggaatgcccggcgcccctttattgcccgaaggcccgcgcgaggccactcgacagcctagcgggaccggacccgaggataccgagggtggccggcatgcacctgagcttctcaagcaccagctgttgggagacctgcaccaggagggccccctgctgaaaggtgccggagggaaggaaaggcccgggtccaaggaggaggttgatgaagacagggatgtcgacgagtcgtccccacaggattctcctccgtcaaaggcatctccagcccaggacggacggccgccacagacggcagcgagagaggctacttcaattcctggatttcccgcagaaggtgcaattcctttgccagtggacttcctctctaaagtgtcgacggagattcctgctagcgaaccaaacggtccctccgccggcagggccaaggggcaggacgcccctcttgagttcacattccacgtggaaatcaccccaaacgtgcagaaagagcaggcgcactcagaagagcacctgggacgcgccgcttttcctggggctccgggagagggacccgaagccaggggtccatccctgggggaggataccaaagaagctgatttaccagaacccagtgagaaacagccagcggccgctccgaggggcaagccagtctcctgggtgccacagcttaaagcccgtatggtcagcaagagtaaagacgggaccggttctgatgacaaaaaggcaaagacctctacccgatcctccgcaaaaactttaaaaaaccggccgtgtctctcccccaagcaccctaccccaggtagttcagacccactgattcagccatctagtcctgccgtttgtcctgagccaccttcttcacctaaatatgtttctagcgtcactcctcgcaccgggtctagcggggcaaaagaaatgaagttgaagggtgccgacggaaaaaccaagattgctaccccacgaggcgccgctcctcctggccagaaagggcaggctaacgccacgcgaatccccgctaagacgccccccgcacctaaaactcccccatcctccgccactaaacaggttcagaggcgcccaccccctgcaggcccgcggagtgaacgcggagagccgcccaagtcaggcgaccgtagcggttacagctctcctggctctccaggaacacctggctcccggagccgcaccccttctctccccacacctccaacgcgagaacccaaaaaggtcgctgtggtccggactcctcccaaatccccctcctccgccaaatcccgtctccagactgcacctgtgcccatgccagaccttaagaatgttaagtcaaagattggctctacggagaatctcaaacaccaaccagggggtggtaaggtgcagatcatcaataagaagctggatctctccaacgtgcaaagcaaatgcggctctaaggacaacatcaaacacgtgcccgggggtgggtccgtgcagattgtgtataagccggtggatctgagtaaagtgacatccaaatgcggaagtctagggaacattcatcataaaccaggcgggggtcaggtggaggtaaaatctgagaaattggactttaaggaccgcgtgcagtcaaagatagggtcactggataacatcacacacgtccccggcggtgggaacaagaaaatagaaacacacaaactgacattcagagaaaatgcaaaggcaaagacagatcacggcgccgaaattgtgtacaaatctcctgtcgtcagtggggatactagccctcgacatctgagtaatgtcagctccaccggctcaatcgacatggtggattcaccccagcttgcaacactcgccgacgaggtaagcgcctctctggctaaacaagggctctag

SEQ ID NO: 43914 - DNA, 3530 bp, Artificial Sequence
  derived and/or modified sequence
caggtgagctttgaaccaggatggctgagccccgccaggagttcgaagtgatggaagatcacgctgggacgtacgggttgggggacaggaaagatcaggggggctacaccatgcaccaagaccaagagggtgacacggacgctggcctgaaagaatctcccctgcagacccccactgaggacggatctgaggaaccgggctctgaaacctctgatgctaagagcactccaacagcggaagatgtgacagcacccttagtggatgagggagctcccggcaagcaggctgccgcgcagccccacacggagatcccagaaggaaccacagctgaagaagcaggcattggagacacccccagcctggaagacgaagctgctggtcacgtgacccaagagcctgaaagtggtaaggtggtccaggaaggcttcctccgagagccaggccccccaggtctgagccaccagctcatgtccggcatgcctggggctcccctcctgcctgagggccccagagaggccacacgccaaccttcggggacaggacctgaggacacagagggcggccgccacgcccctgagctgctcaagcaccagcttctaggagacctgcaccaggaggggccgctgctgaagggggcagggggcaaagagaggccggggagcaaggaggaggtggatgaagaccgcgacgtcgatgagtcctccccccaagactcccctccctccaaggcctccccagcccaagatgggcggcctccccagacagccgccagagaagccaccagcatcccaggcttcccagcggagggtgccatccccctccctgtggatttcctctccaaagtttccacagagatcccagcctcagagcccaacgggcccagtgcagggcgggccaaagggcaggatgcccccctggagttcacgtttcacgtggaaatcacacccaacgtgcagaaggagcaggcgcactcggaggagcatttgggaagggctgcatttccaggggcccctggagaggggccagaggcccggggcccctctttgggagaggacacaaaagaggctgaccttccagagccctctgaaaagcagcctgctgctgctccgcgggggaagcccgtcagctgggtccctcaactcaaagctcgcatggtcagtaaaagcaaagacgggactggaagcgatgacaaaaaagccaagacatccacacgttcctctgctaaaaccttgaaaaataggccttgccttagccccaaacaccccactcctggtagctcagaccctctgatccaaccctccagccctgctgtgtgcccagagccaccttcctctcctaaatacgtctcttctgtcactccccgaactggcagttctggagcaaaggagatgaaactcaagggggctgatggtaaaacgaagatcgccacaccgcggggagcagcccctccaggccagaagggccaggccaacgccaccaggattccagcaaaaaccccacccgctccaaagacaccacccagctctgcgaccaagcaagtccagagaagaccaccccctgcagggcccagatctgagagaggtgaacctccaaaatcaggggatcgcagcggctacagcagccccggctccccaggcactcccggcagccgctcccgcaccccgtcccttccaaccccacccacccgggagcccaagaaggtggcggtggtccgtactccacccaagtcgccgtcttccgccaagagccgcctgcagacagcccccgtgcccatgccagacctgaagaacgtcaagtccaagatcggctccactgagaacctgaagcaccagccgggaggcgggaaggtgcagataattaataagaagctggatcttagcaacgtccagtccaagtgtggctcaaaggataatatcaaacacgtcccgggaggcggcagtgtgcaaatagtctacaaaccagttgacctgagcaaggtgacctccaagtgtggctcattaggcaacatccatcataaaccaggaggtggccaggtggaagtaaaatctgagaagcttgacttcaaggacagagtccagtcgaagattgggtccctggacaatatcacccacgtccctggcggaggaaataaaaagattgaaacccacaagctgaccttccgcgagaacgccaaagccaagacagaccacggggcggagatcgtgtacaagtcgccagtggtgtctggggacacgtctccacggcatctcagcaatgtctcctccaccggcagcatcgacatggtagactcgccccagctcgccacgctagctgacgaggtgtctgcctccctggccaagcagggtttgtgatcaggcccctggggcggtcaataatcgtggagaggagagaatgagagagtgtggaaaaaaaaagaataatgacccggcccccgccctctgcccccagctgctcctcgcagttcggttaattggttaatcacttaacctgcttttgtcactcggctttggctcgggacttcaaaatcagtgatgggagtaagagcaaatttcatctttccaaattgatgggtgggctagtaataaaatattttaaaaaaaaacattcaaaaacatggccacatccaacatttcctcaggcaattccttttgattcttttttcttcccccctccatgtagaagagggggaaggagaggctctgaaagctgcttctgggggatttcaagggactgggggtgccaaccacctctggccctgttgtgggggtgtcacagaggcagtggcagcaacaaaggatttgaaacttggtgtgttcgtggagccacaggcagacgatgtcaaccttgtgtgagtgtgacgggggttggggtggggcgggaggccacgggggaggccgaggcaggggctgggcagaggggagaggaagcacaagaagtgggagtgggagaggaagccacgtgctggagagtagacatccccctccttgccgctgggagagccaaggcctatgccacctgcagcgtctgagcggccgcctgtccttggtggccgggggtgggggcctgctgtgggtcagtgtgccaccctctgcagggcagcctgtgggagaagggacagcgggtaaaaagagaaggcaagctggcaggagggtggcacttcgtggatgacctccttagaaaagactgaccttgatgtcttgagagcgctggcctcttcctccctccctgcagggtagggggcctgagttgaggggcttccctctctgctccacagaaaccctgttttattgagttctgaaggttggaactgctgccatgattttggccactttgcagacctgggactttagggctaaccagttctctttgtaaggacttgtgcctcttgggagacgtccacccgtttccaagcctgggccaccggcatctctggagtgtgtgggggtctgggaggcgggtcccgagccccctgtccttcccacggccactgcagtcacccctgtctgccccgctgtgctgttgtctgccgt

SEQ ID NO: 43915 - DNA, 2331 bp, Artificial Sequence
  derived and/or modified sequence
atggccgagccacggcaggaatttgaagtgatggaagaccacgcagggacgtatggcctcggcgatcgcaaggaccagggtgggtatacgatgcaccaggatcaggaaggcgatactgatgcaggattaaaagagagcccactgcagaccccgacagaagacgggtcagaagaacccggatctgagacaagcgacgccaaatctaccccgacagccgaagacgtcactgctcccctggtggatgagggcgcacccggaaagcaagcggcagcgcaaccacacactgaaatacctgagggcaccacagcagaggaagcaggaattggagacacacccagtctggaagacgaagcagccggtcatgtcacacaggaaccagaatccggcaaggtggtgcaagaggggttcctgcgcgagccaggtcctcccggtttgtcccaccagctgatgtcggggatgcccggagcacctttgctgcccgagggtcccagagaggctacacgccaaccatccggtactggcccagaagacactgaagggggacggcacgcccctgaattactgaaacaccagctcctaggggacctgcaccaggaaggacccctgctcaagggggcaggaggcaaggaacggccagggtctaaggaggaagtcgacgaggaccgcgacgtcgatgagtctagtcctcaagatagccccccatccaaagcctccccggcacaggatggtagaccaccgcaaaccgcagccagggaggccacttctatcccaggctttccagccgagggagctattccccttcccgtggatttcctctctaaagtcagcaccgagatacccgcatccgaaccaaacgggccttccgcaggtagggctaaaggacaggatgcaccactggaatttacatttcatgtcgaaatcactcccaatgtgcagaaagagcaggcacacagcgaagaacacttgggaagagctgcctttcctggtgcccctggcgagggacccgaagctcgcggtccatctctcggcgaagacacaaaggaggcagacttacctgaaccaagtgaaaagcagcccgcagccgctcctcgagggaagccagtctcctgggtccctcagctcaaggccagaatggtgtccaagtcaaaggacggaaccggctctgatgacaaaaaggccaagacaagcactcgcagttccgccaagactctcaagaacagaccttgcctgagccccaaacatcccactcctggaagctccgacccactgatccagccctctagtcccgcagtgtgccccgaaccaccaagcagtcctaagtatgttagtagtgtcacaccgagaacggggtcaagtggcgctaaagagatgaaattgaagggcgcagacggtaagaccaaaattgcaaccccacggggtgctgccccaccaggccagaaaggccaagcaaatgctacgaggatacccgctaagaccccaccagccccaaaaacgcccccttcttccgcgaccaaacaggtgcagcgcagacctccgcctgcaggaccgagaagcgagagaggggagcccccaaagagtggcgatcggtccggatactcgagccctggctcaccaggaacccctggctcgagaagccgcacgccttccttgcccaccccccctacgcgtgaacctaagaaagtggccgtggttagaactcccccaaaatcacctagttcagcaaaatctcgtctccagactgctccagtcccaatgccagacctcaaaaatgtgaagagtaagatcggctcaacagaaaacttgaagcatcaacccggagggggaaaagtccaaatcattaacaagaagttggatctgagcaatgtccagtctaaatgtggtagcaaggataacataaaacacgttcccggaggcggatctgttcaaatcgtctacaagcccgtggacctgagtaaggtcacttccaaatgcggcagcctggggaacattcaccacaaacctggcggtggccaagtcgaggtgaaatccgagaagctggactttaaggatagagtgcagagcaaaatcgggtctctcgacaacattacacatgttccgggaggaggaaacaagaaaattgagacacataagttgacctttagggaaaatgccaaggccaaaacagaccatggagctgaaatcgtgtataagtcccctgtggttagcggagacacctcacctagacatctcagcaacgtcagctctaccggttctattgatatggtggattcaccacagctggctaccctggcagacgaggtcagtgcaagtctggctaagcagggcttgtag

SEQ ID NO: 43916 - DNA, 2331 bp, Artificial Sequence
  derived and/or modified sequence
atggctgaaccacggcaggaatttgaagtgatggaagaccatgcaggaacctatggcctgggggaccgcaaagaccaaggcggatatacaatgcaccaggaccaagaaggtgacacagatgcaggccttaaggagagtcccctgcagacacccacagaggatgggtctgaagaacccggctctgagacatcagatgctaagtccacaccgaccgctgaagacgtaactgcacctctcgtggacgagggagccccggggaaacaggcagctgctcagcctcacactgagatacccgagggtacaacagccgaggaagcgggaattggcgacacgccaagcttggaggatgaagccgcaggccatgtgacgcaggaaccggagtccggcaaggtggtgcaggagggcttcctgcgggaacctggcccccctggcctgagtcaccaacttatgagtgggatgccaggagccccgctcctccctgagggcccacgggaggctacccgccagccctctggaacaggcccggaagacaccgaaggggggagacacgcgccggagctcctcaaacaccagctgctgggagacctgcaccaggagggccctcctctgaaaggtgctggaggtaaagagcgtccaggtagcaaggaagaggttgatgaagatcgggacgttgacgagtccagtcctcaggactccccaccctccaaggcctcacccgcccaggacggcagaccaccacagactgcagcacgggaggcgacatcaatccctgggttcccagctgagggagcgattcctctgcctgtcgactttctgtcaaaagtttcaacggagatacccgcgtctgaaccggacgggccctcagtaggccgagccaagggtcaggatgcaccacttgaatttacctttcatgtcgaaatcacccctaatgtgcagaaggagcaggcccactccgaggaacatcttggccgcgccgcctttcccggcgcacccggagaaggacctgaggcgcgaggccctagcctcggagaggatacgaaagaagcggaccttcctgaaccttccgaaaagcagccagccgccgccccccgtggcaagcccgtgagcagagtaccacagctcaaagctaggatggtgagtaagagtaaagatggcacaggcagcgatgataagaaggccaagaccagtacaagaagcagcgctaagacgctgaaaaatcggccctgtttgagccccaaacaccctacgccagggagcagtgaccctctcatccagccatctagccccgccgtctgccctgaaccacccagcagtccaaaatacgtgtccagcgtaacaagcaggactggctcatcaggggcaaaggagatgaaactcaaaggagccgacggcaagaccaaaatcgctactcctcggggagccgcccccccaggacagaagggccaggcgaatgcaaccaggattccagcaaaaacaccccccgctcccaaaacccctccatctagtgctaccaagcaagtacaaagacgccctccgcctgcaggccccagaagcgagagaggagagcctccaaaatcaggggatcgatctggctatagtagcccaggctcgcctggcaccccgggatcccgttccaggactccgtccctcccgactcctcctacaagagaaccaaagaaggttgcggttgtgagaactccgcctaaatctccatcatctgcgaagagcagactacaaacagctcccgtgcccatgcccgacttgaagaacgtcaaatctaagataggctccaccgagaatcttaagcaccagccagggggtggcaaagtccaaatcatcaacaaaaaactggacttgagcaacgtacagtccaaatgcggcagcaaggataacattaagcacgttcctggcgggggaagcgtgcagatcgtgtacaagcctgtcgacctgtccaaagtgaccagcaagtgtggcagcttagggaacattcaccataaacctggcgggggtcaggttgaagtcaagtcagaaaaactggatttcaaagatcgggtgcagagcaagatcggaagcctcgacaacatcacccatgtacccggtggtggaaataagaagatcgagacccacaagctcacgtttagggaaaacgccaaggctaaaacagatcacggagcagagatcgtatacaaaagccctgtagtatccggtgatacgtcaccccggcatctctcaaatgtttcttcgaccggttccatcgacatggtggactcgccccagctcgcaacactcgccgacgaggtctcagctagccttgctaagcaagggctttag

SEQ ID NO: 43917 - DNA, 2331 bp, Artificial Sequence
  derived and/or modified sequence
atggcagagccccggcaggaatttgaagtgatggaagatcacgcggggacctacggattgggagacagaaaggatcaggggggatacactatgcaccaggaccaagagggcgatacagatgcaggtttaaaagagtctccgcttcagaccccaactgaagacggatccgaggagccaggctcagagacatctgacgctaaatcaacaccgacagctgaggacgttacagctccactggtggacgaaggagcacctgggaagcaggccgctgcacagccgcacaccgagatccctgaaggcacaaccgctgaagaggctgggatcggggacacaccttccctggaagatgaggccgcagggcacgtcacccaggagccagagagcggaaaagtcgttcaggaaggattccttagagagcctggcccacccggcctgtctcaccaactcatgtcaggtatgcccggggcaccacttctccctgagggccctcgcgaagcaacacgacagccatcgggtaccgggccggaggacactgaggggggccggcacgctccagaacttctcaaacaccagctgctgggagatctgcatcaggaggggcccccactgaaaggggctggaggaaaagaaaggccgggcagcaaggaggaggtagacgaggacagggacgttgatgagagcagcccacaggatagcccccccagtaaggcttcccccgctcaagacggcagacctccccagaccgcagcacgtgaagccacatctatcccaggttttccagctgagggtgccatccccttgcccgtggacttcttgtccaaagtgtccacagagattcccgccagtgagcctgacggcccatccgtcggccgcgccaagggacaagacgcacctttggagttcacttttcacgtggagatcactcccaacgtgcagaaggagcaggcacactcggaggagcaccttggccgagcggcattccccggcgcccccggtgaaggtcctgaggccagaggtccatcccttggcgaagacactaaagaggctgacctgcccgaaccttccgagaaacaacccgcagctgcgcccagaggaaaaccagtcagcagggtgcctcagcttaaggcacgaatggtcagtaagtcaaaagatggtacagggagtgatgataagaaggcgaaaaccagcacccggtcgagcgctaaaactctgaaaaatcgcccatgcctcagtcccaagcatcccacacccgggagttctgatccactgatccagccctcaagccccgcggtctgtcctgagccccctagtagccctaagtacgtgagctctgtgacaagccggactggttcttctggtgcaaaagaaatgaagttaaaaggagcagatggaaagactaaaattgctacgccccgaggcgccgccccaccaggacaaaaaggacaagctaacgcaacacgcattcctgctaaaacccctcctgctcctaagactccgccaagttctgctacaaagcaggtacaacgacgcccccctccagcaggacccaggagtgagagaggggagcctccaaaatccggagatcgttcaggctatagctcaccaggatcacccgggacccccgggagcagaagccgcaccccgagcctgccaactccaccaactagagaaccaaaaaaggtagctgtcgtccggaccccccctaagtcaccctccagcgcgaagtcacggctgcaaacagcgccagtgccgatgccagaccttaaaaacgtgaagagtaagatcggatccacagagaacctcaagcaccagccaggagggggcaaggttcagatcatcaacaagaagctggacctgtctaacgtgcagtcaaagtgtgggagcaaggacaacatcaagcatgtccccggtggtggaagtgttcaaatcgtctataagcccgtcgatctctctaaagtcacaagcaaatgcggtagcttaggcaacatccaccataagccaggaggcggccaggtagaggtgaagagcgagaagctcgatttcaaggacagggtgcaatctaagattggctctctggataatattacccatgtaccaggtggcggcaataagaagatcgagacacataaattaacttttagggaaaatgctaaagcaaagaccgaccatggcgcggaaattgtatataagtcgccagtcgtttcgggcgacacctcacctaggcacctctcaaatgtgagctccacagggtccatcgatatggtagactctccacaactggccactctcgctgatgaagtgtctgcaagcctggcaaaacagggactctag

SEQ ID NO: 43918 - DNA, 2331 bp, Artificial Sequence
  derived and/or modified sequence
atggccgagccccggcaggagtttgaggtgatggaggaccatgctggcacctacggcctgggggacaggaaggaccagggcggctacaccatgcaccaggaccaggagggggacacagatgctggcctgaaggagagccccctgcagacccccacagaagatggcagcgaggagcccggcagcgagaccagtgatgccaagagcacccccacagcagaagatgtgacagcccccctggtggatgaaggagcccctgggaagcaggccgccgcccagccccacacagagatccctgagggcaccacagctgaggaggccggcatcggggacacccccagcctggaggatgaggccgccggccacgtgacccaggagcctgagagcggcaaggtggtgcaggagggcttcctgcgggagcccggccccccaggcctgagccaccagctgatgagcggcatgcctggggcccccctgctgcctgagggcccccgggaggccacccggcagcccagcggcactggacctgaggacacagagggcggcagacatgcccctgagctgctgaagcaccagctgctgggggacctgcaccaggagggcccccccctgaagggggccggcggcaaggagcggcccggcagcaaggaggaggtggatgaggacagagatgtggatgagagcagcccccaggacagcccccccagcaaggccagccctgcccaggacggccggcccccccagacagctgcccgggaggccaccagcatccctggcttccctgctgagggcgccatccccctgcctgtggacttcctgagcaaggtgtccacagagatcccagccagcgagccagatggccccagcgtgggccgggccaagggccaggatgcccccctggagttcaccttccacgtggagatcacccccaacgtgcagaaggagcaggcccacagcgaggagcacctgggccgggccgccttccctggggcccctggagagggccctgaggcccggggccccagcctgggggaggacaccaaggaggccgacctgcctgagcccagcgagaagcagcctgctgctgccccccggggcaagcctgtgtcccgggtgccccagctgaaggccaggatggtgtccaagagcaaggatggcaccggcagtgatgacaagaaggccaagaccagcaccaggagcagcgccaagaccctgaagaaccggccctgcctgagccccaagcaccccaccccaggcagcagtgaccccctcatccagcccagcagccctgctgtgtgcccagagccccccagcagccccaagtatgtgtcctctgtgaccagcaggacaggcagcagcggggccaaggagatgaagctgaagggagcagatggcaagaccaagatcgccacccccaggggggccgcccctcctggccagaagggccaggccaatgccacccgcatcccagccaagaccccaccagcccccaagaccccacccagcagcgccaccaagcaggtgcagaggaggcctcctcctgctggccccaggtctgagcggggggagccccccaagagcggggacaggagcggctacagcagccctggcagccctggcaccccaggcagccgcagcaggacccccagcctgcccaccccacccacccgggagcccaagaaggtggccgtggtgaggaccccacccaagagccccagcagcgccaagagccggctgcagacagcccctgtgcccatgccagacctgaagaatgtgaagagcaagattggcagcacagagaacctgaagcaccagcccggcggcggcaaggtgcagatcatcaacaagaagctggacctgagcaatgtgcagagcaaatgtggcagcaaggacaacatcaagcacgtgcctgggggcggctctgtgcagatcgtgtacaagcctgtggacctgagcaaggtgaccagcaaatgtggcagcctgggcaacatccaccacaagccaggcggcggccaggtggaggtgaagtctgagaagctggacttcaaggacagagtgcagagcaagattggcagcctggacaacatcacccacgtgcctgggggcggcaacaagaagattgagacccacaagctgaccttcagagaaaatgccaaggccaagacagaccatggagctgagatcgtgtacaagagccctgtggtgtctggggacaccagccccaggcacctgagcaatgtgagcagcacaggcagcattgacatggtggacagcccccagctggccaccctggctgatgaggtgtctgccagcctggccaagcagggcctgtag

SEQ ID NO: 43919 - DNA, 6816 bp, Artificial Sequence
  derived and/or modified sequence
ggacggccgagcggcagggcgctcgcgcgcgcccactagtggccggaggagaaggctcccgcggaggccgcgctgcccgccccctcccctggggaggctcgcgttcccgctgctcgcgcctgcgccgcccgccggcctcaggaacgcgccctcttcgccggcgcgcgccctcgcagtcaccgccacccaccagctccggcaccaacagcagcgccgctgccaccgcccaccttctgccgccgccaccacagccaccttctcctcctccgctgtcctctcccgtcctcgcctctgtcgactatcaggtgaactttgaaccaggatggctgagccccgccaggagttcgaagtgatggaagatcacgctgggacgtacgggttgggggacaggaaagatcaggggggctacaccatgcaccaagaccaagagggtgacacggacgctggcctgaaagaatctcccctgcagacccccactgaggacggatctgaggaaccgggctctgaaacctctgatgctaagagcactccaacagcggaagatgtgacagcacccttagtggatgagggagctcccggcaagcaggctgccgcgcagccccacacggagatcccagaaggaaccacagctgaagaagcaggcattggagacacccccagcctggaagacgaagctgctggtcacgtgacccaagagcctgaaagtggtaaggtggtccaggaaggcttcctccgagagccaggccccccaggtctgagccaccagctcatgtccggcatgcctggggctcccctcctgcctgagggccccagagaggccacacgccaaccttcggggacaggacctgaggacacagagggcggccgccacgcccctgagctgctcaagcaccagcttctaggagacctgcaccaggaggggccgccgctgaagggggcagggggcaaagagaggccggggagcaaggaggaggtggatgaagaccgcgacgtcgatgagtcctccccccaagactcccctccctccaaggcctccccagcccaagatgggcggcctccccagacagccgccagagaagccaccagcatcccaggcttcccagcggagggtgccatccccctccctgtggatttcctctccaaagtttccacagagatcccagcctcagagcccgacgggcccagtgtagggcgggccaaagggcaggatgcccccctggagttcacgtttcacgtggaaatcacacccaacgtgcagaaggagcaggcgcactcggaggagcatttgggaagggctgcatttccaggggcccctggagaggggccagaggcccggggcccctctttgggagaggacacaaaagaggctgaccttccagagccctctgaaaagcagcctgctgctgctccgcgggggaagcccgtcagccgggtccctcaactcaaagctcgcatggtcagtaaaagcaaagacgggactggaagcgatgacaaaaaagccaagacatccacacgttcctctgctaaaaccttgaaaaataggccttgccttagccccaaacaccccactcctggtagctcagaccctctgatccaaccctccagccctgctgtgtgcccagagccaccttcctctcctaaatacgtctcttctgtcacttcccgaactggcagttctggagcaaaggagatgaaactcaagggggctgatggtaaaacgaagatcgccacaccgcggggagcagcccctccaggccagaagggccaggccaacgccaccaggattccagcaaaaaccccgcccgctccaaagacaccacccagctctgcgactaagcaagtccagagaagaccaccccctgcagggcccagatctgagagaggtgaacctccaaaatcaggggatcgcagcggctacagcagccccggctccccaggcactcccggcagccgctcccgcaccccgtcccttccaaccccacccacccgggagcccaagaaggtggcagtggtccgtactccacccaagtcgccgtcttccgccaagagccgcctgcagacagcccccgtgcccatgccagacctgaagaatgtcaagtccaagatcggctccactgagaacctgaagcaccagccgggaggcgggaaggtgcagataattaataagaagctggatcttagcaacgtccagtccaagtgtggctcaaaggataatatcaaacacgtcccgggaggcggcagtgtgcaaatagtctacaaaccagttgacctgagcaaggtgacctccaagtgtggctcattaggcaacatccatcataaaccaggaggtggccaggtggaagtaaaatctgagaagcttgacttcaaggacagagtccagtcgaagattgggtccctggacaatatcacccacgtccctggcggaggaaataaaaagattgaaacccacaagctgaccttccgcgagaacgccaaagccaagacagaccacggggcggagatcgtgtacaagtcgccagtggtgtctggggacacgtctccacggcatctcagcaatgtctcctccaccggcagcatcgacatggtagactcgccccagctcgccacgctagctgacgaggtgtctgcctccctggccaagcagggtttgtgatcaggcccctggggcggtcaataattgtggagaggagagaatgagagagtgtggaaaaaaaaagaataatgacccggcccccgccctctgcccccagctgctcctcgcagttcggttaattggttaatcacttaacctgcttttgtcactcggctttggctcgggacttcaaaatcagtgatgggagtaagagcaaatttcatctttccaaattgatgggtgggctagtaataaaatatttaaaaaaaaacattcaaaaacatggccacatccaacatttcctcaggcaattccttttgattcttttttcttccccctccatgtagaagagggagaaggagaggctctgaaagctgcttctgggggatttcaagggactgggggtgccaaccacctctggccctgttgtgggggtgtcacagaggcagtggcagcaacaaaggatttgaaacttggtgtgttcgtggagccacaggcagacgatgtcaaccttgtgtgagtgtgacgggggttggggtggggcgggaggccacgggggaggccgaggcaggggctgggcagaggggagaggaagcacaagaagtgggagtgggagaggaagccacgtgctggagagtagacatccccctccttgccgctgggagagccaaggcctatgccacctgcagcgtctgagcggccgcctgtccttggtggccgggggtgggggcctgctgtgggtcagtgtgccaccctctgcagggcagcctgtgggagaagggacagcgggtaaaaagagaaggcaagctggcaggagggtggcacttcgtggatgacctccttagaaaagactgaccttgatgtcttgagagcgctggcctcttcctccctccctgcagggtagggggcctgagttgaggggcttccctctgctccacagaaaccctgttttattgagttctgaaggttggaactgctgccatgattttggccactttgcagacctgggactttagggctaaccagttctctttgtaaggacttgtgcctcttgggagacgtccacccgtttccaagcctgggccactggcatctctggagtgtgtgggggtctgggaggcaggtcccgagccccctgtccttcccacggccactgcagtcaccccgtctgcgccgctgtgctgttgtctgccgtgagagcccaatcactgcctatacccctcatcacacgtcacaatgtcccgaattcccagcctcaccaccccttctcagtaatgaccctggttggttgcaggaggtacctactccatactgagggtgaaattaagggaaggcaaagtccaggcacaagagtgggaccccagcctctcactctcagttccactcatccaactgggaccctcaccacgaatctcatgatctgattcggttccctgtctcctcctcccgtcacagatgtgagccagggcactgctcagctgtgaccctaggtgtttctgccttgttgacatggagagagccctttcccctgagaaggcctggccccttcctgtgctgagcccacagcagcaggctgggtgtcttggttgtcagtggtggcaccaggatggaagggcaaggcacccagggcaggcccacagtcccgctgtcccccacttgcaccctagcttgtagctgccaacctcccagacagcccagcccgctgctcagctccacatgcatagtatcagccctccacacccgacaaaggggaacacacccccttggaaatggttcttttcccccagtcccagctggaagccatgctgtctgttctgctggagcagctgaacatatacatagatgttgccctgccctccccatctgcaccctgttgagttgtagttggatttgtctgtttatgcttggattcaccagagtgactatgatagtgaaaagaaaaaaaaaaaaaaaaaaggacgcatgtatcttgaaatgcttgtaaagaggtttctaacccaccctcacgaggtgtctctcacccccacactgggactcgtgtggcctgtgtggtgccaccctgctggggcctcccaagttttgaaaggctttcctcagcacctgggacccaacagagaccagcttctagcagctaaggaggccgttcagctgtgacgaaggcctgaagcacaggattaggactgaagcgatgatgtccccttccctacttccccttggggctccctgtgtcagggcacagactaggtcttgtggctggtctggcttgcggcgcgaggatggttctctctggtcatagcccgaagtctcatggcagtcccaaaggaggcttacaactcctgcatcacaagaaaaaggaagccactgccagctggggggatctgcagctcccagaagctccgtgagcctcagccacccctcagactgggttcctctccaagctcgccctctggaggggcagcgcagcctcccaccaagggccctgcgaccacagcagggattgggatgaattgcctgtcctggatctgctctagaggcccaagctgcctgcctgaggaaggatgacttgacaagtcaggagacactgttcccaaagccttgaccagagcacctcagcccgctgaccttgcacaaactccatctgctgccatgagaaaagggaagccgcctttgcaaaacattgctgcctaaagaaactcagcagcctcaggcccaattctgccacttctggtttgggtacagttaaaggcaaccctgagggacttggcagtagaaatccagggcctcccctggggctggcagcttcgtgtgcagctagagctttacctgaaaggaagtctctgggcccagaactctccaccaagagcctccctgccgttcgctgagtcccagcaattctcctaagttgaagggatctgagaaggagaaggaaatgtggggtagatttggtggtggttagagatatgcccccctcattactgccaacagtttcggctgcatttcttcacgcacctcggttcctcttcctgaagttcttgtgccctgctcttcagcaccatgggccttcttatacggaaggctctgggatctcccccttgtggggcaggctcttggggccagcctaagatcatggtttagggtgatcagtgctggcagataaattgaaaaggcacgctggcttgtgatcttaaatgaggacaatccccccagggctgggcactcctcccctcccctcacttctcccacctgcagagccagtgtccttgggtgggctagataggatatactgtatgccggctccttcaagctgctgactcactttatcaatagttccatttaaattgacttcagtggtgagactgtatcctgtttgctattgcttgttgtgctatggggggaggggggaggaatgtgtaagatagttaacatgggcaaagggagatcttggggtgcagcacttaaactgcctcgtaacccttttcatgatttcaaccacatttgctagagggagggagcagccacggagttagaggcccttggggtttctcttttccactgacaggctttcccaggcagctggctagttcattccctccccagccaggtgcaggcgtaggaatatggacatctggttgctttggcctgctgccctctttcaggggtcctaagcccacaatcatgcctccctaagaccttggcatccttccctctaagccgttggcacctctgtgccacctctcacactggctccagacacacagcctgtgcttttggagctgagatcactcgcttcaccctcctcatctttgttctccaagtaaagccacgaggtcggggcgagggcagaggtgatcacctgcgtgtcccatctacagacctgcagcttcataaaacttctgatttctcttcagctttgaaaagggttaccctgggcactggcctagagcctcacctcctaatagacttagccccatgagtttgccatgttgagcaggactatttctggcacttgcaagtcccatgatttcttcggtaattctgagggtggggggagggacatgaaatcatcttagcttagctttctgtctgtgaatgtctatatagtgtattgtgtgttttaacaaatgatttacactgactgttgctgtaaaagtgaatttggaaataaagttattactctgattaaa

SEQ ID NO: 43920 - DNA, 2331 bp, Artificial Sequence
  derived and/or modified sequence
atggctgagccccgccaggagttcgaagtgatggaagatcacgctgggacgtacgggttgggggacaggaaagatcaggggggctacaccatgcaccaagaccaagagggtgacacggacgctggcctgaaagaatctcccctgcagacccccactgaggacggatctgaggaaccgggctctgaaacctctgatgctaagagcactccaacagcggaagatgtgacagcacccttagtggatgagggagctcccggcaagcaggctgccgcgcagccccacacggagatcccagaaggaaccacagctgaagaagcaggcattggagacacccccagcctggaagacgaagctgctggtcacgtgacccaagagcctgaaagtggtaaggtggtccaggaaggcttcctccgagagccaggccccccaggtctgagccaccagctcatgtccggcatgcctggggctcccctcctgcctgagggccccagagaggccacacgccaaccttcggggacaggacctgaggacacagagggcggccgccacgcccctgagctgctcaagcaccagcttctaggagacctgcaccaggaggggccgccgctgaagggggcagggggcaaagagaggccggggagcaaggaggaggtggatgaagaccgcgacgtcgatgagtcctccccccaagactcccctccctccaaggcctccccagcccaagatgggcggcctccccagacagccgccagagaagccaccagcatcccaggcttcccagcggagggtgccatccccctccctgtggatttcctctccaaagtttccacagagatcccagcctcagagcccgacgggcccagtgtagggcgggccaaagggcaggatgcccccctggagttcacgtttcacgtggaaatcacacccaacgtgcagaaggagcaggcgcactcggaggagcatttgggaagggctgcatttccaggggcccctggagaggggccagaggcccggggcccctctttgggagaggacacaaaagaggctgaccttccagagccctctgaaaagcagcctgctgctgctccgcgggggaagcccgtcagccgggtccctcaactcaaagctcgcatggtcagtaaaagcaaagacgggactggaagcgatgacaaaaaagccaagacatccacacgttcctctgctaaaaccttgaaaaataggccttgccttagccccaaacaccccactcctggtagctcagaccctctgatccaaccctccagccctgctgtgtgcccagagccaccttcctctcctaaatacgtctcttctgtcacttcccgaactggcagttctggagcaaaggagatgaaactcaagggggctgatggtaaaacgaagatcgccacaccgcggggagcagcccctccaggccagaagggccaggccaacgccaccaggattccagcaaaaaccccgcccgctccaaagacaccacccagctctgcgactaagcaagtccagagaagaccaccccctgcagggcccagatctgagagaggtgaacctccaaaatcaggggatcgcagcggctacagcagccccggctccccaggcactcccggcagccgctcccgcaccccgtcccttccaaccccacccacccgggagcccaagaaggtggcagtggtccgtactccacccaagtcgccgtcttccgccaagagccgcctgcagacagcccccgtgcccatgccagacctgaagaatgtcaagtccaagatcggctccactgagaacctgaagcaccagccgggaggcgggaaggtgcagataattaataagaagctggatcttagcaacgtccagtccaagtgtggctcaaaggataatatcaaacacgtcccgggaggcggcagtgtgcaaatagtctacaaaccagttgacctgagcaaggtgacctccaagtgtggctcattaggcaacatccatcataaaccaggaggtggccaggtggaagtaaaatctgagaagcttgacttcaaggacagagtccagtcgaagattgggtccctggacaatatcacccacgtccctggcggaggaaataaaaagattgaaacccacaagctgaccttccgcgagaacgccaaagccaagacagaccacggggcggagatcgtgtacaagtcgccagtggtgtctggggacacgtctccacggcatctcagcaatgtctcctccaccggcagcatcgacatggtagactcgccccagctcgccacgctagctgacgaggtgtctgcctccctggccaagcagggtttgtga

SEQ ID NO: 43921 - DNA, 2331 bp, Artificial Sequence
  derived and/or modified sequence
atggccgagccccggcaggagttcgaggtgatggaggaccacgccggtacatatgggcttggcgaccgtaaggaccagggcggctatacaatgcaccaggatcaggagggcgatacggacgcaggcttgaaggaatctccattgcaaacaccaacggaggatgggagcgaggagcccggctcggagacatctgatgccaaaagcacaccaacagctgaggacgtcaccgccccgctggtggacgagggtgctccaggtaagcaagccgccgctcagccacatactgagatccctgaaggaacgacagctgaggaggccggcattggtgacacgccgtccttggaggacgaagctgccggccacgtgacccaggaaccagaatcaggtaaggtcgtgcaggagggtttcctccgcgaacctggcccgcctgggctgtctcaccaactcatgagcggcatgccaggcgcgcctctgctgcccgagggccctcgcgaagctactagacagccgtctggaacaggaccagaggatactgaggggggtcgacatgcaccagaactgctgaaacatcagttactcggcgaccttcaccaggaagggccaccactgaaaggagctggaggcaaagagcgacccggaagtaaggaggaagttgatgaggatcgagatgtcgacgagtcatctccccaggactcacctccatcaaaagcctcccccgcgcaagatggccgaccaccgcagacagcagcaagagaggccacgagcatcccaggtttcccagctgaaggcgcgatcccccttcccgtggattttctgtcaaaggtgtctacggagatcccggcaagcgagccagatggcccaagcgttggccgggcaaagggacaggacgcgcctctcgagtttacatttcacgtggagattacaccaaatgttcagaaggagcaggcgcattctgaggaacacctggggcgggctgctttcccaggtgcgccaggcgaaggccctgaagctaggggcccatctctgggggaagatactaaagaggcagatctgccggagccttctgaaaaacagcccgccgcggccccaaggggaaagcctgtctccagagttcctcagctgaaggctaggatggtatctaagtccaaggatggaaccggcagcgacgataagaaggctaaaaccagcactagaagtagcgctaaaacactgaaaaaccgtccctgccttagtccaaaacatcctacaccaggatcgtccgatcccctcatccaaccatcctcaccagcagtgtgccctgaaccaccatcctcaccgaaatacgtctcgtcggtgacatccagaaccggctcttctggcgccaaagagatgaagttgaagggggctgacggaaaaacaaaaatagccacccctcggggggcggccccaccgggacagaagggacaagcgaatgctactcggattccggccaaaactccgcccgccccaaagacaccaccaagctccgccaccaaacaggtccagcggagaccaccccctgcaggacctagatctgagcgtggtgagccccccaaatctggagatcgcagtggctattcctccccaggctcccccggcaccccgggcagccgttccaggactccttctttgcctaccccgcccacccgcgagccaaagaaggtcgccgttgtcagaacccctcctaagagcccctcctccgctaaatcgcggctccagacagcccccgtgcctatgccagacctgaagaatgtgaaatccaagatcgggtccaccgagaatctgaagcaccagcccggcggagggaaagtgcagattataaacaaaaagctggacctgtcaaacgtacagagcaagtgtggaagcaaagacaacattaaacatgtcccaggaggaggctcagtgcagatcgtctacaaaccagtggatttatctaaggtcacctccaaatgcggcagtctcggaaatattcaccataaacccggggggggccaggtggaggttaagtccgaaaagctggattttaaggatagggtgcagtccaagatcggttcattggataacattacccacgttcccgggggcggtaataaaaagatcgagactcataagctaaccttcagggaaaacgctaaagccaaaactgaccacggcgcagaaatcgtttacaaatccccagtggtaagtggagatacatcccctcgccatttgtcaaatgtctcttcaaccggatctatagatatggtggactctcctcagctagcgaccctggccgacgaagtaagcgcatcactcgccaagcaaggactatag

SEQ ID NO: 43922 - DNA, 2331 bp, Artificial Sequence
  derived and/or modified sequence
atggccgagccccggcaggagttcgaggtgatggaggaccacgccgggacctacgggctcggagatcgcaaggatcagggaggctacaccatgcatcaagatcaagagggggacactgacgccggactgaaagaatcaccactccagacacccaccgaggatggctcagaagagcccggttccgagacatctgatgctaagtccacaccgacagccgaggacgtcactgcaccactggtcgatgagggcgcgcctggcaaacaggccgccgctcaacctcacactgaaatccccgaagggactacggctgaagaagccggcattggcgatactccatccctggaggacgaggcggcagggcacgtgactcaagaaccggagagcggtaaggtcgtgcaagaaggtttcctgcgtgagccaggaccccccggcctgtcccatcaattaatgagcggaatgcccggcgcgccactccttcctgagggcccgcgcgaagcaacgcggcagcctagcggtaccggtccggaggataccgagggaggccgtcacgctcctgaactgctgaagcatcagctgctgggcgatctgcatcaggagggcccacctctgaagggcgccggaggcaaggagagacctggctctaaggaggaagtggatgaggatcgcgatgtggacgagtccagccctcaggatagccccccttccaaagcctccccagcacaggacggaaggcccccacagaccgcagcacgagaagctactagtattcctgggttccccgccgagggagctatcccactacccgtagacttcttgagcaaagttagcacagagattcctgccagcgagccggatggaccatctgtgggacgtgctaagggtcaggacgcacctctggaattcacattccatgtggaaatcacccctaacgtgcaaaaagagcaggctcactcagaggaacatctaggccgcgcggccttccctggagcccctggcgaaggaccagaagccaggggaccaagtcttggcgaggatacaaaagaggcagacttacctgagccgagtgaaaagcagccggccgctgctccgcggggcaagccagtctctcgggttccacagctgaaagcccgaatggtgagtaagagcaaggatggcacagggagcgacgacaaaaaagcaaagaccagtacacgaagttcagcaaagactctgaagaaccggccctgcctgagcccgaagcatccaacccctggctcatccgaccctctcatccagccctctagtcccgccgtatgtccggaacctcctagcagtccaaagtacgttagttcagttactagtaggactgggtcatctggcgccaaggagatgaaactgaaaggagccgatgggaaaactaaaatcgccactccaagaggcgccgccccgccaggtcaaaaaggccaggctaatgccacccgtatcccagctaaaaccccgccagcccccaagacacccccaagctccgcgaccaagcaggtgcagaggaggccgccaccagccgggcctcggtccgaaagaggcgaacctccaaaaagtggcgatcggtctggttattcctccccaggctctccgggcacaccaggatcccggtctaggacacccagcctgcctacaccacccaccagagaacctaagaaggtggcagtcgtgcgcactccccctaaaagcccaagttcggcgaagtcccggttgcaaacagcgccagtgccaatgcctgacctgaaaaatgttaagagcaagattggaagcaccgaaaacttgaaacaccaaccgggaggtggaaaggttcagatcattaataaaaaactggatctttctaacgttcagtctaagtgcggtagcaaagataacattaagcatgttccaggtggtggaagtgtccagatcgtgtacaaaccagtggacctgagcaaggtaacatcaaaatgcgggtccctgggcaacatacatcataaaccggggggcgggcaggtcgaggtgaaaagcgaaaagctggactttaaggatcgtgttcaaagcaagatcggttcgctggacaacatcacccatgtgcccggcggcgggaataagaaaatcgaaacccataagttgacctttagggagaacgctaaggccaaaaccgatcacggcgctgagatcgtctacaaaagtccagtcgtgagtggggacacgagcccccgacacctgagcaacgtgtctagtactggctctattgacatggttgactctccacagctggccaccctcgccgacgaagtgagcgcgtcccttgccaagcagggcctgtag

SEQ ID NO: 43923 - DNA, 2331 bp, Artificial Sequence
  derived and/or modified sequence
atggctgaaccaaggcaggaatttgaagtgatggaggatcatgccggaacttacggccttggagacaggaaagatcagggagggtacactatgcatcaagaccaagaaggagacacagatgccggactcaaagaatccccactgcagacacccaccgaagatggaagtgaagagcctggcagtgagactagcgatgctaagtccactccgacagccgaggacgtgacagcgccactggtggatgagggagcccctggcaaacaggccgcagcacagccccataccgagatcccagagggcacaacagccgaggaagctggtataggcgacacaccttcattggaggatgaagctgccggacacgtaacacaggagccagagagcggaaaggtggttcaggaggggttcctacgtgaaccaggccctcccggactgtcgcaccaattgatgtctggtatgcctggggctccactgctcccggagggccctcgcgaggctacccgccagccttccggaacaggtcccgaggatacagaaggaggccgacatgccccagaactgcttaagcatcagctgctgggtgatttacaccaggaggggcctcccttgaagggggcagggggaaaagaacgcccaggatcaaaggaggaggtcgatgaagatcgagatgttgacgaaagctcaccacaagactccccaccctccaaagcatcgcccgctcaagacggtaggccacctcagacagccgctcgcgaagccacatccattccaggatttcccgcagagggagcaatcccactccctgtggatttcttgtccaaggtgtcaactgaaatcccagcatctgagcccgacggcccaagcgtcggtagggcaaaaggacaggacgcgccactcgagtttacctttcacgtcgaaattactcccaacgtccagaaggagcaggcgcacagtgaggaacatctaggcagagcggcattccctggcgctcccggtgagggaccggaagcacgcggtccaagtctcggtgaagatacaaaggaagccgacctcccagagccatccgagaagcagccagcagccgctccacggggtaaacctgtgtcaagagtgcctcagctgaaggccagaatggtctccaagtctaaagatggaaccggtagcgatgacaagaaggcaaagaccagcacgcgaagctcagcaaaaacgctgaagaaccgaccttgcctgagccctaagcaccccactcccggatcatctgatcccctcattcagccaagcagccctgcagtatgtcctgagccccctagttccccaaagtacgtgtctagcgtcacaagcagaaccggcagtagcggggctaaggagatgaagttaaaaggcgctgatgggaagacaaaaattgcaacccctcgaggggcagccccaccaggtcagaaggggcaagctaacgcaacgcggattcctgctaaaactcctcctgctcctaaaacgcctccctccagtgcaaccaaacaggtgcagcggcgtcctccaccagcagggcctcggtctgaaagaggcgagccaccgaagagtggggatcggagcggctacagctctcctggctcccctggcacccccggtagcagaagtaggacaccaagtcttccgaccccgccaaccagggagccaaaaaaggttgctgtagtgcggacccctccaaagtcaccttcatccgccaaatctcgactgcaaaccgcacccgttcccatgcctgatttgaagaacgtgaaatccaagattgggtccaccgagaatttgaagcatcagcccggaggaggcaaggtacaaattatcaataaaaaactggacctcagtaatgtccaatccaagtgcggctcgaaggataatatcaaacacgtaccagggggaggttccgtccagattgtgtataagccagtggatttaagcaaagtgactagcaagtgtggaagcctcgggaacattcaccataaacccggaggagggcaagtggaggtgaaaagcgaaaaactagatttcaaggaccgagttcagtccaagattggcagcctcgataacatcacccatgtacccggtggcggaaataaaaagattgaaacccacaagctgacctttagagaaaatgctaaagccaaaacagaccacggtgctgaaatcgtatataagtcccctgtcgtaagcggcgatacttctccaaggcatctcagcaatgttagcagcaccggctctatcgatatggtcgatagtcctcaattggcaactctggctgatgaggtctccgcaagcctggccaaacaaggactctag

SEQ ID NO: 43924 - DNA, 2331 bp, Artificial Sequence
  derived and/or modified sequence
atggcggagcctcgacaggaattcgaggtcatggaggatcacgcgggaacctatgggctgggggatcggaaagatcaggggggttatacgatgcatcaggaccaggagggcgacacagacgccggactgaaggagagcccactgcagactcctaccgaagacggcagcgaagagcccggttctgagaccagcgacgccaaatcgacccccacagccgaagacgtcacggcccctttggtagatgagggagctccaggcaaacaggccgctgctcaaccccataccgaaattccggagggcacgaccgccgaggaggcagggatcggtgacacaccgtccctggaggacgaagcggctgggcatgtgacacaagaacctgagtctggaaaggttgtccaggaggggttcctacgggaaccgggaccgcctggtctcagtcatcagctgatgtccggaatgccaggcgctccactattacccgaaggacctagagaggccactaggcagcctagtggaactggtcccgaagacaccgaaggaggtagacacgcccctgaactgctgaaacaccagctcctgggcgatctgcatcaggaaggacctccgctgaagggagcaggtgggaaggaacgaccaggctctaaagaagaagtggatgaggatcgggacgttgatgagagttccccacaggatagccccccaagcaaggccagtccggcacaggacgggcgacccccacagactgccgctcgggaggcaaccagcattcccggtttccctgcagagggagcaattcctctgcctgtggatttcctttccaaggtgtccacagagataccggcaagtgaaccagatgggccttcggtgggccgtgccaaggggcaagatgccccattggagtttacctttcatgtggaaatcacgccaaacgtgcagaaagaacaggcccattccgaagagcatctgggtagggccgctttcccaggggctcccggtgaaggcccagaagcgagaggccctagtctgggagaagatacgaaagaggccgatctaccagagcccagcgaaaagcagcccgcagcagcaccaagaggcaagcctgtgtcccgggtccctcagttaaaggccaggatggtctccaaatcaaaagacggtacggggtccgatgataaaaaagctaagacatccactagatcaagcgcaaagaccctcaagaacaggccatgcttaagccccaagcaccctacgcccggtagctcagacccgctgatccaaccgagctcgcccgcagtgtgccctgaacctccttcttctcccaaatacgttagctctgttaccagcaggacagggagtagcggggctaaagaaatgaaattgaaaggagccgacgggaagactaaaatcgccacccctcggggtgctgcgcctccagggcagaaaggacaggctaacgccaccagaatccccgcaaaaaccccgccagcacccaagaccccacccagttctgccactaaacaagtacaacgtaggcccccacctgctgggcctagaagtgagcgaggtgagccgcctaagtccggtgacagaagcggatacagctcccccggtagccctggcacacccggtagtagaagtcggaccccctcccttcccacaccgcctacgcgcgaacctaaaaaagtagcagtggtgcggacaccccctaagtcaccttcctccgccaagagtcgccttcagactgcacctgtgcccatgcctgatttgaagaacgtgaagtctaaaataggttctaccgagaacctcaagcaccaaccgggtgggggaaaggtacagattatcaataagaagcttgacttgtctaatgtacaaagcaagtgtggctcgaaggacaacatcaaacatgtcccgggaggagggtccgtacagattgtctacaagcctgtagatttgagcaaagtcacatccaagtgtggctcccttggcaatatacatcacaagcccggagggggtcaggtggaagttaaaagcgaaaaactcgatttcaaagacagggtgcaatccaaaataggtagtcttgataacataacccacgtccctggcggtgggaacaaaaaaatcgaaacccataagctgacttttcgggagaatgcgaaagcaaagacagaccacggagccgagattgtgtataaatccccggtagtcagtggcgacacaagcccgcgacacctcagcaacgtgtcatcaacggggagcattgacatggtggacagcccccagctcgccactctggcagacgaggtctcagcatccctggccaagcagggcttatag

SEQ ID NO: 43925 - DNA, 2331 bp, Artificial Sequence
  derived and/or modified sequence
atggccgagcccagacaggagttcgaggtgatggaggaccacgccggcacctacggcctgggcgacagaaaggaccagggcggctacaccatgcaccaggaccaggagggcgacaccgacgccggcctgaaggagagccccctgcagacccccaccgaggacggcagcgaggagcccggcagcgagaccagcgacgccaagagcacccccaccgccgaggacgtgaccgcccccctggtggacgagggcgcccccggcaagcaggccgccgcccagccccacaccgagatccccgagggcaccaccgccgaggaggccggcatcggcgacacccccagcctggaggacgaggccgccggccacgtgacccaggagcccgagagcggcaaggtggtgcaggagggcttcctgagagagcccggcccccccggcctgagccaccagctgatgagcggcatgcccggcgcccccctgctgcccgagggccccagagaggccaccagacagcccagcggcaccggccccgaggacaccgagggcggcagacacgcccccgagctgctgaagcaccagctgctgggcgacctgcaccaggagggcccccccctgaagggcgccggcggcaaggagagacccggcagcaaggaggaggtggacgaggacagagacgtggacgagagcagcccccaggacagcccccccagcaaggccagccccgcccaggacggcagacccccccagaccgccgccagagaggccaccagcatccccggcttccccgccgagggcgccatccccctgcccgtggacttcctgagcaaggtgagcaccgagatccccgccagcgagcccgacggccccagcgtgggcagagccaagggccaggacgcccccctggagttcaccttccacgtggagatcacccccaacgtgcagaaggagcaggcccacagcgaggagcacctgggcagagccgccttccccggcgcccccggcgagggccccgaggccagaggccccagcctgggcgaggacaccaaggaggccgacctgcccgagcccagcgagaagcagcccgccgccgcccccagaggcaagcccgtgagcagagtgccccagctgaaggccagaatggtgagcaagagcaaggacggcaccggcagcgacgacaagaaggccaagaccagcaccagaagcagcgccaagaccctgaagaacagaccctgcctgagccccaagcaccccacccccggcagcagcgaccccctgatccagcccagcagccccgccgtgtgccccgagccccccagcagccccaagtacgtgagcagcgtgaccagcagaaccggcagcagcggcgccaaggagatgaagctgaagggcgccgacggcaagaccaagatcgccacccccagaggcgccgccccccccggccagaagggccaggccaacgccaccagaatccccgccaagaccccccccgcccccaagaccccccccagcagcgccaccaagcaggtgcagagaagacccccccccgccggccccagaagcgagagaggcgagccccccaagagcggcgacagaagcggctacagcagccccggcagccccggcacccccggcagcagaagcagaacccccagcctgcccaccccccccaccagagagcccaagaaggtggccgtggtgagaaccccccccaagagccccagcagcgccaagagcagactgcagaccgcccccgtgcccatgcccgacctgaagaacgtgaagagcaagatcggcagcaccgagaacctgaagcaccagcccggcggcggcaaggtgcagatcatcaacaagaagctggacctgagcaacgtgcagagcaagtgcggcagcaaggacaacatcaagcacgtgcccggcggcggcagcgtgcagatcgtgtacaagcccgtggacctgagcaaggtgaccagcaagtgcggcagcctgggcaacatccaccacaagcccggcggcggccaggtggaggtgaagagcgagaagctggacttcaaggacagagtgcagagcaagatcggcagcctggacaacatcacccacgtgcccggcggcggcaacaagaagatcgagacccacaagctgaccttcagagagaacgccaaggccaagaccgaccacggcgccgagatcgtgtacaagagccccgtggtgagcggcgacaccagccccagacacctgagcaacgtgagcagcaccggcagcatcgacatggtggacagcccccagctggccaccctggccgacgaggtgagcgccagcctggccaagcagggcctgtag

SEQ ID NO: 43926 - protein, 412 aa, Artificial Sequence
  derived and/or modified sequence
MAEPRQEFEVMEDHAGTYGLGDRKDQGGYTMHQDQEGDTDAGLKESPLQTPTEDGSEEPGSETSDAKSTPTAEAEEAGIGDTPSLEDEAAGHVTQARMVSKSKDGTGSDDKKAKGADGKTKIATPRGAAPPGQKGQANATRIPAKTPPAPKTPPSSGEPPKSGDRSGYSSPGSPGTPGSRSRTPSLPTPPTREPKKVAVVRTPPKSPSSAKSRLQTAPVPMPDLKNVKSKIGSTENLKHQPGGGKVQIINKKLDLSNVQSKCGSKDNIKHVPGGGSVQIVYKPVDLSKVTSKCGSLGNIHHKPGGGQVEVKSEKLDFKDRVQSKIGSLDNITHVPGGGNKKIETHKLTFRENAKAKTDHGAEIVYKSPVVSGDTSPRHLSNVSSTGSIDMVDSPQLATLADEVSASLAKQGL

SEQ ID NO: 43927 - DNA, 1239 bp, Artificial Sequence
  derived and/or modified sequence
atggccgagcccagacaggagttcgaggtgatggaggaccacgccggcacctacggcctgggcgacagaaaggaccagggcggctacaccatgcaccaggaccaggagggcgacaccgacgccggcctgaaggagagccccctgcagacccccaccgaggacggcagcgaggagcccggcagcgagaccagcgacgccaagagcacccccaccgccgaggccgaggaggccggcatcggcgacacccccagcctggaggacgaggccgccggccacgtgacccaggccagaatggtgagcaagagcaaggacggcaccggcagcgacgacaagaaggccaagggcgccgacggcaagaccaagatcgccacccccagaggcgccgccccccccggccagaagggccaggccaacgccaccagaatccccgccaagaccccccccgcccccaagaccccccccagcagcggcgagccccccaagagcggcgacagaagcggctacagcagccccggcagccccggcacccccggcagcagaagcagaacccccagcctgcccaccccccccaccagagagcccaagaaggtggccgtggtgagaaccccccccaagagccccagcagcgccaagagcagactgcagaccgcccccgtgcccatgcccgacctgaagaacgtgaagagcaagatcggcagcaccgagaacctgaagcaccagcccggcggcggcaaggtgcagatcatcaacaagaagctggacctgagcaacgtgcagagcaagtgcggcagcaaggacaacatcaagcacgtgcccggcggcggcagcgtgcagatcgtgtacaagcccgtggacctgagcaaggtgaccagcaagtgcggcagcctgggcaacatccaccacaagcccggcggcggccaggtggaggtgaagagcgagaagctggacttcaaggacagagtgcagagcaagatcggcagcctggacaacatcacccacgtgcccggcggcggcaacaagaagatcgagacccacaagctgaccttcagagagaacgccaaggccaagaccgaccacggcgccgagatcgtgtacaagagccccgtggtgagcggcgacaccagccccagacacctgagcaacgtgagcagcaccggcagcatcgacatggtggacagcccccagctggccaccctggccgacgaggtgagcgccagcctggccaagcagggcctgtag

SEQ ID NO: 43928 - DNA, 1239 bp, Artificial Sequence
  derived and/or modified sequence
atggcagagccccgccaggagttcgaggtcatggaggaccacgccggtacatacgggctgggcgaccgcaaggatcagggcggctatacgatgcatcaagatcaggagggagacaccgatgccggactcaaagaatccccactccaaacgcctacagaggatggaagcgaggagccaggaagtgagacctcagacgctaaatcaacccccacagccgaggctgaggaggctgggatcggagatacacccagccttgaagacgaagctgcagggcatgtcacgcaagctcgcatggtgtctaagtccaaagatgggactggctcggacgataagaaagctaaaggagccgatggaaagacgaaaattgcgactcccagaggggcagcgccaccgggtcagaagggacaggctaatgccacgcggatacctgcaaaaaccccccctgctccaaaaactcctcccagctctggtgaacctcctaaatcaggcgatagaagcggatattcgtcccccggctcaccaggaacacccggatccaggtcgaggacaccctcgctgccaaccccaccaactcgcgaacccaagaaggtcgccgttgtccggaccccaccgaaatccccctcatctgccaaatccagacttcaaacagcgcccgtgcccatgcccgatctgaaaaacgtaaaatcaaaaatcggctctacggagaacctcaaacaccagccaggaggcggcaaggtccagatcatcaacaagaaactggacctgtccaatgtccagtccaaatgcggttcaaaggataacatcaagcatgtaccagggggcggaagtgtccagatcgtgtataagcccgtagatctgtcaaaggtaacgagcaagtgcggttccctggggaatatccaccacaaaccaggcggcggccaggtcgaagtgaagtccgagaaactggactttaaagacagagtgcagagcaaaatcggatcactggacaatatcacgcacgtgccggggggcggtaacaagaagatagagactcacaagctgaccttcagggagaatgcaaaggccaagactgaccacggtgcggagattgtatacaagagtccagtcgtgagtggcgacaccagccctagacacctcagcaacgtgagcagcactggcagcatagatatggtggattcaccccaattagcaacgttggccgatgaagtgtccgcaagcctggccaaacagggcttatag

SEQ ID NO: 43929 - DNA, 1239 bp, Artificial Sequence
  derived and/or modified sequence
atggccgagccccggcaggagtttgaggtgatggaggaccatgctggcacctacggcctgggggacaggaaggaccagggcggctacaccatgcaccaggaccaggagggggacacagatgctggcctgaaggagagccccctgcagacccccacagaagatggcagcgaggagcccggcagcgagaccagtgatgccaagagcacccccacagctgaggccgaggaggccggcattggagacacccccagcctggaggatgaagctgctggccacgtgacccaggccaggatggtgtccaagagcaaggatggcaccggcagtgatgacaagaaggccaagggagcagatggcaagaccaagatcgccacccccaggggggccgcccctcctggccagaagggccaggccaatgccacccgcatcccagccaagaccccaccagcccccaagaccccacccagcagcggggagccccccaagagcggggacaggagcggctacagcagccctggcagccctggcaccccaggcagccgcagcaggacccccagcctgcccaccccacccacccgggagcccaagaaggtggccgtggtgaggaccccacccaagagccccagcagcgccaagagccggctgcagacagcccctgtgcccatgccagacctgaagaatgtgaagagcaagattggcagcacagagaacctgaagcaccagcccggcggcggcaaggtgcagatcatcaacaagaagctggacctgagcaatgtgcagagcaaatgtggcagcaaggacaacatcaagcacgtgcctgggggcggctctgtgcagatcgtgtacaagcctgtggacctgagcaaggtgaccagcaaatgtggcagcctgggcaacatccaccacaagccaggcggcggccaggtggaggtgaagtctgagaagctggacttcaaggacagagtgcagagcaagattggcagcctggacaacatcacccacgtgcctgggggcggcaacaagaagattgagacccacaagctgaccttcagagaaaatgccaaggccaagacagaccatggagctgagatcgtgtacaagagccctgtggtgtctggggacaccagccccaggcacctgagcaatgtgagcagcacaggcagcattgacatggtggacagcccccagctggccaccctggctgatgaggtgtctgccagcctggccaagcagggcctgtag

SEQ ID NO: 43930 - DNA, 1239 bp, Artificial Sequence
  derived and/or modified sequence
atggccgagccccggcaggagttcgaggtgatggaggaccacgccggaacctacgggctgggggatcgcaaggaccaggggggttacaccatgcaccaggaccaggagggcgatactgatgcaggtcttaaggagtcaccactgcagactcccaccgaagatggaagcgaggagcctggatcagaaacaagtgatgccaagtctactcctacagcagaggcagaggaagccggcattggggatacgccaagtctggaggatgaggcagcggggcatgttactcaggcccgcatggtaagtaagtcaaaggacggcacgggatccgacgacaagaaagcgaagggcgccgacggtaaaaccaagatcgcgaccccacggggcgccgcaccgccaggacagaaaggccaagctaatgccaccaggatacctgccaaaacgccacctgcgcccaaaacacctccttcttcaggtgagcctccaaagagcggtgatcgctctggatattctagcccagggagccccggaacgcctggcagtagaagccgtactcccagtctgcctacccccccaacccgggagcctaaaaaggtggccgttgtgagaacaccacctaagtctccttcatctgcaaaaagtaggctgcagactgcgccggtgccgatgccggatctgaagaatgtgaagagcaagattggcagcactgaaaatctcaagcaccagcccggcgggggcaaggtccagatcattaataagaaactggacttatcaaatgtgcaatccaagtgtggaagtaaagataatattaagcacgtgcccggcggagggtctgtgcagattgtctacaagcccgttgatctgagcaaagtgacctcaaaatgtggcagccttgggaatattcatcacaaacccggcggaggccaagtggaagtcaagagcgaaaaattggacttcaaagacagggtccagtcaaaaattgggtctctcgataatattacacatgtccctggcgggggcaataaaaaaatcgagacccacaaacttacttttcgggagaacgccaaggcgaaaactgatcatggggcagagatcgtgtataagagccctgtcgtgtcaggcgacacatcccccaggcatctgagcaacgtatcttcaacagggagtatcgatatggtagacagccctcagctcgccaccctggcagatgaagtgtctgccagtttggctaaacagggactgtag

SEQ ID NO: 43931 - DNA, 2438 bp, Artificial Sequence
  derived and/or modified sequence
caggtgagctttgaaccaggatggctgagccccgccaggagttcgaagtgatggaagatcacgctgggacgtacgggttgggggacaggaaagatcaggggggctacaccatgcaccaagaccaagagggtgacacggacgctggcctgaaagaatctcccctgcagacccccactgaggacggatctgaggaaccgggctctgaaacctctgatgctaagagcactccaacagcggaagctgaagaagcaggcattggagacacccccagcctggaagacgaagctgctggtcacgtgacccaagctcgcatggtcagtaaaagcaaagacgggactggaagcgatgacaaaaaagccaagggggctgatggtaaaacgaagatcgccacaccgcggggagcagcccctccaggccagaagggccaggccaacgccaccaggattccagcaaaaaccccacccgctccaaagacaccacccagctctggtgaacctccaaaatcaggggatcgcagcggctacagcagccccggctccccaggcactcccggcagccgctcccgcaccccgtcccttccaaccccacccacccgggagcccaagaaggtggcggtggtccgtactccacccaagtcgccgtcttccgccaagagccgcctgcagacagcccccgtgcccatgccagacctgaagaacgtcaagtccaagatcggctccactgagaacctgaagcaccagccgggaggcgggaaggtgcagataattaataagaagctggatcttagcaacgtccagtccaagtgtggctcaaaggataatatcaaacacgtcccgggaggcggcagtgtgcaaatagtctacaaaccagttgacctgagcaaggtgacctccaagtgtggctcattaggcaacatccatcataaaccaggaggtggccaggtggaagtaaaatctgagaagcttgacttcaaggacagagtccagtcgaagattgggtccctggacaatatcacccacgtccctggcggaggaaataaaaagattgaaacccacaagctgaccttccgcgagaacgccaaagccaagacagaccacggggcggagatcgtgtacaagtcgccagtggtgtctggggacacgtctccacggcatctcagcaatgtctcctccaccggcagcatcgacatggtagactcgccccagctcgccacgctagctgacgaggtgtctgcctccctggccaagcagggtttgtgatcaggcccctggggcggtcaataatcgtggagaggagagaatgagagagtgtggaaaaaaaaagaataatgacccggcccccgccctctgcccccagctgctcctcgcagttcggttaattggttaatcacttaacctgcttttgtcactcggctttggctcgggacttcaaaatcagtgatgggagtaagagcaaatttcatctttccaaattgatgggtgggctagtaataaaatattttaaaaaaaaacattcaaaaacatggccacatccaacatttcctcaggcaattccttttgattcttttttcttcccccctccatgtagaagagggggaaggagaggctctgaaagctgcttctgggggatttcaagggactgggggtgccaaccacctctggccctgttgtgggggtgtcacagaggcagtggcagcaacaaaggatttgaaacttggtgtgttcgtggagccacaggcagacgatgtcaaccttgtgtgagtgtgacgggggttggggtggggcgggaggccacgggggaggccgaggcaggggctgggcagaggggagaggaagcacaagaagtgggagtgggagaggaagccacgtgctggagagtagacatccccctccttgccgctgggagagccaaggcctatgccacctgcagcgtctgagcggccgcctgtccttggtggccgggggtgggggcctgctgtgggtcagtgtgccaccctctgcagggcagcctgtgggagaagggacagcgggtaaaaagagaaggcaagctggcaggagggtggcacttcgtggatgacctccttagaaaagactgaccttgatgtcttgagagcgctggcctcttcctccctccctgcagggtagggggcctgagttgaggggcttccctctctgctccacagaaaccctgttttattgagttctgaaggttggaactgctgccatgattttggccactttgcagacctgggactttagggctaaccagttctctttgtaaggacttgtgcctcttgggagacgtccacccgtttccaagcctgggccaccggcatctctggagtgtgtgggggtctgggaggcgggtcccgagccccctgtccttcccacggccactgcagtcacccctgtctgccccgctgtgctgttgtctgccgt

SEQ ID NO: 43932 - DNA, 1239 bp, Artificial Sequence
  derived and/or modified sequence
atggcggaacccaggcaggaatttgaggttatggaggatcatgcagggacctatggcctgggggatcgcaaggatcagggaggatatactatgcaccaagatcaggagggcgacacagatgcagggctaaaagaaagcccactccagaccccaaccgaggacgggtcggaggaacccggatctgaaacttctgatgccaagtcaacacccacggccgaagccgaagaagctggtataggtgataccccaagcctggaggacgaagcagctggacatgtaacgcaggccagaatggtctcaaagtccaaggatgggaccggatcggacgacaagaaggcaaaaggggctgatggaaagaccaagatagcaacacctcgtggtgccgcacctcccggacaaaagggacaggcaaatgctacccgcataccagccaagacccccccagcaccaaaaacccccccatcttcaggagaacctccaaaatccggcgatcggagcggctactcctccccaggatcccctggtactccagggagtcggagccggacccccagtctgcccactcctccaacaagggaaccgaaaaaggtggcagtggtgcggacacctcctaaaagcccttcaagcgccaagtccagattgcaaacggcacctgtgcccatgcccgatcttaagaacgttaagtccaaaatcggctccaccgagaacctgaagcatcagcccggagggggaaaggtgcagattatcaataaaaagctggatctatctaacgtgcagtcgaagtgcgggagcaaggacaatattaaacatgtacctgggggaggttccgtgcagattgtgtataagccggtggatctcagcaaagtgactagcaagtgtgggtccctggggaacatccatcataagccgggaggcggtcaggttgaggtgaagagtgagaagctggactttaaagatcgggtccagtcaaagatcggcagtctggataatatcacccatgtgccgggaggcggaaataaaaagatagagacacataaactcacttttagggaaaacgcaaaagcaaaaactgaccacggtgctgagatcgtgtacaagtctcctgttgtgagcggtgacacgtcgcctaggcatctgtctaacgtgtccagtaccggcagtatcgacatggtggactctcctcagcttgccacactggccgacgaagttagcgcctcgctggcaaagcagggcctgtag

SEQ ID NO: 43933 - DNA, 1239 bp, Artificial Sequence
  derived and/or modified sequence
atggctgagcctcgacaggaattcgaagttatggaagaccacgccggaacctacggcctgggcgatcgcaaggaccaggggggttacacaatgcatcaggatcaggagggcgacaccgatgcggggttgaaggagtcgcccctgcagacccctacagaagacggctcagaggaacccggatcagagacaagcgatgcaaagagtactccaaccgctgaagccgaggaggcaggaataggtgacacccctagcctcgaggacgaagctgctggccacgtcactcaagccaggatggtctcaaagagcaaggacggaaccgggtccgacgataaaaaggccaagggagcagatggaaagacaaagattgcaacccctagaggcgccgctccacccggacagaaagggcaggccaacgccactcgcatcccagctaagaccccaccggccccgaagacaccgccttcctcaggggaaccaccaaagtcgggcgaccggagcggctactcgtctcctggcagtcccgggacaccaggttctaggtcccgaacaccttctctccctacccccccaacacgcgagccaaaaaaggtcgccgtagtgagaacccctcctaaatctcctagctctgccaaatccagattacagacagcccccgtaccaatgcccgatctgaaaaacgtcaagtcaaaaatagggtcaaccgaaaacttgaagcaccaacccggcggaggcaaagtgcagattatcaataagaagctggacttgagtaatgtacagagtaagtgtggctcgaaggacaacattaagcatgtacctggaggggggagcgtgcaaattgtgtataaaccggtggacctttccaaagtgacctctaaatgcggatctctgggaaatatacaccacaagcccgggggcggacaggtagaagtcaagtccgaaaaactcgacttcaaggaccgggttcagtctaaaatcgggtccctggacaatattacacacgttcccggcgggggcaacaaaaaaattgaaacacacaaactcacattccgagagaatgccaaggcaaagaccgaccatggcgcagaaatagtctataagtctccggtggtgagcggcgacacttccccacggcacctttctaacgtatccagcacagggtctattgacatggtcgacagtcctcagctggccacccttgctgacgaggtatcagcaagcctcgccaaacaggggttgtag

SEQ ID NO: 43934 - DNA, 1239 bp, Artificial Sequence
  derived and/or modified sequence
atggcagagccccggcaggagtttgaggtgatggaagaccacgcaggcacctacggcttgggcgaccgaaaagaccaaggtggctatacaatgcaccaggaccaggaaggcgatacggacgccgggctcaaggagagccccttgcaaactcccacagaggacggatccgaggaacctggctcagagacctccgatgccaagtcaaccccaactgcagaggcagaagaggctggcattggagacacccctagtctggaggatgaggccgcaggccatgtgactcaggctaggatggtgagcaaaagcaaagacggtactggcagtgatgacaagaaagccaagggcgcagatgggaagactaagatcgccaccccacgcggagctgcccccccaggccagaaaggtcaggccaacgctaccaggatccctgcaaagacccctccggccccaaagacccctccaagttcaggagagccaccaaagagcggagatagaagcgggtatagtagtccaggcagccctggaactccggggtcacgctcacgcactccttcattaccaaccccccccactagggagccgaaaaaagtcgccgttgtgagaactccacctaagtctccatcttcggccaagtcccggttacagacggccccagtgccaatgcctgaccttaagaacgtcaaatcaaaaatcggaagtactgaaaatctgaagcatcagccgggcggcgggaaagttcaaattattaataagaaactcgacttgagcaacgtgcagtctaagtgtggctctaaagataatataaagcatgtgcctggcggaggttctgtccagatagtctataagcccgtggacctgtcaaaagtgacctctaaatgcggaagcctgggaaacatccatcacaaacccggggggggccaggtcgaagtaaagagtgagaagctggatttcaaagatagagtgcagagtaagatagggtcattagacaacataacccacgtgccaggaggtgggaataaaaagatcgagacccacaaactaactttccgggaaaacgctaaggccaagactgaccacggggcagaaatagtgtacaaatctcctgtcgtctccggtgatacaagtccccgtcacttgagtaacgtctcaagtacgggctctatcgatatggttgacagccctcagcttgccacattggcagatgaagttagtgcctccctagccaagcagggcttgtag

SEQ ID NO: 43935 - DNA, 5724 bp, Artificial Sequence
  derived and/or modified sequence
ggacggccgagcggcagggcgctcgcgcgcgcccactagtggccggaggagaaggctcccgcggaggccgcgctgcccgccccctcccctggggaggctcgcgttcccgctgctcgcgcctgcgccgcccgccggcctcaggaacgcgccctcttcgccggcgcgcgccctcgcagtcaccgccacccaccagctccggcaccaacagcagcgccgctgccaccgcccaccttctgccgccgccaccacagccaccttctcctcctccgctgtcctctcccgtcctcgcctctgtcgactatcaggtgaactttgaaccaggatggctgagccccgccaggagttcgaagtgatggaagatcacgctgggacgtacgggttgggggacaggaaagatcaggggggctacaccatgcaccaagaccaagagggtgacacggacgctggcctgaaagaatctcccctgcagacccccactgaggacggatctgaggaaccgggctctgaaacctctgatgctaagagcactccaacagcggaagctgaagaagcaggcattggagacacccccagcctggaagacgaagctgctggtcacgtgacccaagctcgcatggtcagtaaaagcaaagacgggactggaagcgatgacaaaaaagccaagggggctgatggtaaaacgaagatcgccacaccgcggggagcagcccctccaggccagaagggccaggccaacgccaccaggattccagcaaaaaccccgcccgctccaaagacaccacccagctctggtgaacctccaaaatcaggggatcgcagcggctacagcagccccggctccccaggcactcccggcagccgctcccgcaccccgtcccttccaaccccacccacccgggagcccaagaaggtggcagtggtccgtactccacccaagtcgccgtcttccgccaagagccgcctgcagacagcccccgtgcccatgccagacctgaagaatgtcaagtccaagatcggctccactgagaacctgaagcaccagccgggaggcgggaaggtgcagataattaataagaagctggatcttagcaacgtccagtccaagtgtggctcaaaggataatatcaaacacgtcccgggaggcggcagtgtgcaaatagtctacaaaccagttgacctgagcaaggtgacctccaagtgtggctcattaggcaacatccatcataaaccaggaggtggccaggtggaagtaaaatctgagaagcttgacttcaaggacagagtccagtcgaagattgggtccctggacaatatcacccacgtccctggcggaggaaataaaaagattgaaacccacaagctgaccttccgcgagaacgccaaagccaagacagaccacggggcggagatcgtgtacaagtcgccagtggtgtctggggacacgtctccacggcatctcagcaatgtctcctccaccggcagcatcgacatggtagactcgccccagctcgccacgctagctgacgaggtgtctgcctccctggccaagcagggtttgtgatcaggcccctggggcggtcaataattgtggagaggagagaatgagagagtgtggaaaaaaaaagaataatgacccggcccccgccctctgcccccagctgctcctcgcagttcggttaattggttaatcacttaacctgcttttgtcactcggctttggctcgggacttcaaaatcagtgatgggagtaagagcaaatttcatctttccaaattgatgggtgggctagtaataaaatatttaaaaaaaaacattcaaaaacatggccacatccaacatttcctcaggcaattccttttgattcttttttcttccccctccatgtagaagagggagaaggagaggctctgaaagctgcttctgggggatttcaagggactgggggtgccaaccacctctggccctgttgtgggggtgtcacagaggcagtggcagcaacaaaggatttgaaacttggtgtgttcgtggagccacaggcagacgatgtcaaccttgtgtgagtgtgacgggggttggggtggggcgggaggccacgggggaggccgaggcaggggctgggcagaggggagaggaagcacaagaagtgggagtgggagaggaagccacgtgctggagagtagacatccccctccttgccgctgggagagccaaggcctatgccacctgcagcgtctgagcggccgcctgtccttggtggccgggggtgggggcctgctgtgggtcagtgtgccaccctctgcagggcagcctgtgggagaagggacagcgggtaaaaagagaaggcaagctggcaggagggtggcacttcgtggatgacctccttagaaaagactgaccttgatgtcttgagagcgctggcctcttcctccctccctgcagggtagggggcctgagttgaggggcttccctctgctccacagaaaccctgttttattgagttctgaaggttggaactgctgccatgattttggccactttgcagacctgggactttagggctaaccagttctctttgtaaggacttgtgcctcttgggagacgtccacccgtttccaagcctgggccactggcatctctggagtgtgtgggggtctgggaggcaggtcccgagccccctgtccttcccacggccactgcagtcaccccgtctgcgccgctgtgctgttgtctgccgtgagagcccaatcactgcctatacccctcatcacacgtcacaatgtcccgaattcccagcctcaccaccccttctcagtaatgaccctggttggttgcaggaggtacctactccatactgagggtgaaattaagggaaggcaaagtccaggcacaagagtgggaccccagcctctcactctcagttccactcatccaactgggaccctcaccacgaatctcatgatctgattcggttccctgtctcctcctcccgtcacagatgtgagccagggcactgctcagctgtgaccctaggtgtttctgccttgttgacatggagagagccctttcccctgagaaggcctggccccttcctgtgctgagcccacagcagcaggctgggtgtcttggttgtcagtggtggcaccaggatggaagggcaaggcacccagggcaggcccacagtcccgctgtcccccacttgcaccctagcttgtagctgccaacctcccagacagcccagcccgctgctcagctccacatgcatagtatcagccctccacacccgacaaaggggaacacacccccttggaaatggttcttttcccccagtcccagctggaagccatgctgtctgttctgctggagcagctgaacatatacatagatgttgccctgccctccccatctgcaccctgttgagttgtagttggatttgtctgtttatgcttggattcaccagagtgactatgatagtgaaaagaaaaaaaaaaaaaaaaaaggacgcatgtatcttgaaatgcttgtaaagaggtttctaacccaccctcacgaggtgtctctcacccccacactgggactcgtgtggcctgtgtggtgccaccctgctggggcctcccaagttttgaaaggctttcctcagcacctgggacccaacagagaccagcttctagcagctaaggaggccgttcagctgtgacgaaggcctgaagcacaggattaggactgaagcgatgatgtccccttccctacttccccttggggctccctgtgtcagggcacagactaggtcttgtggctggtctggcttgcggcgcgaggatggttctctctggtcatagcccgaagtctcatggcagtcccaaaggaggcttacaactcctgcatcacaagaaaaaggaagccactgccagctggggggatctgcagctcccagaagctccgtgagcctcagccacccctcagactgggttcctctccaagctcgccctctggaggggcagcgcagcctcccaccaagggccctgcgaccacagcagggattgggatgaattgcctgtcctggatctgctctagaggcccaagctgcctgcctgaggaaggatgacttgacaagtcaggagacactgttcccaaagccttgaccagagcacctcagcccgctgaccttgcacaaactccatctgctgccatgagaaaagggaagccgcctttgcaaaacattgctgcctaaagaaactcagcagcctcaggcccaattctgccacttctggtttgggtacagttaaaggcaaccctgagggacttggcagtagaaatccagggcctcccctggggctggcagcttcgtgtgcagctagagctttacctgaaaggaagtctctgggcccagaactctccaccaagagcctccctgccgttcgctgagtcccagcaattctcctaagttgaagggatctgagaaggagaaggaaatgtggggtagatttggtggtggttagagatatgcccccctcattactgccaacagtttcggctgcatttcttcacgcacctcggttcctcttcctgaagttcttgtgccctgctcttcagcaccatgggccttcttatacggaaggctctgggatctcccccttgtggggcaggctcttggggccagcctaagatcatggtttagggtgatcagtgctggcagataaattgaaaaggcacgctggcttgtgatcttaaatgaggacaatccccccagggctgggcactcctcccctcccctcacttctcccacctgcagagccagtgtccttgggtgggctagataggatatactgtatgccggctccttcaagctgctgactcactttatcaatagttccatttaaattgacttcagtggtgagactgtatcctgtttgctattgcttgttgtgctatggggggaggggggaggaatgtgtaagatagttaacatgggcaaagggagatcttggggtgcagcacttaaactgcctcgtaacccttttcatgatttcaaccacatttgctagagggagggagcagccacggagttagaggcccttggggtttctcttttccactgacaggctttcccaggcagctggctagttcattccctccccagccaggtgcaggcgtaggaatatggacatctggttgctttggcctgctgccctctttcaggggtcctaagcccacaatcatgcctccctaagaccttggcatccttccctctaagccgttggcacctctgtgccacctctcacactggctccagacacacagcctgtgcttttggagctgagatcactcgcttcaccctcctcatctttgttctccaagtaaagccacgaggtcggggcgagggcagaggtgatcacctgcgtgtcccatctacagacctgcagcttcataaaacttctgatttctcttcagctttgaaaagggttaccctgggcactggcctagagcctcacctcctaatagacttagccccatgagtttgccatgttgagcaggactatttctggcacttgcaagtcccatgatttcttcggtaattctgagggtggggggagggacatgaaatcatcttagcttagctttctgtctgtgaatgtctatatagtgtattgtgtgttttaacaaatgatttacactgactgttgctgtaaaagtgaatttggaaataaagttattactctgattaaa

SEQ ID NO: 43936 - DNA, 1239 bp, Artificial Sequence
  derived and/or modified sequence
atggctgagccccgccaggagttcgaagtgatggaagatcacgctgggacgtacgggttgggggacaggaaagatcaggggggctacaccatgcaccaagaccaagagggtgacacggacgctggcctgaaagaatctcccctgcagacccccactgaggacggatctgaggaaccgggctctgaaacctctgatgctaagagcactccaacagcggaagctgaagaagcaggcattggagacacccccagcctggaagacgaagctgctggtcacgtgacccaagctcgcatggtcagtaaaagcaaagacgggactggaagcgatgacaaaaaagccaagggggctgatggtaaaacgaagatcgccacaccgcggggagcagcccctccaggccagaagggccaggccaacgccaccaggattccagcaaaaaccccgcccgctccaaagacaccacccagctctggtgaacctccaaaatcaggggatcgcagcggctacagcagccccggctccccaggcactcccggcagccgctcccgcaccccgtcccttccaaccccacccacccgggagcccaagaaggtggcagtggtccgtactccacccaagtcgccgtcttccgccaagagccgcctgcagacagcccccgtgcccatgccagacctgaagaatgtcaagtccaagatcggctccactgagaacctgaagcaccagccgggaggcgggaaggtgcagataattaataagaagctggatcttagcaacgtccagtccaagtgtggctcaaaggataatatcaaacacgtcccgggaggcggcagtgtgcaaatagtctacaaaccagttgacctgagcaaggtgacctccaagtgtggctcattaggcaacatccatcataaaccaggaggtggccaggtggaagtaaaatctgagaagcttgacttcaaggacagagtccagtcgaagattgggtccctggacaatatcacccacgtccctggcggaggaaataaaaagattgaaacccacaagctgaccttccgcgagaacgccaaagccaagacagaccacggggcggagatcgtgtacaagtcgccagtggtgtctggggacacgtctccacggcatctcagcaatgtctcctccaccggcagcatcgacatggtagactcgccccagctcgccacgctagctgacgaggtgtctgcctccctggccaagcagggtttgtga

SEQ ID NO: 43937 - DNA, 1239 bp, Artificial Sequence
  derived and/or modified sequence
atggccgagccccggcaggagttcgaggtgatggaggaccacgccggcacctacggactcggcgatagaaaagaccaggggggctacactatgcaccaggatcaggagggcgacaccgatgctggattgaaggagtcgccactacaaacccctactgaagatggtagcgaggagcctggcagtgaaacctcagatgctaagtccactccaacggctgaagcggaagaggctggaatcggggacacaccctccctagaggacgaggcagccggacacgttacacaggccagaatggttagcaaatcaaaagatgggaccggcagcgacgacaagaaagcaaagggcgctgacggcaagactaaaattgccacccccaggggagcagccccgcctgggcaaaaagggcaggcaaacgcaacacggattccagccaaaactcccccagccccgaaaaccccccctagctccggagagccaccgaagtctggagatcgatcagggtacagtagtccgggctccccagggactcccgggtctcgatcgaggaccccctctctgcccacgccacctacaagagagccaaagaaggtcgctgtagtgcgcactccgccaaaaagcccttcctccgccaagagtcggctgcagacggcgcccgtccctatgcctgatctcaagaacgtaaaaagcaagatcggatctaccgagaatctaaagcaccaaccaggaggcggtaaggtgcaaatcatcaataaaaagttggacctaagcaacgtacaatcaaaatgtggcagcaaagacaacattaagcatgtaccagggggaggaagcgtccagattgtgtataagcctgtggacctgtcaaaagtgacctcaaagtgtgggtcccttgggaacattcaccacaagccaggcggaggtcaagtggaggtgaaatcagagaaactcgatttcaaggaccgcgtccagtccaaaatcggcagcctcgacaatataacacacgtgcccggaggaggtaataagaagatcgagacgcacaagttgacatttcgagaaaacgccaaggccaagaccgatcatggtgccgaaattgtgtacaagtctcctgtggtcagtggagatacgtcccccagacacttgagcaacgtgtctagcacgggaagcatcgacatggttgattcaccacagctggccaccctggctgacgaggtgtctgcttctctcgctaaacaaggtctgtag

SEQ ID NO: 43938 - DNA, 1239 bp, Artificial Sequence
  derived and/or modified sequence
atggccgagccccggcaggagttcgaggtgatggaggaccacgccggcacttatggccttggcgatcgtaaggatcagggcggatataccatgcaccaagaccaggagggggataccgatgcaggcctcaaagagagcccactccagacccccacagaggatgggtctgaagagccaggatctgagacctccgatgccaagtccacccccacggccgaagcagaagaagcaggcattggcgacacccctagccttgaagacgaggcggccggccatgtaactcaggcccgcatggtgagcaaatcaaaggatggaacgggctcagacgacaaaaaggctaaaggcgccgacgggaaaactaaaatcgcaacccctaggggcgccgcgccacctggtcagaagggccaagccaacgctactagaattcccgcgaaaaccccacctgcccccaaaacacctccatcctcgggcgaacccccaaaatcaggagacaggagcggatattcctcacccggaagtccagggacaccaggctcacggtcaaggaccccatctctgcccacaccaccaaccagggagccaaagaaagtcgctgtcgtacggactccgcccaaatcgccgagtagcgccaaatctcgactgcagactgctcccgttccaatgcctgatttgaagaacgttaaatccaagataggctccaccgaaaaccttaagcatcagcctggcggaggcaaggtacaaattattaataaaaaactggacctgtctaatgtacagagtaaatgtggtagcaaagacaacatcaagcatgtccccgggggcggtagcgtccaaattgtgtacaagcctgtggacttgtccaaggtgaccagcaagtgcggctccctggggaacattcaccacaagccgggaggaggacaggtggaggtgaaaagcgagaagctggacttcaaagaccgcgtgcagagtaagattgggtcactcgacaacatcacccatgtgcccggcggtggtaacaagaaaattgagacacacaagttgaccttcagggaaaacgccaaggcgaagactgaccacggcgcagagatcgtgtataagtcacctgtagtatccggagatacttccccccgccacttgagtaacgttagctcgacagggagtatcgacatggtggacagtcctcagctcgccaccttggccgatgaggtgtccgcctccttggccaaacaaggcttgtag

SEQ ID NO: 43939 - DNA, 1239 bp, Artificial Sequence
  derived and/or modified sequence
atggcagagcccagacaggaatttgaggtgatggaggaccacgccggtacatacggcctgggagatagaaaagatcaggggggttacaccatgcaccaggaccaggagggagacacagatgctggtctgaaagagagtccactacagactccaacagaagacggctctgaggagcctggctcagaaactagcgacgccaaaagtacacctacagcagaggcagaagaagcgggtatcggagatactccctcattggaggatgaggccgctggccacgtaacccaggcaagaatggtgagcaaaagtaaggatggcaccggatcagacgacaaaaaagcgaagggcgctgacggcaaaacgaagatagccacgccacgcggtgccgcacccccaggacagaaaggacaagctaacgccacacggatccctgcaaagactcctccagctccgaaaacccccccaagctccggtgagcccccaaagtcgggagaccggagcggatactccagccctggctctcccggaacacctggctcccggagtcggaccccatcgcttcctactcccccaacacgcgagcctaaaaaggtggccgtggtgcgtacccccccaaaatcaccaagcagtgctaagagcaggttgcagactgctcctgttcccatgccagacctgaaaaacgtaaaatctaaaattggttcaactgagaatctgaaacaccagcctggcggtggcaaggtccaaataatcaataagaagcttgacttaagcaacgtgcagtccaagtgtggaagcaaggataacataaaacacgtcccaggcggaggctcggtgcagatcgtctataagcctgtagacttgtctaaggtcacgagtaaatgcggctctctcggaaacattcaccacaagccaggagggggtcaagtcgaagttaagagcgagaagctcgactttaaagatcgcgtccagagtaagatcggaagtttggataatattacccatgtacccggaggtggtaataaaaaaatcgaaactcataagctcacatttcgggaaaatgcaaaggcgaaaaccgaccacggggcagagatcgtgtacaagagcccggtcgtgtcaggcgacacgagccccaggcatctgagcaatgtcagttcgaccgggtcaattgacatggtggactcgccccagttggctacacttgctgacgaagtgagtgctagcctcgccaagcaaggtttatag

SEQ ID NO: 43940 - DNA, 1239 bp, Artificial Sequence
  derived and/or modified sequence
atggctgagcctcggcaagaattcgaggtaatggaggaccacgcgggaacatacggcctgggagatagaaaagaccaaggaggctataccatgcaccaagaccaagaaggagacacagatgccggacttaaagagagcccactacagacgcccaccgaggacgggtctgaggagcccggttctgagacatctgacgctaagtccaccccaacagccgaagccgaggaagctggtataggcgatactcctagtttggaagatgaggcagccggacacgttacacaggctcggatggtttccaagagtaaggatgggactggcagcgatgataagaaggcaaagggggcagacggcaaaacaaagattgccaccccacgtggcgctgccccaccagggcagaaaggacaagcgaatgccacccggatccccgcaaaaactcccccagcccctaagactcctccttcatccggggagcccccaaagtccggagatcgatccgggtatagctcaccaggctctccgggaacccctgggagccggagtcgtacccccagcctgcctacaccacccactcgggaaccgaaaaaagtcgctgtggtcaggactccccctaaatcgccttcttccgcaaaatctaggctgcagaccgcacccgtccccatgcctgatcttaagaacgtgaaaagcaagataggtagcactgaaaatcttaaacaccagcccggaggcggaaaggttcaaattatcaacaagaagctggatctaagcaatgtgcagagcaagtgtggaagtaaagataatatcaagcacgtccctggaggcggatccgtgcagatcgtttacaagcctgtggatttgtcaaaagtcaccagcaaatgtgggtcccttgggaacatacaccacaaacctgggggtggccaggttgaggtcaaatcagagaaattagactttaaggaccgagtccaatctaaaattggtagtctggacaacataacccacgtgccaggcggtgggaacaagaaaatcgagacacataagctaacattcagagaaaacgccaaggccaaaacagaccatggagccgagatcgtgtacaagtccccagtcgtgtctggcgatacatcccccagacatctgtccaatgtgtcgagcacagggtccattgatatggttgattccccccaattggctacactggccgatgaagtttccgctagcttagcaaaacagggcctgtag

SEQ ID NO: 43941 - protein, 732 aa, Artificial Sequence
  derived and/or modified sequence
MFYFRGCGRWVAVSFTKQQFPLARLSSDSAAPRTPHFDVIVIGGGHAGTEAATAAARCGSRTLLLTHRVDTIGQMSCNPSFGGIGKGHLMREVDALDGLCSRICDQSGVHYKVLNRRKGPAVWGLRAQIDRKLYKQNMQKEILNTPLLTVQEGAVEDLILTEPEPEHTGKCRVSGVVLVDGSTVYAESVILTTGTFLRGMIVIGLETHPAGRLGDQPSIGLAQTLEKLGFVVGRLKTGTPPRIAKESINFSILNKHIPDNPSIPFSFTNETVWIKPEDQLPCYLTHTNPRVDEIVLKNLHLNSHVKETTRGPRYCPSIESKVLRFPNRLHQVWLEPEGMDSDLIYPQGLSMTLPAELQEKMITCIRGLEKAKVIQPGYGVQYDYLDPRQITPSLETHLVQRLFFAGQINGTTGYEEAAAQTECCSVARLECSDMISQLQAILLPQPSLVAGTAGMHHNTQGVIAGINASLRVSRKPPFVVSRTEGYIGVLIDDLTTLGTSEPYRMFTSRVEFRLSLRPDNADSRLTLRGYKDAGCVSQQRYERACWMKSSLEEGISVLKSIEFLSSKWKKLIPEASISTSRSLPVRALDVLKYEEVDMDSLAKAVPEPLKKYTKCRELAERLKIEATYESVLFHQLQEIKGVQQDEALQLPKDLDYLTIRDVSLSHEVREKLHFSRPQTIGAASRIPGVTPAAIINLLRFVKTTQRRQSAMNESSKTDQYLCDADRLQEREL

SEQ ID NO: 43942 - DNA, 2199 bp, Artificial Sequence
  derived and/or modified sequence
atgttctacttcagaggctgcggcagatgggtggccgtgagcttcaccaagcagcagttccccctggccagactgagcagcgacagcgccgcccccagaaccccccacttcgacgtgatcgtgatcggcggcggccacgccggcaccgaggccgccaccgccgccgccagatgcggcagcagaaccctgctgctgacccacagagtggacaccatcggccagatgagctgcaaccccagcttcggcggcatcggcaagggccacctgatgagagaggtggacgccctggacggcctgtgcagcagaatctgcgaccagagcggcgtgcactacaaggtgctgaacagaagaaagggccccgccgtgtggggcctgagagcccagatcgacagaaagctgtacaagcagaacatgcagaaggagatcctgaacacccccctgctgaccgtgcaggagggcgccgtggaggacctgatcctgaccgagcccgagcccgagcacaccggcaagtgcagagtgagcggcgtggtgctggtggacggcagcaccgtgtacgccgagagcgtgatcctgaccaccggcaccttcctgagaggcatgatcgtgatcggcctggagacccaccccgccggcagactgggcgaccagcccagcatcggcctggcccagaccctggagaagctgggcttcgtggtgggcagactgaagaccggcaccccccccagaatcgccaaggagagcatcaacttcagcatcctgaacaagcacatccccgacaaccccagcatccccttcagcttcaccaacgagaccgtgtggatcaagcccgaggaccagctgccctgctacctgacccacaccaaccccagagtggacgagatcgtgctgaagaacctgcacctgaacagccacgtgaaggagaccaccagaggccccagatactgccccagcatcgagagcaaggtgctgagattccccaacagactgcaccaggtgtggctggagcccgagggcatggacagcgacctgatctacccccagggcctgagcatgaccctgcccgccgagctgcaggagaagatgatcacctgcatcagaggcctggagaaggccaaggtgatccagcccggctacggcgtgcagtacgactacctggaccccagacagatcacccccagcctggagacccacctggtgcagagactgttcttcgccggccagatcaacggcaccaccggctacgaggaggccgccgcccagaccgagtgctgcagcgtggccagactggagtgcagcgacatgatcagccagctgcaggccatcctgctgccccagcccagcctggtggccggcaccgccggcatgcaccacaacacccagggcgtgatcgccggcatcaacgccagcctgagagtgagcagaaagccccccttcgtggtgagcagaaccgagggctacatcggcgtgctgatcgacgacctgaccaccctgggcaccagcgagccctacagaatgttcaccagcagagtggagttcagactgagcctgagacccgacaacgccgacagcagactgaccctgagaggctacaaggacgccggctgcgtgagccagcagagatacgagagagcctgctggatgaagagcagcctggaggagggcatcagcgtgctgaagagcatcgagttcctgagcagcaagtggaagaagctgatccccgaggccagcatcagcaccagcagaagcctgcccgtgagagccctggacgtgctgaagtacgaggaggtggacatggacagcctggccaaggccgtgcccgagcccctgaagaagtacaccaagtgcagagagctggccgagagactgaagatcgaggccacctacgagagcgtgctgttccaccagctgcaggagatcaagggcgtgcagcaggacgaggccctgcagctgcccaaggacctggactacctgaccatcagagacgtgagcctgagccacgaggtgagagagaagctgcacttcagcagaccccagaccatcggcgccgccagcagaatccccggcgtgacccccgccgccatcatcaacctgctgagattcgtgaagaccacccagagaagacagagcgccatgaacgagagcagcaagaccgaccagtacctgtgcgacgccgacagactgcaggagagagagctgtag

SEQ ID NO: 43943 - DNA, 2199 bp, Artificial Sequence
  derived and/or modified sequence
atgttttacttcaggggatgcggcagatgggttgcagtgagcttcactaaacagcagtttcctttagcacgactgagcagcgattctgccgctccccggacgcctcactttgatgtgatcgtgattggggggggacacgcaggaacggaagcagccaccgctgcagccaggtgtggctcaaggaccctattattaacccaccgagtcgatactataggccaaatgagctgtaacccctctttcggtgggattggcaaaggtcacctgatgagagaggtggacgcactggatggcctttgttcccgcatctgcgatcaaagcggagtgcattacaaagttctgaacagacgcaaaggcccggctgtttggggcctcagggcacaaatagatcggaaactctataaacagaacatgcaaaaagaaatattgaacacgcctctgctcactgtccaagagggggctgtggaagatctgattctgacagagcccgagccagaacacaccggaaagtgtagagtgtccggcgtggtcttagtggatggatcaacagtgtatgccgagtcagtaatactaaccacaggcacgttcctccgcggcatgattgtcatcgggcttgagactcaccctgctggacgtctgggagatcaacccagtattggactcgcccagactctggaaaagctcggttttgtcgtcggcagactgaaaaccggaacacccccccgtattgcgaaggagtcaatcaatttctccatactaaataaacatatcccggataatccgagcattcccttttcgttcacaaatgagacagtgtggattaagcccgaggaccagctgccttgttatcttactcacaccaatccccgagtcgacgagatcgtcctgaaaaatctgcacctaaacagccatgtgaaggagaccacacgaggaccccggtactgtccgagtatcgagtccaaggtcttaaggttcccaaatcggctgcaccaagtgtggctggaacctgaaggtatggactccgacctcatttatccccagggtctctcgatgactctcccggctgaactccaggaaaagatgatcacctgcatcaggggattggagaaggctaaagtgattcagcccgggtatggggtgcaatatgattatcttgacccacgtcagatcacccctagcctcgaaacccacctggtccagaggctgttcttcgctggccaaataaatggtactacaggctatgaggaggctgccgcacagactgagtgttgttcggtggcccgattggagtgttccgatatgatctcccagctgcaagcaatcttactccctcaaccatccctggtagccggcactgccggaatgcatcacaatacccagggagtcatcgctgggattaacgcttcactgcgcgttagccgcaagcccccgtttgtggtctcacgaacagaagggtatatcggtgtgctcatcgacgatctgactacactcgggacatccgagccataccggatgttcacatcccgggtggagtttcgattaagtctgagaccagataatgctgactccaggttgaccctgagaggctacaaggatgccggctgcgtttcccagcagagatatgaacgcgcttgctggatgaagagctcgttggaagaggggattagtgttctgaaatccatagagttcctgagtagtaaatggaaaaagcttatccctgaagcctccatatcaacatccagaagtctgcctgtcagagctctggatgttcttaaatatgaggaagtcgacatggacagtttggccaaggctgtaccagagcccctgaagaagtataccaagtgtcgagaattggccgaacggctgaagatcgaggctacttacgaatccgtcctatttcatcagctacaagaaatcaagggcgtgcagcaggacgaggcactgcagttgccgaaagatttggattacctgacaatcagagacgtatctctgagtcacgaagtgcgagagaaactgcatttttcccgcccccaaactataggtgccgccagccgcatcccaggtgtgacacccgctgctataatcaatctgctgaggtttgtcaagactactcagaggcgccagtctgctatgaacgagagttctaagacagaccagtacctgtgtgacgcagatagattacaggagagggagctttag

SEQ ID NO: 43944 - DNA, 2199 bp, Artificial Sequence
  derived and/or modified sequence
atgttctacttccggggctgcggccgctgggtggccgtgtccttcaccaagcagcagttccccctggcccggctgagcagtgacagcgctgcccccaggaccccccactttgatgtgattgtcatcggcggcggccatgctggaacagaagctgccacagctgctgcccgctgtggcagcaggaccctgctgctgacccaccgggtggacaccatcggccagatgagctgcaaccccagctttggaggcatcggcaagggccacctgatgagggaggtggatgccctggatggcctgtgcagccgcatctgtgaccagagcggcgtgcactacaaggtgctgaacagaaggaagggccctgctgtgtggggcctgcgggcccagattgacaggaagctgtacaagcagaacatgcagaaggagatcctgaacacccccctgctgactgtgcaggagggcgctgtggaggacctgatcctgacagagcctgagcctgagcacacaggcaagtgccgggtgtctggagtggtgctggtggatggcagcacagtgtatgcagagagcgtcatcctgaccaccggcaccttcctgcggggcatgattgtgattggcctggagacccaccctgctggccgcctgggggaccagcccagcatcggcctggcccagaccctggagaagctgggctttgtggtgggccgcctgaagacaggcaccccaccaagaattgccaaggagagcatcaacttcagcatcctgaacaagcacatcccagacaaccccagcatccccttctccttcaccaatgaaacagtgtggatcaagccagaggaccagctgccctgctacctgacccacaccaacccccgggtggatgagatcgtgctgaagaacctgcacctgaacagccacgtgaaggagaccacccggggcccccgctactgccccagcattgagagcaaggtgctgcgcttccccaaccggctgcaccaggtgtggctggagcctgagggcatggacagcgacctgatctacccccagggcctgtccatgaccctgcctgctgagctgcaggagaagatgatcacctgcatccggggcctggagaaggccaaggtgatccagcccggctacggcgtgcagtatgactacctggacccccggcagatcacccccagcctggagacccacctggtgcagaggctcttctttgctggccagatcaatggcaccaccggctatgaggaggccgccgcccagacagagtgctgcagcgtggcccggctggagtgcagcgacatgatcagccagctgcaggccatcctgctgccccagcccagcctggtggccggcacagctggcatgcaccacaacacccagggcgtgattgctggcatcaatgccagcctgcgggtgtccaggaagcccccatttgtggtgtccaggacagagggctacatcggcgtgctgattgatgacctgaccaccctgggcaccagcgagccctacaggatgttcaccagccgggtggagttccggctgagcctgcggccagacaatgctgacagccggctgaccctgcggggctacaaggatgctggctgtgtgtcccagcagagatatgagcgggcctgctggatgaagagcagcctggaggagggcatctctgtgctgaagagcattgagttcctgagcagcaagtggaagaagctgatccctgaggccagcatcagcaccagccgcagcctgcctgtgcgggccctggatgtgctgaagtatgaggaggtggacatggacagcctggccaaggctgtgcctgagcccctgaagaagtacaccaagtgccgggagctggccgagcggctgaagattgaggccacctatgagagcgtgctcttccaccagctgcaggagatcaagggcgtgcagcaggatgaggccctgcagctgcccaaggacctggactacctgaccatcagagatgtgtccctgagccatgaggtgcgggagaagctgcacttcagccggccccagaccatcggggccgccagccgcatccctggggtgaccccagctgccatcatcaacctgctgcgctttgtgaagaccacccagaggcggcagagcgccatgaatgaaagcagcaagacagaccagtacctgtgtgatgctgaccggctgcaggagcgggagctgtag

SEQ ID NO: 43945 - DNA, 2837 bp, Artificial Sequence
  derived and/or modified sequence
taaataaataaataaataaaaataaaaaataataataataaaaaaagcccgcacgaactaggaaagaaaatacacaaccggccctccgtgcgatcacccatctccctcaccaggaaagtagctccaaaccgccaatcagcggcgacgctggacgtagacgtcctaccccgtgatattaaagcaagatggccgcgccctgcagattgtctcttgttgcgtaagtttttttgaccgtcactcgtgtcagcttcaaagtcagatagatttttctcccagcatgttctacttccgaggctgtggccgttgggtcgcggtttccttcaccaagcagcaatttccgttggcacggttgagcagtgacagcgcggcgccccggactccgcacttcgacgtgatagtcattggtggaggacatgccgggactgaggcagccaccgccgccgctcggtgcggctctcggactctgctcctcactcaccgcgtggacacgatcggtcagatgtcatgtaatccttcctttggtggcatcggaaagggacatttaatgagggaagtagatgccttggatggcctgtgttctcgcatctgtgaccagtctggtgtacattataaagtattaaaccggcgtaagggaccagctgtgtggggtctgagagctcagattgataggaaactctataaacagaacatgcagaaagaaatcttgaatacaccactgcttactgttcaggagggagctgtagaagatcttattcttacagaaccagagcctgaacacactgggaaatgccgtgtcagtggggttgttttggtggatggaagcacagtatatgcagagagtgtgattctgactactgggacatttctgagaggcatgattgtaattggattggagacgcatccagcaggacgtttaggggatcagccttctataggattggctcagacactggagaagttagggtttgtggtgggaaggttgaagactgggactccaccccgaattgccaaagagtccattaatttcagtattctaaacaagcatataccggacaatccatccataccattcagctttaccaatgagacagtatggattaagccagaagatcagctgccatgttacttgactcacaccaaccctagagtggatgagattgtccttaagaaccttcaccttaatagtcatgttaaagaaacgacaagaggacctcgatactgtccctccattgaatcaaaagttttgcgttttccaaaccgtctacatcaggtttggttggaacctgaaggaatggattctgaccttatctacccacaggggttatctatgacgctaccagctgagttacaagagaaaatgatcacatgcatcagaggcttggagaaagctaaagtgattcagccaggctacggtgttcagtatgattacttagatccccgtcagatcaccccttccttggagactcatttggttcaacgactcttctttgctggacagatcaatggcaccactggttatgaggaagctgcagctcaaacagagtgttgctctgttgccaggctggagtgcagtgatatgatctcccagcttcaagcgatcctcctgcctcagccctccctagtagctgggactgcaggcatgcaccacaacacccagggtgtgatagccggaatcaacgccagtcttcgggtcagtcgcaagcctccctttgtggttagccgaacagaaggttacataggagtcttgattgatgacctcactactctgggcaccagtgaaccataccgcatgtttaccagccgagtagagttccgtttgtcactgcgccctgataatgctgacagccggctcacactgcgagggtataaagacgctggctgtgtgtcccaacaacgatatgaaagagcttgttggatgaagtcttctttagaagaaggcatttctgtgttgaaatctattgagtttttgagctctaaatggaaaaaattaatcccagaggcttctataagtactagtagaagtctgcctgtcagagctctcgatgttctgaagtatgaggaagttgacatggattcattagccaaggctgttccagagcccttgaagaagtatactaaatgtagagagctggctgaaagactgaaaatagaagccacttatgaatcagtgttgttccatcaactacaagaaataaagggagttcagcaagatgaagctctccaactgccaaaagacctagattatttgactatcagggatgtgtctttgtcccatgaagttcgagagaaactacattttagtcgtccacagacgatcggggctgctagtcgcatacccggagtaacacctgccgccatcatcaatctgctgagatttgtgaagaccactcaacgaagacagtcggctatgaatgaatcatccaagactgatcaatacttatgtgatgcagacagacttcaagagagagagttatagctttcaattcataaaagatttttaaagagcatataaataatttgatcaatacaacagtatagataaaagaattatttagcacatgttaaaatagctttattaggttactatgggtttgccattaatttctgagtgggacagaaattataattgtgctttttcgtgtatatgaaaaaactagtcgtaaacaatttgtactctttctttaaggagctgtaatacaaataactttgtgcagtgttcatcaaagagagagacagtgaacctaaaactgaacctggaataaaactcaacatgcagatttgcctactcatagggactttgcctattaagtctaccaaattaaaagtcttatcattca

SEQ ID NO: 43946 - DNA, 2199 bp, Artificial Sequence
  derived and/or modified sequence
atgttctacttccggggctgcggccggtgggtggccgtgagcttcactaagcagcaattccccctggcgcgcctttcgagcgactcagcagcccccagaaccccacacttcgacgtcatcgtcattggcgggggccatgccggaacagaagccgccacagccgccgctcgctgtggctctcgtactttgctgctaacacaccgtgtagatacaataggacagatgtcctgtaacccgagctttggtggaattgggaaggggcatcttatgagggaggtagacgcgttagacggcttgtgttctagaatctgcgaccagtcaggtgtgcattataaggtccttaaccgacgcaaagggcctgctgtctgggggctgcgggcccaaattgacaggaagctctataaacagaatatgcagaaggagattcttaatacccctttgttgaccgttcaggagggagccgtcgaggacctaatcttgactgaaccagaaccagagcacaccggaaagtgtcgcgtttccggggtagtgctggtggatggatccaccgtgtacgccgagtccgtcatactgaccacagggactttcctgcgaggcatgatcgtgatcgggttggaaacccaccctgccgggcggttaggagaccagcctagcattggactggcccagacactggagaagctggggttcgtggtcgggcgcctcaagaccggcacccccccacggatcgcgaaggagagcattaacttctccatcctgaacaagcacattccagataatccttcaattccattctccttcactaacgagacagtgtggatcaagcccgaagaccagctcccttgctacctcacccacacgaatccccgagtggatgagatcgtactgaagaatctgcacctgaattctcatgtgaaggaaaccacgagagggccgcgctactgtccatccatcgaatctaaagtgctgaggtttcccaatcgcctccaccaggtatggctggaaccagagggaatggactctgatcttatttaccctcagggattgtcgatgacccttccagccgaacttcaagagaagatgatcacatgcattcgggggctggagaaggccaaggtgattcagcctggatatggggtgcagtacgattatctagatccccgccagatcaccccgtccctcgagacgcacctcgtccagcggctcttcttcgcaggacagattaatggcaccaccggctatgaagaggcagccgctcagaccgagtgctgttcagtggccagactagagtgtagtgacatgatcagtcagttgcaggcaattctgctcccacagccaagcctggtggccggcaccgcggggatgcatcacaacacccagggcgtaatcgccggtatcaacgcctctctgcgtgtgagccggaaaccgccatttgtggtgtcacgcaccgagggatatattggggtgttgattgatgacctaaccacgctcggcacttcagagccctaccggatgtttacttccagagtagagtttagactgtcactccgtccagataatgccgactcacggctcaccctgcgcggttacaaggatgccggctgcgtgtcacagcagcgctacgaacgggcttgctggatgaagagtagcctcgaggagggaataagcgtgctgaaatccatcgagttcctctctagtaagtggaagaagctgattccagaagcgtccattagtacttcaaggtccctgcccgtgcgggcacttgacgtgttgaagtatgaagaggtggatatggattctctagcaaaagcagtccctgagccgctgaagaagtacacaaaatgtagggagttggctgaaagactcaagattgaggcaacctacgaatccgttttgtttcatcagctgcaggagatcaagggtgttcagcaggatgaggccttgcagctccccaaggatctcgattacctgaccatccgggacgtgagcctgagtcacgaggtccgcgagaaactccacttctcgcgcccacagaccataggcgctgcctcccgcattcctggggttacgccagccgcaattattaaccttttgcgcttcgtgaagacgactcaacgccgccagagtgccatgaacgagagcagtaagaccgaccagtacctttgcgacgccgatagattgcaagaaagggaattatag

SEQ ID NO: 43947 - DNA, 2199 bp, Artificial Sequence
  derived and/or modified sequence
atgttctatttccggggatgcgggcgatgggtcgccgtatccttcacaaaacagcagtttccccttgctcgactgtctagcgatagtgctgccccaagaactccccatttcgatgtaatagtgatcggaggaggacacgccggtacggaagcagccacggctgccgctaggtgcggctctaggactcttctactgactcaccgcgttgacacgatcggccaaatgagttgtaacccttctttcggaggaatcgggaaaggtcacttgatgagagaagtggatgctttagacggactctgcagcagaatctgcgaccagtccggcgtgcattataaggtgttgaataggaggaaaggtccagcggtctgggggctgagagcccagatcgaccgaaagctgtataagcagaacatgcagaaagagattttgaacacccctctgctgactgtacaggagggggcagttgaagacttgatcctaactgaacccgaacctgaacatactggcaagtgcagagttagcggagtcgtgctggtagacgggtcaacagtttacgcggagtccgttatccttaccaccggcacttttctgagagggatgatcgtaatcgggcttgaaacccatcctgcaggacggttgggagatcagccgagcattgggcttgcacagactttggaaaagcttggtttcgtggtcgggcgtctcaagacgggtacgccaccccgaattgccaaggagagtattaatttcagcatcctgaataaacatattcctgataatcctagtatccctttcagctttactaacgaaactgtgtggatcaagccagaggaccaactgccttgctatctgacccataccaatccaagggtggatgagatcgttctgaagaatcttcatctcaactctcacgttaaggaaacaacccgcggtcccaggtattgcccatcgatcgaaagtaaggtactaagatttccaaaccgcctccaccaggtgtggctagaaccagagggtatggactccgatctcatctaccctcaaggactgtcaatgactctgcctgccgaactacaagaaaaaatgatcacctgtattcggggtctggagaaggccaaggttatacaacccggatatggcgtgcagtacgactacctcgatcctcggcaaataacccctagtctcgaaacacaccttgtccagagactcttttttgctggccagataaacggcacgaccggttacgaagaggccgcagcgcagactgagtgttgctcagtggctcgccttgagtgttcagatatgatatcgcagttgcaggcgatactgcttcctcaaccaagtcttgtggcagggaccgccggaatgcaccataatactcagggtgtgattgcgggaatcaacgcctcgctcagagtgagccggaaacctcctttcgttgtgtctcgcacggaaggctacataggcgttttaatcgacgaccttaccacgctcggaacttctgaaccctatagaatgttcaccagtagggtggaattcagactgtcattgaggcctgataatgctgactcgcgtctgaccttacgaggatataaagatgctggatgtgtcagtcagcagcgatatgagcgggcatgttggatgaagtcatccctggaggagggcatctctgtcttgaaatcaatagagttcctatcttcaaagtggaaaaaactcattcccgaggcgtccatctccaccagccgctctctgccagtgagagccctcgacgttctgaagtacgaggaagtcgatatggacagcctagcaaaagcggtcccagaaccccttaaaaaatacacgaagtgtagagaattggccgaacgcctgaaaattgaagctacatatgaaagcgtgcttttccatcagctccaggagatcaagggtgtgcaacaggatgaggctctgcagctccctaaagatctagattatttgaccattcgagatgtatcactctcccacgaggtgcgggagaagttgcacttttccaggccccaaacaattggagcagcctcccggattcccggagtgaccccagccgctatcatcaacttgctccgcttcgtcaaaactacccagcgacggcagtcagccatgaacgaatcctcaaagactgaccagtatctttgcgacgcagatcgccttcaagagcgtgagctgtag

SEQ ID NO: 43948 - protein, 342 aa, Artificial Sequence
  derived and/or modified sequence
MAPLDLDKYVEIARLCKYLPENDLKVSPICGLAPSGCGAPAGRPFLSPGPPPVFHFLRFLKERLCDYVCDLLLEESNVQPVSTPVTVCGDIHGQFYDLCELFRTGGQVPDTNYIFMGDFVDRGYYSLETFTYLLALKAKWPDRITLLRGNHESRQITQVYGFYDECQTKYGNANAWRYCTKVFDMLTVAALIDEQILCVHGGLSPDIKTLDQIRTIERNQEIPHKGAFCDLVWSDPEDVDTWAISPRGAGWLFGAKVTNEFVHINNLKLICRAHQLVHEGYKFMFDEKLVTVWSAPNYCYRCGNIASIMVFKDVNTREPKLFRAVPDSERVIPPRTTTPYFL

SEQ ID NO: 43949 - DNA, 1029 bp, Artificial Sequence
  derived and/or modified sequence
atggcccctctagacctcgacaaatacgtggaaatagcgcgactctgtaagtacctgcctgaaaatgacctgaaggtctcccctatttgcgggctcgctcccagcggctgcggagcgcctgccggccggcccttcctgtcaccaggcccaccacccgtgttccattttctccgatttttgaaggagagactctgtgactacgtctgtgacctgctcttagaggagtccaacgtgcaaccagttagcacacctgtgaccgtgtgcggggacatccatgggcagttttacgacctgtgcgagctgtttcgcacaggaggacaagtcccagacacgaattatatcttcatgggagacttcgtggatcgggggtattacagtctcgaaaccttcacttatttattggcactcaaggccaagtggcctgaccgcattactctgttgagagggaaccatgaatcgcgccagattactcaagtgtatggcttctacgatgaatgccagacaaagtatggtaatgctaatgcttggcggtattgtacaaaggttttcgacatgctgaccgtggccgctttgatagatgagcagatcttgtgtgtgcatgggggcttatccccggacataaaaactctcgatcagattagaactatagaaagaaatcaggaaattccacacaagggcgctttttgcgacctggtttggagtgacccagaagatgtggacacttgggccatatctccacggggcgccggatggctatttggagctaaagtcacgaacgaattcgtgcatatcaacaaccttaaactgatctgtcgggctcatcagctggttcacgaggggtacaagtttatgttcgacgagaaacttgtcactgtctggtcggcccccaactactgctatcgctgtgggaacatcgcatctataatggtctttaaagacgtgaacaccagagaacccaagctattcagggccgtaccagattcagaacgcgtcatcccccctcgcactactactccatactttctgtag

SEQ ID NO: 43950 - DNA, 1029 bp, Artificial Sequence
  derived and/or modified sequence
atggcccccctggacctggacaagtatgtggagatcgcccggctgtgcaagtacctgcctgaaaatgacctgaaggtgagccccatctgtggcctggcccccagcggctgtggggccccagctggccggcccttcctgagccctggccccccacctgtgttccacttcctgcgcttcctgaaggagcggctgtgtgactatgtgtgtgacctgctgctggaggagagcaatgtgcagcctgtgtccacccctgtgacagtgtgtggggacatccacggccagttctatgacctgtgtgagctgttcagaactggaggccaggtgcctgacaccaactacatcttcatgggagactttgtggaccggggctactacagcctggagaccttcacctacctgctggccctgaaggccaagtggccagaccgcatcaccctgctgcggggcaaccacgagagccggcagatcacccaggtgtatggcttctatgatgagtgccagaccaagtatggaaatgccaatgcctggagatactgcaccaaggtgtttgacatgctgactgtggccgccctgattgatgagcagatcctgtgtgtgcacggcggcctgagcccagacatcaagaccctggaccagatccgcaccatcgagaggaaccaggagatcccccacaagggggccttctgtgacctggtgtggagcgaccctgaagatgtggacacctgggccatcagccccagaggagctggctggctgtttggagccaaggtgaccaatgaatttgtgcacatcaacaacctgaagctgatctgccgggcccaccagctggtgcatgagggctacaagttcatgtttgatgagaagctggtgacagtgtggagcgcccccaactactgctaccgctgtggcaacatcgccagcatcatggtgttcaaggatgtgaacacccgggagcccaagctgttccgggctgtgcctgacagcgagagggtcatcccccccaggaccaccaccccctacttcctgtag

SEQ ID NO: 43951 - DNA, 1029 bp, Artificial Sequence
  derived and/or modified sequence
atggcccccctggacctggacaagtacgtggagatcgcccggctgtgcaagtatttgcccgaaaatgatctcaaggtctcacccatatgcggattagcaccaagtggttgtggagcccctgcaggtcggcctttcctatcacctggaccaccgccagtgttccatttccttaggttcctgaaggagcgcctgtgcgattatgtctgcgacttactgctggaagaaagtaatgtgcaaccggttagtacacccgtaacagtgtgcggagacattcatggacagttttacgacctgtgcgaacttttcaggacgggcggccaagtcccagataccaattacatttttatgggcgatttcgtggaccggggctactattccctggaaacatttacctatctactggccctgaaagcaaaatggcctgatcggattaccctccttcggggaaaccatgaaagccgacagattacccaggtttacggattttacgatgagtgccagactaagtacggcaacgccaatgcatggcgttactgtacgaaagtgttcgacatgctcacggtggctgccctgatcgatgaacagatactgtgcgtgcacggcggactgagcccagacattaagacactggaccagatccgcacgattgagaggaaccaggaaatccctcacaaaggcgccttttgcgacttggtgtggtctgacccagaggatgtggacacgtgggcgatttcccccaggggcgccggctggctgttcggggctaaggttaccaacgaatttgttcacatcaacaatctgaagctgatttgccgagcacatcagcttgtgcatgagggctacaaattcatgttcgatgaaaaactggtgacagtgtggagtgcgccaaattattgctaccggtgcggcaatatcgctagcattatggtcttcaaggacgtcaatacccgcgaacccaagctgttccgggccgtgccggactccgagagggtcattcctccaagaactaccacgccttatttcctctag

SEQ ID NO: 43952 - DNA, 1029 bp, Artificial Sequence
  derived and/or modified sequence
atggccccactggatctcgacaagtacgtggagatcgctagactctgtaagtacctacctgagaatgacctaaaagttagcccaatctgcggccttgctcccagtgggtgcggggctccggcaggtcgcccttttctgagtcccggtccccctcctgtgttccacttccttcggttccttaaggaaagactgtgcgattacgtctgtgaccttttgttggaggaatccaatgtccaaccagtctccacacccgtcacagtgtgtggcgacattcacgggcaattttacgacctttgtgagctctttagaaccggcggtcaagtgcctgacaccaactacatctttatgggcgatttcgtggacagaggttattactcattagaaacattcacgtacctcttggcactcaaagcaaaatggcctgacaggataaccctactccgagggaaccatgagtccagacagataacacaagtgtacggtttctacgacgagtgtcagaccaaatacggtaacgccaatgcctggagatattgcacgaaggtctttgacatgctgaccgttgcagccctgattgatgaacagatcttgtgcgtccatggcggactcagccctgatatcaagacgctggatcaaattcgtacaatagaacgtaaccaggaaataccccataaaggggctttctgcgacttggtgtggtcggaccccgaagacgtggacacatgggcaataagtcctaggggcgcaggatggctttttggtgcaaaagttacgaacgagttcgttcacatcaacaacctgaagctcatatgccgcgcacatcagctggtccacgagggatataagttcatgtttgacgagaagcttgttacggtctggtcagcaccgaactattgttaccgctgcggcaacatcgcctccattatggtatttaaagatgtgaatacaagggagccaaagctgttcagggctgtgcctgactctgagcgcgtcattccgcctcgcacaacgaccccctacttcctctag

SEQ ID NO: 43953 - DNA, 4349 bp, Artificial Sequence
  derived and/or modified sequence
gaagcgggctctcttggggcctgcagtcggggttcagccagagggggcgccgggcgtaccgacgtagcggggagaaacgggtcgcgctttaacggcgctgcgcaggcgccactcacgggccggacgtgacgcagggaaagttccggcttcggcctccgccgctgccgccgccgctgctacagccgccgccgccgctgttgccgcggcttgttattcttaaaatggcgccgctagacctggacaagtatgtggaaatagcgcggctgtgcaagtacctgccagagaacgacctgaaggtgagccctatttgcgggctcgccccttccggctgtggggcgcccgccggccggcccttcctttctccaggacccccgccggtatttcattttcttcgttttctaaaggagcggctatgtgactacgtttgtgacctcctcttagaagagtcaaatgttcagccagtatcaacaccagtaacagtgtgtggagatatccatggacagttttatgacctttgtgaactgttcagaactggaggtcaggttcctgacacaaactacatatttatgggtgattttgtagacagaggttactatagtttggagaccttcacttaccttcttgcattaaaggctaaatggcctgatcgtattacacttttgcgaggaaatcatgagagtagacagataacacaggtctatggattttatgatgagtgccaaaccaaatatggaaatgctaatgcctggagatactgtaccaaagtttttgacatgctcacagtagcagctttaatagatgagcagattttgtgtgtccatggtggtttatctcctgatatcaaaacactggatcaaattcgaaccatcgaacggaatcaggaaattcctcataaaggagcattttgtgatctggtttggtcagatcctgaagatgtggatacctgggctatcagtccccgaggagcaggttggctttttggagcaaaggtcacaaatgagtttgttcatatcaacaacttaaaactcatctgcagagcacatcaactagtgcacgaaggctataaatttatgtttgatgagaagctggtgacagtatggtctgctcctaattactgctatcgttgtggaaatattgcttcgatcatggtcttcaaagatgtaaatacaagagaaccaaagttattccgggcagttccagattcagaacgtgttattcctcccagaacgacaacgccatatttcctttgaggccttcgcccatcctgctgacccatttttctgccctcttcttaccccaattttcttgtattaccctctacaatatactttttattgagcactttgctgctgaaatgctgcctcttgcctttttttttttaaattttaaattatctaaatttattgtttgttgtggtgtctatagcaaagtttttctatcaattttcccccatcccatccccaccctggactcatttgagaagacttgagaaatgtcttaatactcacactgctgcatgtagctcttgcttatttactggtctgggaaacaggatgtgtttcctttttttaaaagccaattgacagattacacctaaatactcctccttttgtatcattcagccttttgttttagtttggtaagttttaagaaatttcagcagcaaagttgttattcagtgggcacgatggactccaaatgcctcaagttatgtatacctgtcccagatgtaaacttcattgtcctttgttggatgatattttaaatggatataaaataaattggtctaaagggctgccctccttgttgtgtttttaaattttagttaaaaactgctacagcttatgactttgtactttaagataattgtattgatcttttttcagattccttgtattttttaataaagtaatcttaaataaaactcagataggttaagtgttagaaattttaaacagcttacattgttagcgtaaagttatcttttcttttttcctaatcagagttcttgaccctttggttattgagtttaaaacttcaattgaaattcaatagtatttatttttgaaaaaaatcactaaactgtgcctaaagaacataactgccatattaatgttttggtttatatcctctatagtaatagaaaaacatttaatacttgtaatgctgatgtgttaatttgataccagttgagtagaatgtgatcaatccagtttacaatctatcatgagtattattaactaaaatctatgtgcttttcaataggaatcattcttctcttgctgtaacacttgaccttaacttttagaaagtgttcatttttaaactgcaactggaaaggttgaaaagttaggactcttgtatttgtgaactgtaatctgaagcagattatttaaagtgtagaaaaagaaacaagttcttcttttttgcaaaggtctgtgataccatatttcagctttgtgtaagtaatttgaatatccaaagggttgtgatgatcagttctgaatatgcaactgtccacttaataaggacaagtattccagtatctcttatgactgtagtcataaatgatgttggaatgtacattttgtgaaatagttggtatccctttactatgattaatttttgttattccaggaaatacttgtgaagccagccaattaataaagcactttagcatctgttcaggtagttttgaaaacccacttttccccttcaggataagaacttccaggttacctaaaaatgcaataaaaatctttatagtctaagcttcttggcatataatttttcatcagggttttcttttattaattgagcacaatactgttttgatttaatttttttccctcaaaccacccagctccttacatagtttttaattatatagctatatgaaagaggtggctaagacatttgctgcacacacttgaactaatgttgggtcagtagcttcgtgttactgccctgatcccagtgtaattcaggtggaaaggtatttttatctcacagggatatgtagctatgtattttactaattgtgaaacactggaaattaatgatgcagacaacttggtgtggtctttgaacagctctctgcagtatttttttttttcctgttaccataaattgtatttaagtgcttgctttccacttaagttgtactaatagaaccggtaactcccagccctccctgtttgacactccttagcttagattgatgtagttgtttttgttatccctataatgtgacttttatttttaagtcattgtgtactgcatttgtttgtcactagttgggcacgtgccaataatattctctccattccttatctgccatctctgttttgcctgatttctcttcaactgaataatggctttttgcatggaaaaaatagtttttactattagacgtgtaaagggaagagagagctaatgtattggactttgtgagcctacaaggaatattttggatccctccaataaataagggctatgtactatatgtactatatagagttatcatgtggtggaagatacttgcaagtcatagatttatgggcaggaggatttgttactccctatatctaggctgaatgtaaaatcccttatgttgtatcaatgggggtaaaaactatttttatttgcctatgatatacttggtttctaataaagtgccctaggctctagtgagaactgtctactttgaattgccatttactccctttcctcctttggccgatatgctcttggctagctttttataagttaatgtgtttccccaaaaagtttcactactttatattcatttgagtgtgatcctaaaacacctggatcaacagtacatctcatatgcaatctgcatcagctcctattctgtctggatgtctagaactgttggaagattttgacgtcttaagccctaggttttgctttgggaaataaggtttgaaatattgttcattgcattaagatttgtgtgtgtgtgctttgtaagcccagaaccaggttttggaaaatgcctgtactgtgaaagcaaattaggactctttctgagcctctttcattgtcagaaatagaatcactttccatcagcttccaggaaattgtgtatctggagtcgaagagatttgacatcaagaatccagatttttaaatgtaattgttttttaaatgctaatgtttgtaaagcaccttcagttcttcggatgaaaggtgctatattccctcagtgtaaattaataaaaagattacaggaagtttgtcaaaaaattcaatgcatagtctgtagtatgtcctgacaagaagttagcattttatataagaaattaaaaaatgcttattcctcc

SEQ ID NO: 43954 - DNA, 569 bp, Artificial Sequence
  derived and/or modified sequence
cgccgctgccgccgccgctgctacagccgccgccgccgctgttgccgcggcttgttattcttaaaatggcgccgctagacctggacaagtatgtggaaatagcgcggctgtgcaagtacctgccagagaacgacctgaagttttgggctatgatgcattaggcttctgcgagtatttatatacagattttgaacatgtttttattgccaagactacagttgctgggtcaaatgcggctatgtgactacgtttgtgacctcctcttagaagagtcaaatgttcagccagtatcaacaccagtaacagtgtgtggagatatccatggacagttttatgacctttgtgaactgttcagaactggaggtcaggttcctgacacaaactacatatttatgggtgattttgtagacagaggttactatagtttggagaccttcacttaccttcttgcattaaaggctaaatggcctgatcgtattacacttttgcgaggaaatcatgagagtagacagataacacaggtctatggattttatgatgagtgccaaaccaaatatggaaatgctaat

SEQ ID NO: 43955 - DNA, 1029 bp, Artificial Sequence
  derived and/or modified sequence
atggcccccctggacctggacaagtacgtggagatcgccagactgtgcaagtacctgcccgagaacgacctgaaggtgagccccatctgcggcctggcccccagcggctgcggcgcccccgccggcagacccttcctgagccccggccccccccccgtgttccacttcctgagattcctgaaggagagactgtgcgactacgtgtgcgacctgctgctggaggagagcaacgtgcagcccgtgagcacccccgtgaccgtgtgcggcgacatccacggccagttctacgacctgtgcgagctgttcagaaccggcggccaggtgcccgacaccaactacatcttcatgggcgacttcgtggacagaggctactacagcctggagaccttcacctacctgctggccctgaaggccaagtggcccgacagaatcaccctgctgagaggcaaccacgagagcagacagatcacccaggtgtacggcttctacgacgagtgccagaccaagtacggcaacgccaacgcctggagatactgcaccaaggtgttcgacatgctgaccgtggccgccctgatcgacgagcagatcctgtgcgtgcacggcggcctgagccccgacatcaagaccctggaccagatcagaaccatcgagagaaaccaggagatcccccacaagggcgccttctgcgacctggtgtggagcgaccccgaggacgtggacacctgggccatcagccccagaggcgccggctggctgttcggcgccaaggtgaccaacgagttcgtgcacatcaacaacctgaagctgatctgcagagcccaccagctggtgcacgagggctacaagttcatgttcgacgagaagctggtgaccgtgtggagcgcccccaactactgctacagatgcggcaacatcgccagcatcatggtgttcaaggacgtgaacaccagagagcccaagctgttcagagccgtgcccgacagcgagagagtgatcccccccagaaccaccaccccctacttcctgtag

SEQ ID NO: 43956 - protein, 366 aa, Artificial Sequence
  derived and/or modified sequence
MARERPPGRGCGVLRRCLLGAVLLFGLRLCAELRRAGPGSPTRSAPPGPAWRPPGPHLPPAPGQPRGASRRQVTYVRSGRRAPPGGGGSGTPEPGCCAPRGRPRRKGPRWHIDLQPWAGSAQSLDEEAWRFLRYISTTQIACNHMNTDSLATDSSPTHKPWSVCLDDRFNLAHQIRNKQCRLYSLGLGSDDTHFEVSMANNGCEVHRFDPSVKSAHILESQHLWYHRLSIDWRDPHPAVAAQKPHSNTRKLGSILNEFGHHKIDVLKADLESAEWKVLENLILEDVLEQIGQLIFEIHLHWPGFEVSGSDSSVVRFWYSLLKELEQKDFRLFHSYKDLSKPQLFLKKDIFNASSCYTLSWVNTRWK

SEQ ID NO: 43957 - DNA, 1101 bp, Artificial Sequence
  derived and/or modified sequence
atggcaagagagcggcctcctgggcgaggctgcggagtgctcagacgttgtctgctgggagcggtgcttctgttcggactacgactctgcgctgaactcaggcgggctggtccaggcagcccaacaaggtctgctccacctggacctgcatggcgcccacccggtcctcacttgccgcctgctccgggtcagcctagaggagcatctcggaggcaggtgacgtacgtccggtctggcagacgtgcaccgccaggagggggaggaagtggaacccccgagcctggatgttgcgcccctcgtgggagaccgaggcgaaaggggcctaggtggcacattgatctgcagccatgggccggatctgcccaatcacttgatgaggaggcatggagattcctgcgttacatcagcaccactcaaattgcctgtaaccacatgaatactgattccttagccacagatagttcccctacacacaagccttggtcggtgtgtctagacgacaggttcaaccttgcccaccaaattcggaataaacagtgcagactatactccctgggactgggatccgacgacacccattttgaggtgagcatggcaaacaatggatgtgaggttcataggttcgacccctcagtgaagagtgcccacatcctggagagccagcacctgtggtatcacagactgtcaatcgactggagggatccccatccagccgtggcggcacagaagccacacagcaatacacggaaactgggaagcatcctcaatgagtttggccatcacaaaatcgatgtattgaaggcggacctggagtccgccgagtggaaggtactcgaaaatcttattctggaagatgtcctcgaacagattggacagctcatcttcgagatccaccttcattggccaggatttgaggtaagcggcagcgattcctcagtggtgcgattttggtattcattactgaaggagctggaacaaaaggatttccgcctgttccatagctataaagatctcagcaaaccgcagctttttctgaagaaggatatttttaacgcctcttcttgttatacgctctcctgggtcaatactcgctggaagtag

SEQ ID NO: 43958 - DNA, 1101 bp, Artificial Sequence
  derived and/or modified sequence
atggcacgggaacggcctccaggaagaggctgtggcgtgctccgccgctgtctactcggagctgtgctgctcttcggcctcagattgtgcgctgaattgcggagggccggccctgggtctcctactaggtccgctccaccaggacctgcatggcgcccacccggaccccacttgcccccggcccccggacaacccagaggggctagcaggcgccaagtgacttacgtgaggtcgggacgccgagcaccaccagggggcggtggatccggcacacccgagcccggatgctgcgcccctcgtggcaggcctagacgaaaaggcccccggtggcacattgacctccaaccctgggcggggagcgctcaaagcctggacgaagaagcctggagatttctccggtacatcagcaccacacaaattgcttgcaatcatatgaacaccgactcattggccacagatagcagtcccacccacaaaccttggtcagtctgcttggatgatagattcaatctcgctcaccagatcagaaacaaacagtgtcgcctgtactcactggggcttggatctgacgacacacatttcgaagtaagcatggcaaacaatggttgcgaagtgcaccgattcgacccttcagtgaagtccgcacatatacttgaaagtcagcacctgtggtatcaccggctcagcattgattggcgtgacccgcatccagcggtggcagctcagaaaccccatagcaatacccgcaaattaggcagcatcctcaacgagtttgggcaccataagattgacgtattaaaggcagatttggagagcgccgaatggaaagttctggagaatctgatcctcgaagacgtactggagcagatcggacagctaatttttgagatacacctgcattggccggggttcgaagtatccgggtctgacagctctgttgtgagattctggtatagtctcctgaaggaactcgagcaaaaggactttcggctctttcacagctacaaagacctgagcaaaccccaactgtttcttaaaaaagacatcttcaatgccagctcttgttataccctttcttgggtcaacaccagatggaaatag

SEQ ID NO: 43959 - DNA, 1101 bp, Artificial Sequence
  derived and/or modified sequence
atggcacgagagcgccctcccggacgcggatgcggtgtactccgtcgttgcttgttgggcgccgtgttactgtttggactgcgtctctgcgctgagctgagaagagccggcccaggctcacctactcggtccgctccaccaggcccagcttggagaccacccggcccacacctgccccccgcaccagggcagccacgaggcgcttccagaaggcaagtgacatacgtccggtcaggaagacgcgcaccaccaggagggggcggctcaggaacaccagagcctggttgctgtgctccacgcggcaggcctagacgaaaaggcccccggtggcacattgacctccaaccctgggcggggagcgctcaaagcctggacgaagaagcctggagatttctccggtacatcagcaccacacaaattgcttgcaatcatatgaacaccgactcattggccacagatagcagtcccacccacaaaccttggtcagtctgcttggatgatagattcaatctcgctcaccagatcagaaacaaacagtgtcgcctgtactcactggggcttggatctgacgacacacatttcgaagtaagcatggcaaacaatggttgcgaagtgcaccgattcgacccttcagtgaagtccgcacatatacttgaaagtcagcacctgtggtatcaccggctcagcattgattggcgtgacccgcatccagcggtggcagctcagaaaccccatagcaatacccgcaaattaggcagcatcctcaacgagtttgggcaccataagattgacgtattaaaggcagatttggagagcgccgaatggaaagttctggagaatctgatcctcgaagacgtactggagcagatcggacagctaatttttgagatacacctgcattggccaggtttcgaagtgtcaggaagcgattctagtgtggtgcgcttttggtactccttgctgaaggaattggagcagaaggactttcggttatttcattcttacaaagatttgtcaaaacctcagctgttcctgaagaaagatatctttaatgccagttcatgttatactctgtcctgggtgaacactcgatggaaatag

SEQ ID NO: 43960 - DNA, 1101 bp, Artificial Sequence
  derived and/or modified sequence
atggccagagagagaccccccggcagaggctgcggcgtgctgagaagatgcctgctgggcgccgtgctgctgttcggcctgagactgtgcgccgagctgagaagagccggccccggcagccccaccagaagcgccccccccggccccgcctggagaccccccggcccccacctgccccccgcccccggccagcccagaggcgccagcagaagacaggtgacctacgtgagaagcggcagaagagccccccccggcggcggcggcagcggcacccccgagcccggctgctgcgcccccagaggcagacccagaagaaagggccccagatggcacatcgacctgcagccctgggccggcagcgcccagagcctggacgaggaggcctggagattcctgagatacatcagcaccacccagatcgcctgcaaccacatgaacaccgacagcctggccaccgacagcagccccacccacaagccctggagcgtgtgcctggacgacagattcaacctggcccaccagatcagaaacaagcagtgcagactgtacagcctgggcctgggcagcgacgacacccacttcgaggtgagcatggccaacaacggctgcgaggtgcacagattcgaccccagcgtgaagagcgcccacatcctggagagccagcacctgtggtaccacagactgagcatcgactggagagacccccaccccgccgtggccgcccagaagccccacagcaacaccagaaagctgggcagcatcctgaacgagttcggccaccacaagatcgacgtgctgaaggccgacctggagagcgccgagtggaaggtgctggagaacctgatcctggaggacgtgctggagcagatcggccagctgatcttcgagatccacctgcactggcccggcttcgaggtgagcggcagcgacagcagcgtggtgagattctggtacagcctgctgaaggagctggagcagaaggacttcagactgttccacagctacaaggacctgagcaagccccagctgttcctgaagaaggacatcttcaacgccagcagctgctacaccctgagctgggtgaacaccagatggaagtag

SEQ ID NO: 43961 - DNA, 1119 bp, Artificial Sequence
  derived and/or modified sequence
atggcccgggagaggccgcccgggaggggctgcggcgtcctgcgccggtgtctactcggggctgtgctgttgttcggcctgcggctctgcgcagagctgcggcgcgccgggcccgggtcccccacccgcagcgccccgccgggcccggcctggcggccacctgggccgcacctgccgcccgcgccgggccagccgcgcggcgccagcaggaggcaggtgacctacgtgcgcagcggtcgccgggcgccgccggggggcggcgggagcgggacgccggagcctggctgctgtgccccgcgcgggcgcccccgccggaagggtccccggtggcatatagatctccagccttgggcaggctctgctcagtccctggatgaagaagcctggaggttcctgagatatatcagcaccacccagattgcatgcaatcacatgaatacagacagcctggctactgactctagtcctacacacaagccctggtcagtgtgtcttgacgacaggttcaatttagctcatcaaatccgcaacaagcagtgccgcctctactccttagggctaggaagtgatgatacccattttgaggttagcatggccaacaacggatgtgaagtgcatcgttttgatcctagtgtcaagtcagctcacattctggagagtcagcacctttggtatcaccgcttgtccattgactggcgggatccccatccagctgttgctgcccaaaaaccacatagcaacaccagaaaactgggaagcattttgaatgaatttggacatcacaagattgacgttctcaaggcagatctggaaagtgcagaatggaaagttttggaaaatcttattctggaagatgttcttgagcagattggacagctcatctttgagatccatctccactggcctgggtttgaggtcagtggcagtgacagcagcgttgtgcggttctggtacagccttctcaaagagttagaacaaaaggatttcaggctttttcacagttacaaagacttatctaaacctcagctattcttgaagaaagacattttcaatgcaagtagctgttatactctgagttgggtgaatacaagatggaaataggatgcaggatgtcatcaa

SEQ ID NO: 43962 - DNA, 1101 bp, Artificial Sequence
  derived and/or modified sequence
atggctagagaaagacccccaggaagaggttgtggagtcctacggcgctgtctgctcggcgcagtccttttattcgggctcagattgtgcgccgagctgcggcgcgccggtcctggatctcccacccggtctgccccacctggcccagcctggcgcccccctggacctcacctcccacctgcaccaggtcagccaaggggggccagcagacgtcaggttacctatgtgcgcagcggaagaagagccccacccggcgggggaggctccggtactccagagcctggctgttgcgcccccaggggaagacctcgcagaaaaggcccaagatggcacatagatctgcagccttgggcaggaagtgcccagagtctggacgaagaagcatggagatttctgcgctatatctcaacgacccaaattgcttgtaaccatatgaacacggatagtctcgctacggatagtagtccgacccataagccgtggtctgtgtgcctggacgatcggttcaatctcgctcaccagatacggaacaaacagtgccgcttgtacagcctaggattggggagcgacgatacgcatttcgaggtaagcatggctaataatggctgcgaggtccaccggttcgaccccagtgtgaagtccgcccacattctcgagtcacagcatctgtggtaccaccggctctcaatcgattggagagatccccacccggccgtagccgcccagaaacctcactccaacacgagaaagttgggatccattctgaatgagtttgggcaccacaagatcgatgtgctgaaggctgatttagaaagtgcagagtggaaagtccttgaaaatctgatcctggaggacgtgttagaacagattgggcagttaatcttcgaaatccatctccactggcctggttttgaagtttccggcagcgattcgtccgttgtcagattctggtatagcctgttaaaggagttggaacaaaaagactttcggctgtttcatagctacaaggatttgtctaagcctcagctgttcctcaagaaagacatttttaacgctagtagctgctacacattgtcctgggtgaatacacgatggaagtag

SEQ ID NO: 43963 - DNA, 1101 bp, Artificial Sequence
  derived and/or modified sequence
atggcccgggagcggcccccaggccggggctgcggcgtgctgcggcgctgcctgctgggcgctgtgctgctgtttggcctgcggctgtgtgccgagctgcggcgggccggccctggcagccccaccaggtctgcccctcctggccctgcctggaggcctcctggcccccacctgcccccagcccctggccagcccaggggggccagccggcggcaggtgacctacgtgcgcagcggccggcgggcccctcctgggggcggcggcagcggcaccccagagcccggctgctgtgccccccggggccggcccaggaggaagggcccccgctggcacatcgacctgcagccctgggccggcagcgcccagagcctggatgaggaggcctggaggttcctgcgctacatcagcaccacccagatcgcctgcaaccacatgaacacagacagcctggccacagacagcagccccacccacaagccctggagcgtgtgcctggatgaccgcttcaacctggcccaccagatccggaacaagcagtgccgcctgtacagcctgggcctgggcagtgatgacacccactttgaggtgtccatggccaacaacggctgtgaggtgcacagatttgaccccagcgtgaagagcgcccacatcctggagagccagcacctgtggtaccaccggctgagcattgactggagggacccccaccctgctgtggccgcccagaagccccacagcaacaccaggaagctgggcagcatcctgaatgaatttggccaccacaagattgatgtgctgaaggctgacctggagagcgctgagtggaaggtgctggagaacctgatcctggaggatgtgctggagcagatcggccagctgatctttgagatccacctgcactggccaggctttgaggtgtctggcagtgacagctctgtggtgcgcttctggtacagcctgctgaaggagctggagcagaaggacttccgcctcttccacagctacaaggacctgagcaagccccagctgttcctgaagaaggacatcttcaatgccagcagctgctacaccctgtcctgggtgaacacccgctggaagtag

SEQ ID NO: 43964 - DNA, 1101 bp, Artificial Sequence
  derived and/or modified sequence
atggcccgggagcggccccccggccggggctgcggcgtgctgcggagatgcctcctgggagctgtgctcctcttcggtctgagactgtgcgctgagttacgtcgagcgggaccaggatctccgacccgatccgccccgcccgggcctgcctggcgcccaccaggcccccaccttccacccgcccccggccaaccacggggagcttctcgcaggcaagtcacgtacgtgcgttccggcaggagggctcccccaggcggcgggggatccgggacaccagaacccggctgctgcgcccctcgcggacgcccgcgcaggaaagggccgagatggcacatcgatcttcagccctgggcagggtccgcccagagtcttgacgaagaagcgtggaggtttctccgctacatttcaaccacccaaattgcatgcaatcacatgaacaccgacagcctggccacagatagttcacccactcacaaaccatggagcgtttgcctcgacgaccgtttcaaccttgcccaccagattcgcaacaagcagtgccgtttgtattcgctgggtcttggcagtgacgacacccactttgaagttagcatggccaacaatggatgcgaagttcacaggtttgatccctcagtcaagtcagctcatatactggaatctcaacacctctggtaccatcggctgagtatcgattggagagatccgcacccagccgtagccgcccagaagccccattccaatacaaggaagctcgggagcatcctgaatgagttcggccaccacaagatcgatgttcttaaagctgaccttgagtccgcggaatggaaagtgctggaaaacctcatcctcgaggacgtcctggagcaaatcggacagttgatcttcgaaattcatctccactggccaggctttgaggttagcggctcagatagcagcgtggttcgcttctggtacagcctgctcaaagaactggaacagaaagacttccggctttttcatagctacaaagatctgtcaaaacctcagttgttcctgaaaaaagacatctttaatgccagcagctgctacacattgagctgggttaacacacgttggaagtag

SEQ ID NO: 43965 - RNA, 1101 nt, Artificial Sequence
  derived and/or modified sequence
auggcacgggaacggccuccaggaagaggcuguggcgugcuccgccgcugucuacucggagcugugcugcucuucggccucagauugugcgcugaauugcggagggccggcccugggucuccuacuagguccgcuccaccaggaccugcauggcgcccacccggaccccacuugcccccggcccccggacaacccagaggggcuagcaggcgccaagugacuuacgugaggucgggacgccgagcaccaccagggggcgguggauccggcacacccgagcccggaugcugcgccccucguggcaggccuagacgaaaaggcccccgguggcacauugaccuccaacccugggcggggagcgcucaaagccuggacgaagaagccuggagauuucuccgguacaucagcaccacacaaauugcuugcaaucauaugaacaccgacucauuggccacagauagcagucccacccacaaaccuuggucagucugcuuggaugauagauucaaucucgcucaccagaucagaaacaaacagugucgccuguacucacuggggcuuggaucugacgacacacauuucgaaguaagcauggcaaacaaugguugcgaagugcaccgauucgacccuucagugaaguccgcacauauacuugaaagucagcaccugugguaucaccggcucagcauugauuggcgugacccgcauccagcgguggcagcucagaaaccccauagcaauacccgcaaauuaggcagcauccucaacgaguuugggcaccauaagauugacguauuaaaggcagauuuggagagcgccgaauggaaaguucuggagaaucugauccucgaagacguacuggagcagaucggacagcuaauuuuugagauacaccugcauuggccgggguucgaaguauccgggucugacagcucuguugugagauucugguauagucuccugaaggaacucgagcaaaaggacuuucggcucuuucacagcuacaaagaccugagcaaaccccaacuguuucuuaaaaaagacaucuucaaugccagcucuuguuauacccuuucuugggucaacaccagauggaaauag

SEQ ID NO: 43966 - RNA, 1101 nt, Artificial Sequence
  derived and/or modified sequence
auggcacgagagcgcccucccggacgcggaugcgguguacuccgucguugcuuguugggcgccguguuacuguuuggacugcgucucugcgcugagcugagaagagccggcccaggcucaccuacucgguccgcuccaccaggcccagcuuggagaccacccggcccacaccugccccccgcaccagggcagccacgaggcgcuuccagaaggcaagugacauacguccggucaggaagacgcgcaccaccaggagggggcggcucaggaacaccagagccugguugcugugcuccacgcggcaggccuagacgaaaaggcccccgguggcacauugaccuccaacccugggcggggagcgcucaaagccuggacgaagaagccuggagauuucuccgguacaucagcaccacacaaauugcuugcaaucauaugaacaccgacucauuggccacagauagcagucccacccacaaaccuuggucagucugcuuggaugauagauucaaucucgcucaccagaucagaaacaaacagugucgccuguacucacuggggcuuggaucugacgacacacauuucgaaguaagcauggcaaacaaugguugcgaagugcaccgauucgacccuucagugaaguccgcacauauacuugaaagucagcaccugugguaucaccggcucagcauugauuggcgugacccgcauccagcgguggcagcucagaaaccccauagcaauacccgcaaauuaggcagcauccucaacgaguuugggcaccauaagauugacguauuaaaggcagauuuggagagcgccgaauggaaaguucuggagaaucugauccucgaagacguacuggagcagaucggacagcuaauuuuugagauacaccugcauuggccagguuucgaagugucaggaagcgauucuaguguggugcgcuuuugguacuccuugcugaaggaauuggagcagaaggacuuucgguuauuucauucuuacaaagauuugucaaaaccucagcuguuccugaagaaagauaucuuuaaugccaguucauguuauacucuguccugggugaacacucgauggaaauag

SEQ ID NO: 43967 - protein, 139 aa, Artificial Sequence
  derived and/or modified sequence
MSISSALAMVFMGAKGNTAAQMSQALCFSKIGGEDGDIHRGFQSLLVAINRTDTEYVLRTANGLFGEKSYDFLTGFTDSCGKFYQATIKQLDFVNDTEKSTTRVNSWVADKTKGENILLFYFDNILNSFIVSSLQNCQI

SEQ ID NO: 43968 - DNA, 420 bp, Artificial Sequence
  derived and/or modified sequence
atgtctatttcgagtgcactggccatggtttttatgggagccaagggaaacaccgccgctcagatgtcccaggcgctgtgtttttcaaagatcggaggcgaagatggcgacattcatagagggtttcagtccctgcttgtcgcaatcaaccgaaccgatacagagtatgtactgcggactgccaatggactgttcggcgagaagtcctatgacttcttgacagggtttacggactcctgcggcaaattttatcaggctaccatcaaacagctagactttgtaaacgacacagaaaagtcaacaacacgtgtgaactcctgggtcgcagataaaacaaagggggaaaacattctgctgttttacttcgataatatcctgaattcgttcattgtatccagcttgcagaattgccagatctag

SEQ ID NO: 43969 - DNA, 162 bp, Artificial Sequence
  derived and/or modified sequence
atggagatctttatcgaggttttctctcactttctcctgcagctcacagagctgaccctgaatatgtgcttagaacttccgactggctccctagagaagtcattgatgatttcaagccaggttcttcagattcccgtagctaactctacaaagcaacggtag

SEQ ID NO: 43970 - DNA, 679 bp, Artificial Sequence
  derived and/or modified sequence
attcactgggaactaacacccggcgccgctcagacatctctattcccgcctctccgacccggtctcacttcgctcctgggcagctgcgcggagaactggggctcaccgtcatggatgctctatcagaagcaaatggcacatttgcattaaaccttttgaaaaagctaggggaaaacaactcaaacaacttatttttttccccatgagcatatcatcagccttggccatggttttcatgggggcaaagggaaacactgcagctcagatgtctcaggcactttgttttagtaaaatcggaggtgaagatggagatattcatcgaggttttcagtcacttcttgttgcaattaacagaactgacactgaatatgtgcttagaactgccaacgggctctttggagaaaagtcttatgatttcctcacaggttttacagattcctgtggcaaattctaccaagcaacgataaaacagctagactttgtgaatgatacagagaagtccacaacacgtgtaaactcctgggttgctgataaaactaaaggtgaaaatatattgttattctatttcgataatattttaaacagttttatagtcagttctttacaaaactgtcaaatataaaaaggagtccttttttctctaaacaactatgcaaacattaaaacctttctttggaaa

SEQ ID NO: 43971 - DNA, 162 bp, Artificial Sequence
  derived and/or modified sequence
atggagatattcatcgaggttttcagtcacttcttgttgcaattaacagaactgacactgaatatgtgcttagaactgccaacgggctctttggagaaaagtcttatgatttcctcacaggttttacagattcctgtggcaaattctaccaagcaacgataa

SEQ ID NO: 43972 - DNA, 420 bp, Artificial Sequence
  derived and/or modified sequence
atgagcatcagcagcgccctggccatggtgttcatgggcgccaagggcaacacagctgcccagatgagccaggccctgtgcttcagcaagattggaggagaagatggagacatccaccggggcttccagagcctgctggtggccatcaacagaacagacacagaatatgtgctgaggacagccaacggcctgtttggagagaagagctatgacttcctgaccggcttcacagacagctgtgggaagttctaccaggccaccatcaagcagctggactttgtgaatgacacagagaagagcaccaccagggtgaacagctgggtggccgacaagaccaagggggagaacatcctgctcttctactttgacaacatcctgaacagcttcatcgtgagcagcctgcagaactgccagatctag

SEQ ID NO: 43973 - DNA, 162 bp, Artificial Sequence
  derived and/or modified sequence
atggagatcttcatcgaggtgttcagccacttcctgctgcagctgacagagctgaccctgaacatgtgcctggagctgcccaccggcagcctggagaagagcctgatgatcagcagccaggtgctgcagatccctgtggccaacagcaccaagcagaggtag

SEQ ID NO: 43974 - DNA, 420 bp, Artificial Sequence
  derived and/or modified sequence
atgagcatcagcagcgccctggccatggtgttcatgggcgccaaggggaacacagcagcacagatgagtcaagcgctctgttttagtaaaatcggcggcgaagacggcgatattcatcggggattccaatccctactggttgctattaatcgaacagataccgaatacgtgctgcggactgcaaatgggctctttggcgaaaaatcatatgatttcctaaccggtttcactgactcttgtggcaaattttaccaggccactatcaaacagctcgacttcgtaaatgataccgaaaaatcaacaacaagagtgaatagttgggtggcggataagacaaagggagagaacattttacttttctactttgacaatattctgaattccttcatcgtatcgagtctccaaaactgtcaaatatag

SEQ ID NO: 43975 - DNA, 162 bp, Artificial Sequence
  derived and/or modified sequence
atggagatcttcatcgaggtgttcagccacttcctgctgcagctgacagagctaaccttgaacatgtgcttagaattgcctactggatctctggagaagtccctcatgatctccagtcaagtactccaaatacccgtcgcaaactcaaccaagcaacgctag

SEQ ID NO: 43976 - DNA, 420 bp, Artificial Sequence
  derived and/or modified sequence
atgagtataagcagtgcgttggctatggtcttcatgggggcaaaaggaaacactgcagcccagatgagtcaggccctctgtttttccaagattgggggagaggacggggatatccatcggggatttcagtccttgttggtggcaattaacagaacagataccgaatatgtgttgaggacagcgaacgggctttttggcgagaagtcctacgactttctgactggattcaccgattcatgtggcaaattttatcaggctactataaagcaactggatttcgtcaatgataccgagaagtctaccacccgcgtaaattcttgggtcgcggacaagaccaagggggagaacatattgctgttctacttcgataatatcttgaactccttcatcgtgtctagcctgcagaactgtcagatatag

SEQ ID NO: 43977 - DNA, 162 bp, Artificial Sequence
  derived and/or modified sequence
atggagatctttatcgaggtgtttagtcattttctgctacagctcactgaactgacactgaacatgtgcttagagttaccaacagggtctcttgaaaaaagcctgatgataagctctcaggttctgcagatccccgtagctaactccaccaagcaaagatag

SEQ ID NO: 43978 - DNA, 420 bp, Artificial Sequence
  derived and/or modified sequence
atgagcatcagcagcgccctggccatggtgttcatgggcgccaagggcaacaccgccgcccagatgagccaggccctgtgcttcagcaagatcggcggcgaggacggcgacatccacagaggcttccagagcctgctggtggccatcaacagaaccgacaccgagtacgtgctgagaaccgccaacggcctgttcggcgagaagagctacgacttcctgaccggcttcaccgacagctgcggcaagttctaccaggccaccatcaagcagctggacttcgtgaacgacaccgagaagagcaccaccagagtgaacagctgggtggccgacaagaccaagggcgagaacatcctgctgttctacttcgacaacatcctgaacagcttcatcgtgagcagcctgcagaactgccagatctag

SEQ ID NO: 43979 - DNA, 162 bp, Artificial Sequence
  derived and/or modified sequence
atggagatcttcatcgaggtgttcagccacttcctgctgcagctgaccgagctgaccctgaacatgtgcctggagctgcccaccggcagcctggagaagagcctgatgatcagcagccaggtgctgcagatccccgtggccaacagcaccaagcagagatag

SEQ ID NO: 43980 - protein, 283 aa, Artificial Sequence
  derived and/or modified sequence
MAPLDLDKYVEIARLCKYLPENDLKRLCDYVCDLLLEESNVQPVSTPVTVCGDIHGQGDFVDRGYYSLETFTYLLALKAKWPDRITLLRGNHESRQITQVYGFYDECQTKYGNANAWRYCTKVFDMLTVAALIDEQILCVHGGLSPDIKTLDQIRTIERNQEIPHKGAFCDLVWSDPEDVDTWAISPRGAGWLFGAKVTNEFVHINNLKLICRAHQLVHEGYKFMFDEKLVTVWSAPNYCYRCGNIASIMVFKDVNTREPKLFRAVPDSERVIPPRTTTPYFL

SEQ ID NO: 43981 - DNA, 477 bp, Artificial Sequence
  derived and/or modified sequence
atgcttacagtcgcagcactgattgatgagcagatactttgcgtgcacggaggtttgtcacctgacattaaaacgctcgaccagattaggaccatcgaaaggaatcaggagataccccataaaggagctttttgcgacttagtgtggtctgacccggaggacgtggacacttgggctatttcaccaagaggtgctggatggctgttcggtgctaaggtcacaaacgaatttgtgcacatcaataatcttaagctaatctgccgtgcccaccagctagtgcatgaggggtacaaattcatgtttgatgaaaagctcgttaccgtgtggtctgcccctaattactgctacaggtgtggaaacattgcttctattatggtgttcaaggatgtgaacacaagagagcctaagctctttagggccgtccctgattcggaacgcgtcataccaccgcgaaccactactccttattttttgtag

SEQ ID NO: 43982 - DNA, 852 bp, Artificial Sequence
  derived and/or modified sequence
atggcacctctcgacctagataagtacgtggagattgcccggctctgcaagtaccttccggagaatgacctcaaacggctttgcgattatgtgtgcgatttactgttggaggaaagcaacgtgcagccagtgagcacccccgtgacggtatgcggagatatccacgggcagggcgattttgttgaccgtggctactactcactggagacctttacctacctcctcgctttaaaagccaaatggcccgacaggatcaccctactgcgggggaaccacgagtctcgccagattactcaggtctatggattttacgatgagtgtcagaccaagtatggaaatgcaaacgcctggagatattgcaccaaggtgttcgacatgttaactgtggcagccttaatagatgagcagattctgtgcgtgcacggtggattatcacctgacatcaagactctcgaccagattaggacaatcgagagaaatcaggagattccgcacaagggcgctttctgtgacctggtgtggtcagatccggaagatgtggacacctgggcaatatctccccgaggcgcaggctggctgttcggcgctaaggttacaaatgaattcgtacatatcaataatctcaagctgatttgcagagctcatcagctggtgcacgaaggctataaattcatgtttgatgagaagcttgtgactgtgtggagtgctcctaactactgttaccgctgtgggaacatcgcctccatcatggtctttaaggatgttaatacaagagagcctaagctgttccgggccgtccccgattctgaaagggtaatcccccccaggacaactaccccctacttcttgtag

SEQ ID NO: 43983 - DNA, 477 bp, Artificial Sequence
  derived and/or modified sequence
atgctgactgtggccgccctgattgatgagcagatcctgtgtgtgcacggcggcctgagcccagacatcaagaccctggaccagatccgcaccatcgagaggaaccaggagatcccccacaagggggccttctgtgacctggtgtggagcgaccctgaagatgtggacacctgggccatcagccccagaggagctggctggctgtttggagccaaggtgaccaatgaatttgtgcacatcaacaacctgaagctgatctgccgggcccaccagctggtgcatgagggctacaagttcatgtttgatgagaagctggtgacagtgtggagcgcccccaactactgctaccgctgtggcaacatcgccagcatcatggtgttcaaggatgtgaacacccgggagcccaagctgttccgggctgtgcctgacagcgagagggtcatcccccccaggaccaccaccccctacttcctgtag

SEQ ID NO: 43984 - DNA, 852 bp, Artificial Sequence
  derived and/or modified sequence
atggcccccctggacctggacaagtatgtggagatcgcccggctgtgcaagtacctgcctgaaaatgacctgaagaggctgtgtgactatgtgtgtgacctgctgctggaggagagcaatgtgcagcctgtgtccacccctgtgacagtgtgtggggacatccacggccagggcgactttgtggaccggggctactacagcctggagaccttcacctacctgctggccctgaaggccaagtggccagaccgcatcaccctgctgcggggcaaccacgagagccggcagatcacccaggtgtatggcttctatgatgagtgccagaccaagtatggaaatgccaatgcctggagatactgcaccaaggtgtttgacatgctgactgtggccgccctgattgatgagcagatcctgtgtgtgcatggaggcctgagcccagacatcaagaccctggaccagatccgcaccattgaaagaaaccaggagatcccccacaagggggccttctgtgacctggtgtggagcgaccctgaagatgtggacacctgggccatcagccccaggggggccggctggctgtttggagccaaggtgaccaatgaatttgtgcacatcaacaacctgaagctgatctgccgggcccaccagctggtgcatgagggctacaagttcatgtttgatgagaagctggtgacagtgtggagcgcccccaactactgctaccgctgtggcaacatcgccagcatcatggtgttcaaggatgtgaacacccgggagcccaagctgttccgggctgtgcctgattctgagagggtcatcccccccaggaccaccaccccctacttcctgtag

SEQ ID NO: 43985 - DNA, 477 bp, Artificial Sequence
  derived and/or modified sequence
atgctgaccgtggccgccctgatcgacgagcagatcctgtgcgtgcacgggggtctcagccctgatattaagactctggatcagataagaaccatcgagagaaaccaggagataccgcataaaggtgccttctgtgacctggtctggtccgaccctgaggatgtggatacttgggccattagccctagaggggccgggtggctgttcggtgccaaggtgacgaacgaatttgtgcacatcaataaccttaaactgatttgccgggctcaccagctggttcatgagggatataagttcatgtttgatgagaaactggtgaccgtgtggagtgcaccaaactattgctacaggtgcggaaatatagcctctatcatggtcttcaaagatgtaaacacgcgcgaaccaaagctcttccgcgcagtgcctgattctgagcgagtaattcccccaagaactaccacaccctactttctgtag

SEQ ID NO: 43986 - DNA, 852 bp, Artificial Sequence
  derived and/or modified sequence
atggcccccctggacctggacaagtacgtggagatcgcccggctgtgtaagtatctgcccgaaaacgatctgaaacgcttatgcgactacgtgtgcgatctgctactggaggagagcaatgtacagcctgttagcaccccagtaaccgtgtgcggcgacatccacgggcaaggggacttcgtcgatcgcgggtattactcccttgaaaccttcacctacctattggctctgaaagccaaatggcccgaccggataactctgttacgggggaatcatgagagcagacagattactcaagtttatggcttttatgacgagtgccaaaccaaatatgggaatgctaatgcctggaggtactgtacaaaagttttcgatatgttaaccgttgctgctttgattgacgaacagattctttgcgtacatggcggactatcccctgatattaaaacactggaccaaattcggacaattgaacggaatcaggaaattccacataagggagccttttgtgatttggtgtggtccgaccccgaagatgtggatacctgggcaattagtccccgtggggccgggtggctgtttggcgctaaggtgacaaacgaattcgttcatatcaacaacttgaagctgatttgccgcgctcatcagttagtgcatgaaggatataaattcatgtttgacgagaagctcgtaacagtttggtccgcaccaaattactgctataggtgtgggaatattgcttctattatggtctttaaggatgtaaacacgcgggagccgaaactattcagagcggtcccagactcagagcgcgtcattcctccaagaactacaacaccatattttttgtag

SEQ ID NO: 43987 - DNA, 477 bp, Artificial Sequence
  derived and/or modified sequence
atgttgactgtggctgcactgattgacgagcagattctgtgcgtgcacggcggactgagtcctgacatcaagacattggatcagatccgtacaattgaacggaatcaggaaatcccacacaagggcgctttctgcgatttggtgtggagtgaccccgaggatgtggatacctgggcaattagccctcggggagccggatggttatttggtgctaaggtgacaaatgaatttgtgcacatcaacaacctaaaattgatctgccgggctcaccagttggtgcacgaagggtacaagtttatgtttgatgagaaacttgtgacggtctggagcgctcccaactattgctacagatgtgggaatatcgcgtctatcatggtattcaaggatgtcaacaccagagaacccaaattatttcgggcagtgccagactcggaacgggttatccctcctcgtaccacaacaccctacttcctgtag

SEQ ID NO: 43988 - DNA, 852 bp, Artificial Sequence
  derived and/or modified sequence
atggctccactggacctggataagtacgttgaaatagccaggctgtgtaaatacctgccagagaatgaccttaagcgcctgtgtgactatgtgtgcgatctcctcctggaggaaagtaatgtgcaacctgtctccaccccagtaacagtatgcggagacatccatgggcagggcgactttgttgaccggggttactatagcctggaaactttcacgtacctgttggccttgaaggccaagtggcccgaccgtattacactgctgagaggaaatcacgaaagtaggcagattactcaagtgtatgggttttatgatgagtgccagacaaagtacggcaacgctaatgcctggcgctactgcaccaaggtatttgacatgctgaccgtggccgcacttattgacgaacaaattctgtgcgtgcatggcggactgtcccctgatattaagacactggaccaaattcggaccatcgagagaaatcaggaaattcctcataagggcgctttctgcgatctcgtctggagcgatccagaggatgtcgacacatgggccataagccccagaggcgcaggatggctgtttggggcaaaagttacgaatgagtttgttcacattaataatctaaagctgatctgtcgggctcaccagctggtgcacgaaggctataagttcatgttcgatgagaagttggtgaccgtgtggtctgcaccaaactactgctatcggtgcggcaatattgccagcatcatggttttcaaggacgtcaacactagggagccgaagctgttcagggccgtgccagattccgaaagagtcattcccccacggaccactaccccttatttcttgtag

SEQ ID NO: 43989 - DNA, 960 bp, Artificial Sequence
  derived and/or modified sequence
ttcggcctccgccgctgccgccgccgctgctacagccgccgccgccgctgttgccgcggcttgttattcttaaaatggcgccgctagacctggacaagtatgtggaaatagcgcggctgtgcaagtacctgccagagaacgacctgaagcggctatgtgactacgtttgtgacctcctcttagaagagtcaaatgttcagccagtatcaacaccagtaacagtgtgtggagatatccatggacagatgagtgccaaaccaaatatggaaatgctaatgcctggagatactgtaccaaagtttttgacatgctcacagtagcagctttaatagatgagcagattttgtgtgtccatggtggtttatctcctgatatcaaaacactggatcaaattcgaaccatcgaacggaatcaggaaattcctcataaaggagcattttgtgatctggtttggtcagatcctgaagatgtggatacctgggctatcagtccccgaggagcaggttggctttttggagcaaaggtcacaaatgagtttgttcatatcaacaacttaaaactcatctgcagagcacatcaactagtgcacgaaggctataaatttatgtttgatgagaagctggtgacagtatggtctgctcctaattactgctatcgttgtggaaatattgcttcgatcatggtcttcaaagatgtaaatacaagagaaccaaagttattccgggcagttccagattcagaacgtgttattcctcccagaacgacaacgccatatttcctttgaggccttcgcccatcctgctgacccatttttctgccctcttcttaccccaattttcttgtattaccctctacaatatactttttattgagcactttgctgctgaaatgctgcctcttgcctttttttttttaaattttaaattatctaaatttattgtttgttgtggtgtctatagc

SEQ ID NO: 43990 - DNA, 4172 bp, Artificial Sequence
  derived and/or modified sequence
gaagcgggctctcttggggcctgcagtcggggttcagccagagggggcgccgggcgtaccgacgtagcggggagaaacgggtcgcgctttaacggcgctgcgcaggcgccactcacgggccggacgtgacgcagggaaagttccggcttcggcctccgccgctgccgccgccgctgctacagccgccgccgccgctgttgccgcggcttgttattcttaaaatggcgccgctagacctggacaagtatgtggaaatagcgcggctgtgcaagtacctgccagagaacgacctgaagcggctatgtgactacgtttgtgacctcctcttagaagagtcaaatgttcagccagtatcaacaccagtaacagtgtgtggagatatccatggacagggtgattttgtagacagaggttactatagtttggagaccttcacttaccttcttgcattaaaggctaaatggcctgatcgtattacacttttgcgaggaaatcatgagagtagacagataacacaggtctatggattttatgatgagtgccaaaccaaatatggaaatgctaatgcctggagatactgtaccaaagtttttgacatgctcacagtagcagctttaatagatgagcagattttgtgtgtccatggtggtttatctcctgatatcaaaacactggatcaaattcgaaccatcgaacggaatcaggaaattcctcataaaggagcattttgtgatctggtttggtcagatcctgaagatgtggatacctgggctatcagtccccgaggagcaggttggctttttggagcaaaggtcacaaatgagtttgttcatatcaacaacttaaaactcatctgcagagcacatcaactagtgcacgaaggctataaatttatgtttgatgagaagctggtgacagtatggtctgctcctaattactgctatcgttgtggaaatattgcttcgatcatggtcttcaaagatgtaaatacaagagaaccaaagttattccgggcagttccagattcagaacgtgttattcctcccagaacgacaacgccatatttcctttgaggccttcgcccatcctgctgacccatttttctgccctcttcttaccccaattttcttgtattaccctctacaatatactttttattgagcactttgctgctgaaatgctgcctcttgcctttttttttttaaattttaaattatctaaatttattgtttgttgtggtgtctatagcaaagtttttctatcaattttcccccatcccatccccaccctggactcatttgagaagacttgagaaatgtcttaatactcacactgctgcatgtagctcttgcttatttactggtctgggaaacaggatgtgtttcctttttttaaaagccaattgacagattacacctaaatactcctccttttgtatcattcagccttttgttttagtttggtaagttttaagaaatttcagcagcaaagttgttattcagtgggcacgatggactccaaatgcctcaagttatgtatacctgtcccagatgtaaacttcattgtcctttgttggatgatattttaaatggatataaaataaattggtctaaagggctgccctccttgttgtgtttttaaattttagttaaaaactgctacagcttatgactttgtactttaagataattgtattgatcttttttcagattccttgtattttttaataaagtaatcttaaataaaactcagataggttaagtgttagaaattttaaacagcttacattgttagcgtaaagttatcttttcttttttcctaatcagagttcttgaccctttggttattgagtttaaaacttcaattgaaattcaatagtatttatttttgaaaaaaatcactaaactgtgcctaaagaacataactgccatattaatgttttggtttatatcctctatagtaatagaaaaacatttaatacttgtaatgctgatgtgttaatttgataccagttgagtagaatgtgatcaatccagtttacaatctatcatgagtattattaactaaaatctatgtgcttttcaataggaatcattcttctcttgctgtaacacttgaccttaacttttagaaagtgttcatttttaaactgcaactggaaaggttgaaaagttaggactcttgtatttgtgaactgtaatctgaagcagattatttaaagtgtagaaaaagaaacaagttcttcttttttgcaaaggtctgtgataccatatttcagctttgtgtaagtaatttgaatatccaaagggttgtgatgatcagttctgaatatgcaactgtccacttaataaggacaagtattccagtatctcttatgactgtagtcataaatgatgttggaatgtacattttgtgaaatagttggtatccctttactatgattaatttttgttattccaggaaatacttgtgaagccagccaattaataaagcactttagcatctgttcaggtagttttgaaaacccacttttccccttcaggataagaacttccaggttacctaaaaatgcaataaaaatctttatagtctaagcttcttggcatataatttttcatcagggttttcttttattaattgagcacaatactgttttgatttaatttttttccctcaaaccacccagctccttacatagtttttaattatatagctatatgaaagaggtggctaagacatttgctgcacacacttgaactaatgttgggtcagtagcttcgtgttactgccctgatcccagtgtaattcaggtggaaaggtatttttatctcacagggatatgtagctatgtattttactaattgtgaaacactggaaattaatgatgcagacaacttggtgtggtctttgaacagctctctgcagtatttttttttttcctgttaccataaattgtatttaagtgcttgctttccacttaagttgtactaatagaaccggtaactcccagccctccctgtttgacactccttagcttagattgatgtagttgtttttgttatccctataatgtgacttttatttttaagtcattgtgtactgcatttgtttgtcactagttgggcacgtgccaataatattctctccattccttatctgccatctctgttttgcctgatttctcttcaactgaataatggctttttgcatggaaaaaatagtttttactattagacgtgtaaagggaagagagagctaatgtattggactttgtgagcctacaaggaatattttggatccctccaataaataagggctatgtactatatgtactatatagagttatcatgtggtggaagatacttgcaagtcatagatttatgggcaggaggatttgttactccctatatctaggctgaatgtaaaatcccttatgttgtatcaatgggggtaaaaactatttttatttgcctatgatatacttggtttctaataaagtgccctaggctctagtgagaactgtctactttgaattgccatttactccctttcctcctttggccgatatgctcttggctagctttttataagttaatgtgtttccccaaaaagtttcactactttatattcatttgagtgtgatcctaaaacacctggatcaacagtacatctcatatgcaatctgcatcagctcctattctgtctggatgtctagaactgttggaagattttgacgtcttaagccctaggttttgctttgggaaataaggtttgaaatattgttcattgcattaagatttgtgtgtgtgtgctttgtaagcccagaaccaggttttggaaaatgcctgtactgtgaaagcaaattaggactctttctgagcctctttcattgtcagaaatagaatcactttccatcagcttccaggaaattgtgtatctggagtcgaagagatttgacatcaagaatccagatttttaaatgtaattgttttttaaatgctaatgtttgtaaagcaccttcagttcttcggatgaaaggtgctatattccctcagtgtaaattaataaaaagattacaggaagtttgtcaaaaaattcaatgcatagtctgtagtatgtcctgacaagaagttagcattttatataagaaattaaaaaatgcttattcctcc

SEQ ID NO: 43991 - DNA, 477 bp, Artificial Sequence
  derived and/or modified sequence
atgctgaccgtggccgccctgatcgacgagcagatcctgtgcgtgcacggcggcctgagccccgacatcaagaccctggaccagatcagaaccatcgagagaaaccaggagatcccccacaagggcgccttctgcgacctggtgtggagcgaccccgaggacgtggacacctgggccatcagccccagaggcgccggctggctgttcggcgccaaggtgaccaacgagttcgtgcacatcaacaacctgaagctgatctgcagagcccaccagctggtgcacgagggctacaagttcatgttcgacgagaagctggtgaccgtgtggagcgcccccaactactgctacagatgcggcaacatcgccagcatcatggtgttcaaggacgtgaacaccagagagcccaagctgttcagagccgtgcccgacagcgagagagtgatcccccccagaaccaccaccccctacttcctgtag

SEQ ID NO: 43992 - DNA, 852 bp, Artificial Sequence
  derived and/or modified sequence
atggcccccctggacctggacaagtacgtggagatcgccagactgtgcaagtacctgcccgagaacgacctgaagagactgtgcgactacgtgtgcgacctgctgctggaggagagcaacgtgcagcccgtgagcacccccgtgaccgtgtgcggcgacatccacggccagggcgacttcgtggacagaggctactacagcctggagaccttcacctacctgctggccctgaaggccaagtggcccgacagaatcaccctgctgagaggcaaccacgagagcagacagatcacccaggtgtacggcttctacgacgagtgccagaccaagtacggcaacgccaacgcctggagatactgcaccaaggtgttcgacatgctgaccgtggccgccctgatcgacgagcagatcctgtgcgtgcacggcggcctgagccccgacatcaagaccctggaccagatcagaaccatcgagagaaaccaggagatcccccacaagggcgccttctgcgacctggtgtggagcgaccccgaggacgtggacacctgggccatcagccccagaggcgccggctggctgttcggcgccaaggtgaccaacgagttcgtgcacatcaacaacctgaagctgatctgcagagcccaccagctggtgcacgagggctacaagttcatgttcgacgagaagctggtgaccgtgtggagcgcccccaactactgctacagatgcggcaacatcgccagcatcatggtgttcaaggacgtgaacaccagagagcccaagctgttcagagccgtgcccgacagcgagagagtgatcccccccagaaccaccaccccctacttcctgtag

SEQ ID NO: 43993 - protein, 425 aa, Artificial Sequence
  derived and/or modified sequence
MAAGGDHGSPDSYRSPLASRYASPEMCFVFSDRYKFRTWRQLWLWLAEAEQTLGLPITDEQIQEMKSNLENIDFKMAAEEEKRLRHDVMAHVHTFGHCCPKAAGIIHLGATSCYVGDNTDLIILRNALDLLLPKLARVISRLADFAKERASLPTLGFTHFQPAQLTTVGKRCCLWIQDLCMDLQNLKRVRDDLRFRGVKGTTGTQASFLQLFEGDDHKVEQLDKMVTEKAGFKRAFIITGQTYTRKVDIEVLSVLASLGASVHKICTDIRLLANLKEMEEPFEKQQIGSSAMPYKRNPMRSERCCSLARHLMTLVMDPLQTASVQWFERTLDDSANRRICLAEAFLTADTILNTLQNISEGLVVYPKVIERRIRQELPFMATENIIMAMVKAGGSRQVQRFLEEEVYPLLKPYESVMKVKAELCL

SEQ ID NO: 43994 - DNA, 1278 bp, Artificial Sequence
  derived and/or modified sequence
atggctgctggaggcgatcacggctctccggactcctatcgatcacccctcgcgagccgatatgcaagcccagagatgtgttttgtttttagcgacagatataaattccgaacatggagacagctttggttgtggctggccgaagctgagcagacactgggacttcccattactgatgagcaaatacaggaaatgaagtcgaacttagagaacatcgactttaagatggctgcagaggaagaaaagcgcctcaggcatgatgtcatggcccatgtccatacattcggacactgctgcccaaaggccgctggaattatacatctcggggccactagctgctatgtaggagacaacacagacctcattatcttgcggaacgctcttgacctcctcctccctaaattggcaagagtgattagcagactggcagattttgcaaaggaaagggcctcactgcccacactagggtttacccattttcagccagcacagctgactacagtcggaaagaggtgctgcctgtggatacaggacctgtgtatggatctgcagaatctgaaaagagtacgggatgacctgagattcaggggtgtcaagggcactacagggactcaggccagctttctacaattgtttgagggtgacgatcacaaggtggagcagttggacaagatggtcacagagaaggctgggttcaagagggccttcattatcaccgggcagacatatacaagaaaagtggacatcgaagtcctgagcgtgctggctagcctgggcgccagtgtacataagatatgtactgacatccggctgctggcaaatctgaaagaaatggaagagccattcgaaaaacagcagatcggctccagtgccatgccttataaaagaaaccctatgagatctgagagatgctgttcgctggcccgtcatcttatgaccctggttatggaccctctgcaaacagcaagcgtgcaatggttcgaaaggaccctggacgattctgcgaatcgcaggatttgtttggccgaagcctttctgaccgctgacaccatactgaacacattacagaacatctcagagggcctcgtggtttatcctaaggttatcgaaagaagaatccgtcaagaactgcctttcatggcgacagagaatatcataatggccatggtgaaggcaggaggatcccggcaggttcaacggtttctcgaggaagaggtgtaccccctgctgaaaccatatgaaagcgtaatgaaggtcaaagctgaactttgcctctag

SEQ ID NO: 43995 - DNA, 384 bp, Artificial Sequence
  derived and/or modified sequence
atggcagctggaggcgatcatggcagccctgatagttacagatcaccattagcttcaagatacgcaagccccgagatgtgtttcgtgtttagtgacagatacaagttccggacatggcgtcagctgtggctgtggctggccgaggctgagcagacacttggactccctattactgatgagcagatccaggagatgaagagcaacctggaaaatatagattttaaaatggccgccgaggaggaaaaaagactccggcacgatgtaatggcacacgtccatacatttggccattgctgtcctaaggcagccgggatcatccatttgggggcgacatcctgctacgttggtgacaacacagtcggagcctgtgtcgtgtacacctag

SEQ ID NO: 43996 - DNA, 1779 bp, Artificial Sequence
  derived and/or modified sequence
ccaccctggcggggtcgcagggttgggatggcggctggaggcgatcatggttcgcccgacagctaccgctcacctcttgcctcccgctatgccagcccggagatgtgcttcgtgtttagcgacaggtataaattccggacatggcggcagctgtggctgtggctggcggaggccgagcagacattgggtttgcctatcacagatgaacaaatccaggagatgaaatcaaacctggagaacatcgacttcaagatggcagctgaggaagagaaacgtttacgacatgatgtgatggctcacgtgcacacatttggccactgctgtccaaaagctgcaggcattattcaccttggtgctacttcttgctatgttggagacaatactgacttgattattcttagaaatgcacttgacctgcttttgccaaagcttgccagagtgatctctcggcttgccgactttgctaaggaacgagccagtctacccacattaggtttcacacatttccagcctgcacagctgaccacagttgggaaacgttgctgtctttggattcaggatctttgcatggatctccagaacttgaagcgtgtccgagatgacctgcgcttccggggagtaaagggtaccactggcactcaggccagtttcctgcagctctttgagggagatgaccataaggtagagcagcttgacaagatggtgacagaaaaggcaggatttaagagagctttcatcatcacagggcagacatatacacgaaaagtggatattgaagtactgtctgtgctggctagcttgggggcatcagtgcacaagatttgcaccgacatacgcctcctggcaaacctcaaggagatggaggaaccctttgaaaaacagcagattggctcaagtgcgatgccatataagcggaatcccatgcgttcagaacgttgctgcagtcttgcccgccacctgatgacccttgtcatggacccgctacagacagcatctgtccagtggtttgaacgcacactggatgatagtgccaaccgacggatctgtttggccgaggcatttcttaccgcagatactatattgaatacgctgcagaacatttctgaaggattggtcgtgtaccccaaagtaattgaacggcgcattcggcaagagctgcctttcatggccacagagaacatcatcatggccatggtcaaagctggaggtagccgccaggtgcagagattcttagaagaggaggtgtatcccctgttaaaaccatatgaaagcgtgatgaaggtgaaagcagaattatgtctgtagagttggaagagaattaaacgaaaatcattgttaattgctgaggcatgaaaattgtgttactataatgccttattttacctcgagaattgttaccttaaattagtacagcactttcttcttcccatggtgctttcctgtttctcagtctcacatttctcaacaaggcaaaaacaaagagcgttgaagttgactctgctcttgcatagtaaatgtagttcatacttgatctctgttctttcaaggcatattttccagctgcctcaagtttagtccttttcacgtgttcatttgcttgtaaagtagcaagaaatttctggtcctgtcttctaaaagtgaatttgatctaggtctagcaaaataacctggactcagtgattgagtcaatggtcagataccttttatttcggttatttttggctagtataagtgatgaagtttggaactacagtaaatacttaaaaaaaaaaaaaaaaa

SEQ ID NO: 43997 - DNA, 911 bp, Artificial Sequence
  derived and/or modified sequence
ttccctggtccagtccaccctggcggggtcgcagggttgggatggcggctggaggcgatcatggttcgcccgacagctaccgctcacctcttgcctcccgctatgccagcccggagatgtgcttcgtgtttagcgacaggtataaattccggacatggcggcagctgtggctgtggctggcggaggccgagcagacattgggtttgcctatcacagatgaacaaatccaggagatgaaatcaaacctggagaacatcgacttcaagatggcagctgaggaagagaaacgtttacgacatgatgtgatggctcacgtgcacacatttggccactgctgtccaaaagctgcaggcattattcaccttggtgctacttcttgctatgttggagacaatactgtaggcgcctgtgttgtttatacttaaaactcagtctctagaatctatttgtcaattttatttgatgttgtccagttgaggaagtgacactatagatcttttttttttttttgaggcagagtctccctctgtctcccagactggagtgcagtggcacggctcactgcaagctccgcctcctgggttcacaccattctcctgcctcagcctcccgagtagctgggattacaggtgtgagccactgcccctggcctccaaatgctttctttagtcttaaatgaaacataattaaaggcatctttgtgtaactggcgagtcagatagtgggagaagaacagtcttcttacttggaaaatagaaaccttgttgacttgcacattttccagtcattttttcttaattgagaatttttttaatattggagagacagtcttgctgtgttacacagactgatgttgaactcctggcctaagcagtccacctgcttcagcctcccaaaatcctgagaataca

SEQ ID NO: 43998 - DNA, 1278 bp, Artificial Sequence
  derived and/or modified sequence
atggctgctggaggagaccacggcagcccagacagctaccgcagccccctggccagccgctatgccagccctgagatgtgctttgtgttcagtgaccgctacaagttccgcacctggaggcagctgtggctgtggctggccgaggccgagcagaccctgggcctgcccatcacagatgagcagatccaggagatgaagagcaacctggagaacatcgacttcaagatggctgctgaggaggagaagaggctgcggcatgatgtgatggcccacgtgcacaccttcggccactgctgccccaaggctgctggcatcatccacctgggcgccaccagctgctacgtgggggacaacacagacctgatcatcctgagaaatgccctggacctgctgctgcccaagctggcccgggtcatcagccggctggccgactttgccaaggagcgggccagcctgcccaccctgggcttcacccacttccagcctgcccagctgaccaccgtgggcaagcgctgctgcctgtggatccaggacctgtgcatggacctgcagaacctgaagagggtgagagatgacctgcgcttccggggcgtgaagggcaccaccggcacccaggccagcttcctgcagctgtttgaaggagatgaccacaaggtggagcagctggacaagatggtgacagagaaggccggcttcaagagggccttcatcatcaccggccagacctacaccaggaaggtggacatcgaggtgctgtctgtgctggccagcctgggcgcctctgtgcacaagatctgcacagacatccggctgctggccaacctgaaggagatggaggagccctttgagaagcagcagatcggcagcagcgccatgccctacaagaggaaccccatgaggtctgagcgctgctgcagcctggcccggcacctgatgaccctggtgatggaccccctgcagacagcctctgtgcagtggtttgagaggaccctggatgacagcgccaacagacgcatctgcctggccgaggccttcctgacagctgacaccatcctgaacaccctgcagaacatcagcgagggcctggtggtgtaccccaaggtgattgaaagacgcatccggcaggagctgcccttcatggccacagagaacatcatcatggccatggtgaaggccggcggcagccggcaggtgcagcgcttcctggaggaggaggtgtaccccctgctgaagccctatgaatctgtgatgaaggtgaaggccgagctgtgcctgtag

SEQ ID NO: 43999 - DNA, 384 bp, Artificial Sequence
  derived and/or modified sequence
atggctgctggaggagaccacggcagcccagacagctaccgcagccccctggccagccgctatgccagccctgagatgtgctttgtgttcagtgaccgctacaagttccgcacctggaggcagctgtggctgtggctggccgaggccgagcagaccctgggcctgcccatcacagatgagcagatccaggagatgaagagcaacctggagaacatcgacttcaagatggctgctgaggaggagaagaggctgcggcatgatgtgatggcccacgtgcacaccttcggccactgctgccccaaggctgctggcatcatccacctgggcgccaccagctgctacgtgggggacaacacagtgggcgcctgtgtggtgtacacctag

SEQ ID NO: 44000 - DNA, 1278 bp, Artificial Sequence
  derived and/or modified sequence
atggccgccggcggcgaccacggcagccccgacagctaccggagcccgttggcaagccggtatgcctccccagagatgtgctttgtcttcagtgataggtataagtttcgtacatggagacaactgtggctgtggctagccgaggccgaacaaactttaggcctccctattactgacgagcagatacaagagatgaagtcaaacctggaaaatattgatttcaagatggccgcagaagaggagaagaggctgagacacgatgtcatggcgcatgtgcataccttcggccactgctgtcctaaagctgcgggcatcattcacctgggtgctacaagttgttacgtgggtgacaacacagatctcatcattctgagaaacgccctggatctcctgctaccaaaattggcacgggtgatctcaaggctggcagacttcgcgaaggagcgggccagcctccccacactcgggtttacccattttcagccagctcagctcactactgttggcaagcgatgttgcctgtggatccaagacctgtgtatggacctacaaaaccttaaacgggtgcgcgacgaccttcgatttaggggagtgaagggcacgacggggacccaggcctcattcctgcaactcttcgagggtgacgaccacaaggttgagcagctcgataagatggtgaccgaaaaggccggttttaagcgggcctttataatcacgggacaaacatacacccggaaggtggatatcgaagtgttgtccgttttagcttccctaggcgcatcagtccacaaaatttgcaccgatatacggctacttgcaaacctgaaggaaatggaagagccttttgagaagcagcagatcggatcttctgcaatgccatataagcgaaatcctatgagatccgaaagatgttgctcacttgcgagacacttgatgactctggtgatggatcctctgcaaaccgcatctgtgcagtggttcgaaagaaccttggatgacagcgctaatcgaagaatttgcctggcggaggcattccttactgcagatactattctgaatacccttcagaatatatccgagggcctcgtggtgtacccaaaagtcatcgaaaggcgcattagacaggagctgccctttatggctacagagaacataattatggccatggttaaagccggcggtagtcgacaggtgcagcgctttctggaggaagaagtgtaccctttactaaaaccatacgaaagcgtaatgaaagtgaaagctgaactatgcctttag

SEQ ID NO: 44001 - DNA, 384 bp, Artificial Sequence
  derived and/or modified sequence
atggccgccggcggcgaccacggcagccccgacagctaccggagccctctggcaagtcgatatgcctcccctgagatgtgcttcgtgtttagtgaccgatataagtttcgcacatggcggcagctgtggctatggctcgccgaggcagagcagacgctgggactgcccatcactgacgagcagattcaagagatgaagtctaatctggaaaatatagactttaaaatggccgccgaggaggagaagcgacttcgacatgatgtcatggcccatgtccatacttttggacactgttgtcccaaagccgctgggataattcatctgggggccactagctgctacgttggagataacacagtgggtgcctgtgtggtgtacacatag

SEQ ID NO: 44002 - DNA, 1278 bp, Artificial Sequence
  derived and/or modified sequence
atggctgctggaggcgatcatggatcccccgattcctatcgcagccctttagcatctcgttacgcctcgcccgagatgtgttttgttttttcagatcgatacaagtttcgcacttggaggcagctgtggctctggcttgctgaggccgaacagaccctgggattgccgatcactgatgagcagattcaggagatgaaatcaaacctggaaaacatcgactttaagatggcagctgaggaagaaaaacggctccgacacgacgtcatggcacatgtgcatacgttcggccactgctgccccaaagcagcaggcatcatacatttgggagcaaccagctgttacgtgggggacaacactgacttgattattctgcggaatgcactggatttgctcctcccaaagttagcaagagttatttccaggctggctgattttgccaaagaacgggcttccctgcctaccctcggctttacacactttcagccggctcagcttactactgttggcaagcgctgctgtctgtggatccaggatctttgcatggacttgcaaaacctaaagagagttcgggacgatctaaggtttcggggtgtcaaggggacaaccggaacccaggcatccttccttcagctctttgagggcgatgatcacaaggtggagcagctcgataaaatggtgacggagaaagccggattcaaacgggcattcataataaccggacagacatatacaaggaaagtagatattgaagtactgagcgtacttgcaagccttggggctagtgtgcataagatttgcaccgacatccggcttctggccaatctcaaagagatggaggagccattcgagaagcagcaaattggcagcagtgcaatgccctataaacggaaccctatgaggtctgaaagatgttgttcactcgccaggcatcttatgaccctagtaatggaccccttgcagaccgcatctgtgcaatggtttgaacgaacgttggatgactcagccaacaggcggatttgtctggccgaggccttcctgactgcggataccattctcaacacactccagaatattagcgaaggcctggttgtgtatccgaaggttatcgaaagacggatccggcaagagctgccctttatggcaaccgagaacatcattatggccatggtaaaagcgggaggcagcagacaagttcagcgctttttggaggaggaagtgtaccctctgcttaagccgtatgaatcagtgatgaaagtgaaggctgagctgtgtttatag

SEQ ID NO: 44003 - DNA, 384 bp, Artificial Sequence
  derived and/or modified sequence
atggccgcagggggagaccacggaagcccagatagctacagaagccccctcgctagccgctatgcctcgcctgagatgtgtttcgttttttccgataggtacaagttccggacttggaggcagctgtggctgtggctcgctgaggccgagcagacactagggctccctatcaccgatgaacaaatccaagagatgaaatccaacctggagaatattgacttcaagatggcagccgaggaggaaaaaagactgcgtcatgacgtaatggcccacgtccacacatttgggcactgctgcccaaaggccgctggcattatccatctgggcgctacctcatgttacgtgggcgacaacaccgtcggagcctgcgtggtgtacacatag

SEQ ID NO: 44004 - DNA, 1278 bp, Artificial Sequence
  derived and/or modified sequence
atggccgccggcggcgaccacggcagccccgacagctacagaagccccctggccagcagatacgccagccccgagatgtgcttcgtgttcagcgacagatacaagttcagaacctggagacagctgtggctgtggctggccgaggccgagcagaccctgggcctgcccatcaccgacgagcagatccaggagatgaagagcaacctggagaacatcgacttcaagatggccgccgaggaggagaagagactgagacacgacgtgatggcccacgtgcacaccttcggccactgctgccccaaggccgccggcatcatccacctgggcgccaccagctgctacgtgggcgacaacaccgacctgatcatcctgagaaacgccctggacctgctgctgcccaagctggccagagtgatcagcagactggccgacttcgccaaggagagagccagcctgcccaccctgggcttcacccacttccagcccgcccagctgaccaccgtgggcaagagatgctgcctgtggatccaggacctgtgcatggacctgcagaacctgaagagagtgagagacgacctgagattcagaggcgtgaagggcaccaccggcacccaggccagcttcctgcagctgttcgagggcgacgaccacaaggtggagcagctggacaagatggtgaccgagaaggccggcttcaagagagccttcatcatcaccggccagacctacaccagaaaggtggacatcgaggtgctgagcgtgctggccagcctgggcgccagcgtgcacaagatctgcaccgacatcagactgctggccaacctgaaggagatggaggagcccttcgagaagcagcagatcggcagcagcgccatgccctacaagagaaaccccatgagaagcgagagatgctgcagcctggccagacacctgatgaccctggtgatggaccccctgcagaccgccagcgtgcagtggttcgagagaaccctggacgacagcgccaacagaagaatctgcctggccgaggccttcctgaccgccgacaccatcctgaacaccctgcagaacatcagcgagggcctggtggtgtaccccaaggtgatcgagagaagaatcagacaggagctgcccttcatggccaccgagaacatcatcatggccatggtgaaggccggcggcagcagacaggtgcagagattcctggaggaggaggtgtaccccctgctgaagccctacgagagcgtgatgaaggtgaaggccgagctgtgcctgtag

SEQ ID NO: 44005 - DNA, 384 bp, Artificial Sequence
  derived and/or modified sequence
atggccgccggcggcgaccacggcagccccgacagctacagaagccccctggccagcagatacgccagccccgagatgtgcttcgtgttcagcgacagatacaagttcagaacctggagacagctgtggctgtggctggccgaggccgagcagaccctgggcctgcccatcaccgacgagcagatccaggagatgaagagcaacctggagaacatcgacttcaagatggccgccgaggaggagaagagactgagacacgacgtgatggcccacgtgcacaccttcggccactgctgccccaaggccgccggcatcatccacctgggcgccaccagctgctacgtgggcgacaacaccgtgggcgcctgcgtggtgtacacctag

SEQ ID NO: 44006 - protein, 1721 aa, Artificial Sequence
  derived and/or modified sequence
MLSATPLYGNVHSWMNSERVRMCGASEDRKILVNDGDASKARLELREENPLNHNVVDASTAHRIDGLAALSMDRTGLIREGLRVPGNIVYSSLCGLGSEKGREAATSTLGGLGFSSERNPEMQFKPNTPETVEASAVSGKPPNGFSAIYKTPPGIQKSAVATAEALGLDRPASDKQSPLNINGASYLRLPWVNPYMEGATPAIYPFLDSPNKYSLNMYKALLPQQSYSLAQPLYSPVCTNGERFLYLPPPHYVGPHIPSSLASPMRLSTPSASPAIPPLVHCADKSLPWKMGVSPGNPVDSHAYPHIQNSKQPRVPSAKAVTSGLPGDTALLLPPSPRPSPRVHLPTQPAADTYSEFHKHYARISTSPSVALSKPYMTVSSEFPAARLSNGKYPKAPEGGEGAQPVPGHARKTAVQDRKDGSSPPLLEKQTVTKDVTDKPLDLSSKVVDVDASKADHMKKMAPTVLVHSRAGSGLVLSGSEIPKETLSPPGNGCAIYRSEIISTAPSSWVVPGPSPNEENNGKSMSLKNKALDWAIPQQRSSSCPRMGGTDAVITNVSGSVSSAGRPASASPAPNANADGTKTSRSSVETTPSVIQHVGQPPATPAKHSSSTSSKGAKASNPEPSFKANENGLPPSSIFLSPNEAFRSPPIPYPRSYLPYPAPEGIAVSPLSLHGKGPVYPHPVLLPNGSLFPGHLAPKPGLPYGLPTGRPEFVTYQDALGLGMVHPMLIPHTPIEITKEEKPERRSRSHERARYEDPTLRNRFSEILETSSTKLHPDVPTDKNLKPNPNWNQGKTVVKSDKLVYVDLLREEPDAKTDTNVSKPSFAAESVGQSAEPPKPSVEPALQQHRDFIALREELGRISDFHETYTFKQPVFTVSKDSVLAGTNKENLGLPVSTPFLEPPLGSDGPAVTFGKTQEDPKPFCVGSAPPSVDVTPTYTKDGADEAESNDGKVLKPKPSKLAKRIANSAGYVGDRFKCVTTELYADSSQLSREQRALQMEGLQEDSILCLPAAYCERAMMRFSELEMKEREGGHPATKDSEMCKFSPADWERLKGNQDKKPKSVTLEEAIAEQNESERCEYSVGNKHRDPFEAPEDKDLPVEKYFVERQPVSEPPADQVASDMPHSPTLRVDRKRKVSGDSSHTETTAEEVPEDPLLKAKRRRVSKGLHPKKQRHLLHLRERWEQQVSAADGKPGRQSRKEVTQATQPEAIPQGTNITEEKPGRKRAEAKGNRSWSEESLKPSDNEQGLPVFSGSPPMKSLSSTSAGGKKQAQPSCAPASRPPAKQQKIKENQKTDVLCADEEEDCQAASLLQKYTDNSEKPSGKRLCKTKHLIPQESRRGLPLTGEYYVENADGKVTVRRFRKRPEPSSDYDLSPAKQEPKPFDRLQQLLPASQSTQLPCSSSPQETTQSRPMPPEARRLIVNKNAGETLLQRAARLGYEEVVLYCLENKICDVNHRDNAGYCALHEACARGWLNIVRHLLEYGADVNCSAQDGTRPLHDAVENDHLEIVRLLLSYGADPTLATYSGRTIMKMTHSELMEKFLTDYLNDLQGRNDDDASGTWDFYGSSVCEPDDESGYDVLANPPGPEDQDDDDDAYSDVFEFEFSETPLLPCYNIQVSVAQGPRNWLLLSDVLKKLKMSSRIFRCNFPNVEIVTIAEAEFYRQVSASLLFSCSKDLEAFNPESKELLDLVEFTNEIQTLLGSSVEWLHPSDLASDNYW

SEQ ID NO: 44007 - protein, 28 aa, Artificial Sequence
  derived and/or modified sequence
MLSATPLYGNVHSWMNSERVRMCGASED

SEQ ID NO: 44008 - protein, 411 aa, Artificial Sequence
  derived and/or modified sequence
MTRPAFQPPATPAKHSSSTSSKGAKASNPEPSFKANENGLPPSSIFLSPNEAFRSPPIPYPRSYLPYPAPEGIAVSPLSLHGKGPVYPHPVLLPNGSLFPGHLAPKPGLPYGLPTGRPEFVTYQDALGLGMVHPMLIPHTPIEITKEEKPERRSRSHERARYEDPTLRNRFSEILETSSTKLHPDVPTDKNLKPNPNWNQGKTVVKSDKLVYVDLLREEPDAKTDTNVSKPSFAAESVGQSAEPPKPSVEPALQQHRDFIALREELGRISDFHETYTFKQPVFTVSKDSVLAGTNKENLGLPVSTPFLEPPLGSDGPAVTFGKTQEDPKPFCVGSAPPSVDVTPTYTKDGADEAESNDGKVLKPKPSKLAKRIANSAGYVGDRFKCVTTELYADSSQLSREQRALQVSPPT

SEQ ID NO: 44009 - DNA, 5166 bp, Artificial Sequence
  derived and/or modified sequence
atgttgagtgcaactcccttatacggaaatgtgcactcttggatgaatagcgaaagagtccgaatgtgtggcgcatctgaagaccgcaagattctcgttaatgacggcgatgcctcaaaagcccgcctagaactcagggaagaaaacccgctgaaccacaacgtggtcgacgccagcaccgcgcataggatagacggtcttgctgcactgtctatggacaggacgggcttaataagagaaggtttaagagtcccagggaacatcgtttattcctcgctgtgcggtttgggaagcgaaaagggtcgggaggccgccacgagtaccctcggcggactggggttcagcagcgagaggaatccagaaatgcaatttaagcccaacacgcccgagactgtcgaggcgtctgccgtgtctggcaaaccacccaacgggttcagtgctatctataaaacaccacctgggatacaaaagtccgccgtcgccactgctgaggcactcggcctcgaccggcccgctagcgacaagcagtcacccctaaacatcaatggggctagctaccttaggttaccttgggtaaatccatatatggagggggccacacccgctatctatccgttcctcgactccccaaacaagtactcactaaacatgtataaggcattgctgccccagcagtcatattccctcgcccagccgctgtactctccggtgtgcacaaatggagagcgattcctgtaccttcctcccccccactacgtaggcccacatatcccaagctcgctggcgagccctatgaggctgtcgacaccatccgcctcacccgctatccccccactggttcactgcgcggataaaagtctcccatggaagatgggcgtgagccccggtaaccctgtagatagtcacgcttacccccatatacaaaatagcaagcaaccccgggtgccctctgccaaagccgtaacaagcggattgcccggggacacggctctgctcttgcccccaagtccacggccaagcccacgagtgcacctgcccacccaacctgccgccgatacgtattcggaatttcacaaacactatgctcggatcagcacaagccctagtgttgcgctgagcaagccgtatatgacagtcagctcggagttcccggccgctcgcctgtcgaacggcaagtaccctaaggcccccgagggcggcgaaggtgcacagcctgtgcccgggcacgcccgaaagactgccgtccaggaccgcaaagacggaagtagtccacccctgctggagaaacagacagtcacaaaagacgtcaccgataagcctctggatcttagcagcaaggtcgtggacgtagacgcatcaaaggccgatcacatgaagaagatggctcctactgtgttagtgcattccagggctggctctggtctggttctaagtggaagcgagattccaaaagaaacactctcccctccgggaaacggatgcgcaatatatagatcagagataataagcactgcaccaagtagctgggtggtcccaggaccctccccgaacgaggagaacaacggcaaatctatgtcgttaaaaaataaggcactggattgggctatcccccagcagcggtcttctagctgcccgagaatgggggggacagatgcggtgatcaccaacgttagtgggtctgtgtccagtgcgggaagaccagccagcgccagtcccgctcctaacgccaatgcagacggcactaagacatctcgctcctctgttgaaaccacgccgtctgttattcagcacgtgggccaaccaccagctacgcccgccaaacactcgagtagcacctctagtaaaggagctaaggcgtctaacccagagcctagtttcaaagccaacgagaacgggcttcccccttcttctatttttctgagccccaatgaggcttttaggtcccctcccatcccatatccccgaagctatttaccttatcccgcacctgaaggaatcgcagtttcccctctgtctctgcacggcaaaggcccagtgtacccacaccccgtcctgcttccgaacgggtcactgttccccgggcacctggcaccgaagcccgggctcccatacggacttccaaccggccgccctgaatttgtcacataccaggatgccctaggtctgggaatggtgcaccctatgttgatcccccacactcccattgaaatcacaaaggaagagaagccagagcggcggagtagatcacacgaacgggcccgctatgaggatccgacactgaggaacagatttagcgaaatcctggagactagctcaacgaaactgcatcccgacgttcctaccgacaaaaacctgaaaccgaatcctaactggaaccagggcaagaccgtggttaaaagcgataagctggtgtacgtggacctgctgcgcgaggagcctgacgccaagacagataccaacgtgtcaaagccttcctttgcggctgagtctgtcggacagagtgccgagccacctaaaccctctgtggaaccagcattacagcaacatagagatttcatagctttgcgcgaggagctcggccgtatctctgacttccacgagacctacaccttcaaacagccagtcttcaccgtcagtaaggatagtgtacttgccggcaccaataaagaaaatctcggactgccggtgtctactccttttctggagcccccccttggctctgacggacccgctgtgaccttcggaaagacccaggaagaccccaagcctttttgtgtcggaagcgcacccccctccgtcgacgtcacacccacatatacaaaggatggagctgatgaggccgaatcaaacgatggcaaggtcttgaagcccaagccttccaaactggccaagagaatcgcgaactctgccggttacgtgggagaccgatttaagtgcgtgacgaccgaactctacgccgacagctcgcagttgtccagagagcaacgagccttacagatggagggcctgcaggaggactctattctgtgtttgccggctgcatactgcgagcgcgcaatgatgagattctccgagttagagatgaaagaacgggagggaggccatccagcaacgaaagacagcgaaatgtgcaaattttcccctgccgattgggaacggcttaaggggaaccaggataagaagcccaaaagtgtaaccttagaagaggccattgccgaacagaatgaatctgaacggtgtgagtattcagtgggaaacaagcacagggatcctttcgaggcccctgaagacaaggacctgcctgtggagaagtactttgtggaacgtcagcccgtcagcgagccgccggcggaccaggtcgcaagcgatatgccgcacagtcccactctacgcgttgatcgcaagcggaaagtgtcaggcgatagcagtcacacggagaccacagcggaagaagtacccgaggaccctttgctgaaagcaaagcggcgaagagtatctaagggcctgcaccctaagaagcagcggcatttactccatttacgcgaaagatgggagcagcaagtatcggccgccgatggcaagcccgggcggcagagtaggaaagaagtcacccaggccactcagcccgaagccatccctcaggggaccaatattacagaggaaaaacctggtcgaaaacgcgcagaagccaaagggaaccggtcatggtcggaggagtctcttaagccctctgacaacgagcagggcttgccagtcttctctggctcaccccctatgaagagccttagcagcacttccgctggtggcaagaaacaagcccagccgtcctgcgccccagcatctcgccccccagcgaagcagcaaaagatcaaggaaaatcagaagacagacgtgctctgtgccgacgaggaagaggactgtcaagctgccagcctgttacagaaatatactgacaattcagagaagccaagcgggaaaagactctgtaagaccaagcatctaattccacaggagagccgtagaggcttgccactgaccggggagtattacgtggagaacgctgatgggaaagtaactgtccgacgatttcggaagcggccagagccatctagcgactacgatttatcccctgctaaacaggaaccgaaacctttcgaccgcctgcagcagttactccccgcatcccagtcaacacagctgccatgcagcagctcaccacaggagaccacccagtcccgccccatgccaccagaggctaggagactgattgtgaataaaaatgctggagaaactctgctgcagcgtgcagctcgcctggggtacgaagaggttgtgctctactgtctggagaataagatctgtgatgtaaaccacagggataacgcaggctattgcgccctacacgaggcttgcgccagaggttggctcaacatcgtgagacacctgctggaatacggagcggacgtaaactgctccgctcaggacggcactaggccactccacgatgccgtggagaacgatcatctggaaatagtacgcctcctacttagctatggagccgacccaacactggccacctatagtggacggaccataatgaaaatgacccattcagagctgatggagaagtttctgaccgattatctgaatgacctgcagggtcgcaacgatgacgacgcttctgggacatgggatttctacggatcttctgtgtgtgaacccgacgacgaaagtggctacgacgtattagccaatcctcctggacctgaagatcaggatgacgatgacgacgcctactccgacgtgtttgagtttgagttctccgaaacccccctgttgccctgctacaatattcaggtatcagtcgctcaagggcccaggaactggttactgctgtcagacgtgttaaaaaagctcaagatgtcttcaaggatcttccgttgcaacttccccaacgtggagatcgtgactattgcagaggctgagttttatcgtcaggttagtgcttccctgctcttctcatgctctaaagatctagaggcctttaaccctgagagcaaggagctgttagatttagtggaatttacaaacgagatccaaactctgcttggcagctccgtcgaatggctgcatccgtctgacttggcttcagacaattattggtag

SEQ ID NO: 44010 - DNA, 5166 bp, Artificial Sequence
  derived and/or modified sequence
atgctttcggcaacccccctgtacggcaacgttcactcgtggatgaactctgagcgagtgaggatgtgcggtgcatccgaggaccgcaagattctagtgaacgatggagatgcttcgaaggcgcgcctggaacttagggaggagaacccactgaaccataacgtcgttgatgcaagtactgctcatcggatagacggccttgcggccctgagtatggaccggacgggacttattcgtgagggcctgcgagtaccaggcaacattgtgtattcttcgctgtgtgggcttggttcagagaagggccgcgaggcagccaccagcacactgggaggcctcggcttctcctccgagcgtaacccagagatgcagtttaaacctaacactcccgaaactgtggaggcgtccgccgtttctgggaaacctcccaacggtttctcagctatctataagacaccccctggcatacagaagagcgctgtggcgacagcagaggctctggggctcgaccgccccgcaagcgacaagcagtcacctctgaacattaatggcgcgtcatacctgagacttccatgggtgaacccatacatggagggggccacccctgccatctacccttttctcgacagcccgaacaaatatagcctgaatatgtataaagctctattgccacagcaatcttacagcttagctcagcctctctactcgcccgtttgcactaatggtgagcgctttctgtacctgccgccccctcattacgtgggcccccatattccttcttcgctggctagccctatgagactatccaccccaagcgcgtctcccgcaattcctcctctggttcattgtgctgacaagagcctgccatggaagatgggggttagtcctggcaaccctgttgactcccacgcatatccacacatacagaactccaaacaacccagggtgccatcagcgaaagctgtcacatctggactccctggcgacaccgccctcttgttgcccccatcccctcgccctagtccaagggtgcacttgccaacacagccagccgctgacacctattccgaattccataaacactatgctcgaatttctactagcccctccgtcgcactctccaaaccatacatgaccgtgtcttcagaatttccagccgcccggctcagcaacgggaaatatccgaaagctccagagggcggcgagggtgctcaacctgtccccgggcatgctcggaaaacggccgtgcaagacaggaaggacgggtcttccccgccactcctagaaaagcagactgttacaaaagatgtgaccgataagccactagacctgagcagcaaggtggtggatgtggatgctagcaaggcagatcatatgaagaagatggcgccgactgtgttggtccatagccgcgccgggtcaggtctggtgctgtcaggctccgaaattccaaaagagacactatccccgcccggaaatggctgcgcgatctaccggtccgaaatcatttccactgccccaagttcatgggttgttccggggccctcccctaacgaagagaataatggaaaatccatgagcctgaaaaataaggcattggactgggctatccctcagcagagatcttccagttgccctagaatgggagggaccgacgccgtcattactaatgtgtctgggagcgtctcaagtgctgggcgccccgcttcagcgtctcccgcgcctaacgcaaacgcagacggcactaaaacctcccggtctagcgtcgaaacaaccccgtcagttatacagcatgtgggtcagccccccgcaaccccagctaagcacagttcgtcaacgtccagcaagggtgccaaggccagtaatccagagccatctttcaaggcgaatgagaatggtctcccaccatcctctattttcctgtcgcctaatgaggcttttcggtcgccgcccatcccctaccctcgctcttacctgccttaccccgctccagagggcatagctgtgtctcctttgagtctccatggaaaggggccggtatatccccacccagttcttctgcctaacggttctctatttcccggacacctggcccccaagcccggccttccctatggtctcccgacggggagacccgagttcgttacgtaccaggatgctttaggcctggggatggtgcacccgatgctgatcccccacacccccatagagattactaaagaggagaaaccagaaagacgcagcagaagccatgaaagagcgcgttacgaggatccgacgctgcgtaatcgctttagtgaaatcctggagacctcttcaaccaagctccatccagacgtgccaacggataagaatctgaagccgaatccgaactggaaccaagggaagacagttgtgaagtccgacaaattggtttatgtcgatttattacgggaggaacccgatgctaaaactgacaccaacgtctctaaaccttcctttgctgccgagtcagtgggtcagagcgccgagccacctaagcccagcgtggagccggcacttcaacagcaccgggatttcattgcgttacgggaggagctcgggcgtatatcagacttccacgaaacatacacattcaagcagcccgttttcactgtctctaaggactccgtgttggcgggcaccaacaaggagaatctaggcctgcccgttagcaccccattcctcgaaccacctctgggaagcgatggacctgctgtgacatttggcaaaacgcaagaggaccctaagcctttctgtgtcggcagcgctcctccaagtgttgacgtgacccccacttatactaaggatggcgccgatgaggccgagagcaacgacggtaaggtgctgaagccaaagccatctaaactggcaaagaggatagcaaattccgcagggtatgtgggggacaggttcaagtgcgtgacgactgaactgtacgccgactcctcccagctgagtagggaacagcgggccctccagatggaagggttgcaagaggactcgatcttgtgcctccccgcggcctactgtgaacgcgccatgatgagattttcagaactcgagatgaaggagagggaaggaggacaccctgctactaaggactctgaaatgtgtaagttctcaccggccgattgggagcggctgaaaggcaaccaggacaagaaaccaaagtctgtgacgctggaagaagctatcgctgagcagaatgaaagcgagcgctgcgagtacagtgttgggaacaagcaccgcgatccgttcgaggcacccgaggacaaggacctgccagtggagaagtattttgtggagcgtcagcccgtctccgagcctccagcagatcaggtggctagtgacatgcctcacagccccacccttcgtgtggacaggaagcgtaaagtaagtggggactcttcccacaccgagacaacagcggaagaggtccctgaggaccctctcttaaaagccaagcgacgacgagtttcaaaagggctgcatcctaagaagcaacgccacctgttgcacttaagagaacgttgggagcagcaagtgagcgctgcagatggtaaacctgggcggcagtctcggaaggaggttacacaagccacccagcccgaggcaattccccagggaacaaacatcaccgaagaaaagccaggaagaaaacgcgctgaagccaaagggaatcgctcatggagcgaggaatctctgaaaccctccgataatgagcaggggctgcccgtgttttccggaagcccacccatgaagagcctgagttccacctctgctggcggcaagaagcaagctcagcctagctgcgcccccgcatctagacctccagcaaaacagcagaaaattaaagagaatcagaagacagatgtcctgtgtgccgatgaagaagaagactgtcaggccgcgagtctgctgcagaagtatacagacaacagcgaaaaaccatccggcaagcgcttgtgcaagacgaagcatcttattccccaggagagtcgcagagggctccctcttactggggaatactacgtggagaacgcggatggcaaagtgactgttaggcgatttcgcaagcggccagagccctcatccgactacgacctgagccctgccaagcaggaaccaaagccattcgaccgattgcagcagctgttgcctgcaagccaaagcacccagctaccctgttccagttctccacaggaaactactcagtctcgtccgatgccacccgaggcccggaggctgattgttaacaaaaatgccggggagaccctcctgcagcgcgccgcccggcttggatacgaggaggttgtcctctactgcctcgaaaacaaaatctgcgatgtaaatcaccgggacaatgccggctattgcgcactgcatgaagcttgcgcacgcggctggttgaacatcgtccggcacctcctggagtacggcgccgatgtgaattgctcggcccaggatgggacaaggcccctgcacgacgccgtcgagaatgaccacttggagattgtgcgtctgctgcttagctatggagcagacccaactcttgctacttacagcggcaggactatcatgaaaatgacccactctgagttaatggagaaattcctgaccgactacttgaatgatttgcagggcaggaatgatgatgacgccagcggcacgtgggacttctatggcagctccgtgtgcgagccagacgatgagtctggatatgatgtactcgccaatccacctggacccgaagaccaagatgatgatgatgacgcatactctgacgtgtttgagttcgagttcagtgagacccccctgcttccctgttacaatattcaggtgagtgtggcacaaggtcccagaaactggcttcttctgtcagatgtcttgaagaagctcaaaatgagttcacgtatatttcgctgtaatttccccaacgtggagatagtcacaatcgcagaggccgaattctatcgacaggtaagcgcctctctgttattttcatgcagcaaggacctggaagctttcaacccggagtccaaagagctgctggatctcgtcgaattcacaaacgagatacagaccctgctgggcagcagtgtagaatggctgcacccttcagacttggctagtgacaattactggtag

SEQ ID NO: 44011 - DNA, 5166 bp, Artificial Sequence
  derived and/or modified sequence
atgctgagcgccacccccctgtatggaaatgtgcacagctggatgaacagcgagcgggtgaggatgtgtggggccagcgaggacaggaagatcctggtgaatgatggagatgccagcaaggcccggctggagctgcgggaggagaaccccctgaaccacaacgtggtggatgccagcacagcccacagaattgatggcctggccgccctgtccatggacagaacaggcctcatccgggagggcctgcgggtgcccggcaacatcgtgtacagcagcctgtgtggcctgggcagcgagaagggccgggaggccgccaccagcaccctgggcggcctgggcttcagcagcgagaggaaccctgagatgcagttcaagcccaacaccccagagaccgtggaggccagcgctgtgtctgggaagcccccaaatggcttcagcgccatctacaagaccccacctggcatccagaagtctgctgtggccacagctgaggccctgggcctggacaggcctgccagtgacaagcagagccccctgaacatcaacggggccagctacctgcggctgccctgggtgaacccctacatggagggcgccaccccagccatctaccccttcctggacagccccaacaagtacagcctgaacatgtacaaggccctgctgccccagcagagctacagcctggcccagcccctgtacagccctgtgtgcaccaacggggagcgcttcctgtacctgcccccaccccactacgtgggcccccacatccccagcagcctggccagccccatgaggctgagcaccccatctgccagccctgccatcccccccctggtgcactgtgccgacaagagcctgccctggaagatgggcgtgtccccaggcaaccctgtggacagccacgcctacccccacatccagaacagcaagcagccccgggtgcccagcgccaaggctgtgaccagcggcctgcccggggacacagccctgctgctgccccccagcccccggcccagcccccgggtgcacctgcccacccagcctgctgctgacacctacagcgagttccacaagcactacgcccgcatcagcaccagccccagcgtggccctgagcaagccctacatgacagtgtcctctgagttccctgctgcccggctgagcaatggcaagtaccccaaggcccctgagggcggggagggcgcccagcctgtgcccggccacgccaggaagacagctgtgcaggacaggaaggatggcagcagcccccccctgctggagaagcagacagtgaccaaggatgtgacagacaagcccctggacctgagcagcaaggtggtggatgtggatgccagcaaggctgaccacatgaagaagatggcccccaccgtgctggtgcacagcagagctggcagcggcctggtgctgagcggcagcgagatccccaaggagaccctgagccccccaggaaatggctgtgccatctacagaagtgagatcatcagcacagcccccagctcctgggtggtgcccggccccagccccaatgaagaaaataatggcaagtccatgagcctgaagaacaaggccctggactgggccatcccccagcagaggagcagcagctgccccaggatgggcggcacagatgctgtgatcaccaacgtgtctggctctgtgtcctctgctggccgcccagccagcgccagccctgccccaaatgccaatgctgatggcaccaagaccagccgcagctctgtggagaccaccccatctgtcatccagcacgtgggccagcccccagccaccccagccaagcacagcagcagcaccagcagcaaaggagccaaggccagcaaccctgagcccagcttcaaggccaatgaaaatggcctgccccccagcagcatcttcctgagccccaatgaggccttccgcagcccccccatcccctaccccaggagctacctgccctacccagcccctgagggcattgctgtgagccccctgagcctgcacggcaagggccctgtgtacccccaccctgtgctgctgcccaacggcagcctcttccctggccacctggcccccaagccaggcctgccctacggcctgcccaccggccggcctgagtttgtgacctaccaggatgccctgggcctgggcatggtgcaccccatgctgatcccccacacccccatcgagatcaccaaggaggagaagccagagaggaggagccgcagccatgagcgggcccgctatgaggaccccaccctgaggaaccgcttcagcgagatcctggagaccagcagcaccaagctgcacccagatgtgcccacagacaagaacctgaagcccaaccccaactggaaccagggcaagacagtggtgaagagtgacaagctggtgtatgtggacctgctgcgggaggagccagatgccaagacagacaccaacgtgtccaagcccagctttgctgctgagagcgtgggccagagcgctgagccccccaagcccagcgtggagcccgccctgcagcagcaccgggacttcatcgccctgcgggaggagctgggccgcatcagtgacttccacgagacctacaccttcaagcagcccgtcttcaccgtgtccaaggacagcgtgctggccggcaccaacaaggagaacctgggcctgcctgtgtccacccccttcctggagccccccctgggcagtgatggccctgctgtgaccttcggcaagacccaggaggaccccaagcccttctgtgtgggcagcgccccacccagcgtggatgtgacccccacctacaccaaggatggagcagatgaagctgagagcaatgatggcaaggtgctgaagcccaagcccagcaagctggccaagagaattgccaacagcgctggctacgtgggggaccgcttcaagtgtgtgaccacagagctgtatgctgacagcagccagctgagccgggagcagagggccctgcagatggagggcctgcaggaggacagcatcctgtgcctgcctgctgcctactgtgagcgggccatgatgaggttcagcgagctggagatgaaggagcgggagggcggccacccagccaccaaggacagcgagatgtgcaagttcagccctgctgactgggagcggctgaagggcaaccaggacaagaagcccaagtctgtgaccctggaggaggccatcgccgagcagaatgaaagtgagcgctgtgagtacagcgtgggcaacaagcaccgggacccctttgaggcccctgaggacaaggacctgcctgtggagaagtactttgtggagcggcagcctgtgtctgagcccccagctgaccaggtggccagtgacatgccccacagccccaccctgcgggtggacaggaagaggaaggtgtctggggacagcagccacacagagaccacagctgaggaggtgcctgaggaccccctgctgaaggccaagagaagaagagtgtccaagggcctgcaccccaagaagcagaggcacctgctgcacctgcgggagcgctgggagcagcaggtgtctgctgctgatggcaagccaggccggcagagcaggaaggaggtgacccaggccacccagcctgaggccatcccccagggcaccaacatcacagaggagaagccaggcaggaagagagctgaggccaagggcaacagatcctggagcgaggagagcctgaagcccagcgacaatgagcagggcctgcctgtgttcagcggcagcccccccatgaagagcctgagcagcaccagcgctgggggcaagaagcaggcccagcccagctgtgccccagccagccggcccccagccaagcagcagaagatcaaggagaaccagaagacagatgtgctgtgtgctgatgaggaggaggactgccaggccgccagcctgctgcagaagtacacagacaacagcgagaagcccagcggcaagaggctgtgcaagaccaagcacctgatcccccaggagagccggcggggcctgcccctgaccggggagtactacgtggagaatgctgatggcaaggtgacagtgcggcgcttcaggaagaggcctgagcccagcagtgactatgacctgagccctgccaagcaggagcccaagccctttgaccggctgcagcagctgctgcctgccagccagagcacccagctgccctgcagcagcagcccccaggagaccacccagagccggcccatgcctcctgaggcccggcggctgattgtgaacaagaatgctggggagaccctgctgcagagagctgcccggctgggctatgaggaggtggtgctgtactgcctggagaacaagatctgtgatgtgaaccaccgggacaatgccggctactgtgccctgcacgaggcctgtgcccggggctggctgaacatcgtgcgccacctgctggagtatggagcagatgtgaactgcagcgcccaggacggcacccggcccctgcatgatgctgtggagaatgaccacctggagatcgtgcggctgctgctgtcctatggagctgaccccaccctggccacctacagcggccgcaccatcatgaagatgacccacagcgagctgatggagaagttcctgacagactacctgaatgacctgcagggcagaaatgatgatgatgccagcggcacctgggacttctacggcagctctgtgtgtgagccagatgatgagagcggctatgatgtgctggccaaccccccaggccctgaggaccaggatgatgatgatgatgcctacagtgatgtgtttgaatttgagttcagcgagacccccctgctgccctgctacaacatccaggtgtctgtggcccagggccccaggaactggctgctgctgagtgatgtgctgaagaagctgaagatgagcagccgcatcttccgctgcaacttccccaacgtggagatcgtgaccatcgccgaggccgagttctaccggcaggtgtctgccagcctgctcttcagctgcagcaaggacctggaggccttcaaccctgagagcaaggagctgctggacctggtggagttcaccaatgagatccagaccctgctgggcagctctgtggagtggctgcaccccagcgacctggccagtgacaactactggtag

SEQ ID NO: 44012 - DNA, 5166 bp, Artificial Sequence
  derived and/or modified sequence
atgctgagcgccacccccctgtacggcaacgtgcacagctggatgaattcagaacgcgtccggatgtgtggggcaagtgaggataggaagattttggtaaacgacggcgacgcctccaaggcccgcctcgaactgagggaagagaaccctctcaatcataacgtggtcgatgccagcacagctcaccgcatcgatgggcttgccgcattgagcatggatcgaaccggcctgattagagagggactgagagtgccggggaacatcgtgtactctagcctttgcggcctgggcagcgagaaaggtcgggaggctgcaacatctacattaggtggtttggggttctcaagcgaacgcaaccctgaaatgcagtttaagcctaacacccccgaaactgtggaagctagtgctgtctccggcaaaccgccgaatggcttctctgctatttacaagacacccccaggcattcagaagagtgccgtggctacagcagaggcgctcggcctggatcgccctgcgtcagataagcagagtccactcaacattaatggggctagctacctaaggctgccctgggtgaatccctacatggaaggcgcaacgcctgcgatctacccgttcctggacagccctaacaaatacagcctgaatatgtacaaggcacttctgccgcagcagtcctattctctcgctcagccactgtacagtccggtgtgcaccaacggtgagcggttcttgtatctgccacccccccactatgtcggccctcacattccctcctcgttggcctcaccaatgcggctcagcacgccctcagcctctcccgcaattcctcctcttgtccactgcgccgataaatccctgccctggaagatgggcgtctctccgggtaatcccgtggacagtcatgcatatcctcacattcaaaacagtaagcaacccagagttccatcggcgaaggctgtgaccagtggcctgcccggcgacacagcactgctactgcccccctcacctaggcctagtcctcgagtgcatctcccaacgcagcctgcggcggacacctacagcgagtttcacaagcactacgctcgtattagcacttccccatccgtggcattatcaaagccctatatgactgtgtcttccgagtttcccgctgcccggctttcaaatggcaagtaccccaaagccccggagggaggagaaggtgctcaacctgtccccgggcatgcccgcaaaactgctgtacaggaccggaaagatgggagcagccctccattgttggagaaacagacagtgacaaaggacgtaacagacaagcccctcgatctgtcaagtaaagtggtagatgtggatgcatctaaggccgatcacatgaagaaaatggcgccaaccgtgctcgtccatagccgggccggctcggggttggtccttagcggtagtgagatacccaaagagactttgagtccgccaggcaacggctgtgccatctaccggtcagagatcatatccaccgccccaagctcttgggtggtgccagggccttcacccaatgaggaaaacaacggaaagagtatgtcacttaaaaataaagccctcgactgggctatcccgcagcagaggtctagttcttgccctaggatgggaggtacagatgcagtgatcactaacgtttctggctctgtcagctccgcaggtcgcccagcctccgccagcccggcccccaatgctaacgctgacggaactaagacctcgcgttcttctgtggaaaccaccccctcagtgattcaacacgtcggacagcctccagcaaccccagcaaagcacagttccagcaccagctccaaaggtgccaaagcatccaaccctgaacccagcttcaaggcgaatgagaatgggttgccaccctctagcattttcctttcgcctaatgaggcattcagaagcccccccatcccctatcctcgctcttatctcccatacccagctcccgagggaatcgctgtctcccccctgagccttcacggaaagggacctgtgtacccccatcccgttctcctacccaacgggagcctgttccctggccatctggctcccaagcccggattgccctacggcctgcctactggaagacccgaattcgtaacataccaggatgcgctagggttaggaatggtccaccccatgctgattcctcatactccaattgagattacaaaagaggaaaagcccgagcgacggtctcgttcacacgaacgggcgaggtacgaagatcctacattgcggaataggttcagcgagattttagagacttcatctactaagctccaccccgatgtgccaactgacaagaacctgaaacctaatccaaactggaatcaaggaaagaccgtggtcaagtccgataaattggtttatgtcgatttgctccgtgaagagcccgacgcaaaaacagacactaatgtatctaaacccagctttgctgcggaaagtgtcggtcagtccgccgagccgccaaagccttctgtggaaccggccctgcagcagcatcgagactttatcgcactgagggaggaactgggcagaattagcgactttcacgaaacatacacatttaaacagcccgtgtttaccgtgtccaaagacagcgtgttggccggcacaaacaaggagaatctggggctgccagtgtctaccccgttcctcgaacctcccttggggtcagatggacctgccgtgacgttcgggaaaacacaggaagaccctaaacccttctgtgtgggcagcgcaccaccatcagttgatgtcactcctacttacaccaaggacggggcggacgaagctgaatccaatgatggtaaggttttgaaaccaaagccctcaaagctagcaaagcgcattgccaacagcgctggatacgtcggggataggttcaagtgcgttactacggagttgtatgctgactcttctcagctctcacgagagcagcgggcattgcagatggaagggttgcaagaggattcaatactgtgtcttccggcagcctactgtgaaagagccatgatgcgatttagtgagttagagatgaaagagcgggagggcggccatccagcaactaaagactcagagatgtgtaagttttcgcccgccgattgggagagacttaagggcaaccaggataaaaagcccaaaagcgttaccctggaggaagctatagctgaacagaatgagagcgaacgatgcgaatactcagtgggaaataaacatagagaccccttcgaagccccagaggacaaagacttgcctgtggagaagtacttcgtcgaacgccagcctgtcagtgagcctcctgcagatcaggttgcctccgatatgcctcatagccccaccctgcgcgtggaccgcaaaagaaaggtgtccggcgattcctctcacaccgaaacgaccgccgaagaggtccccgaagaccccttgctcaaggccaaacgaagacgagtatccaaggggcttcaccctaaaaaacagcgccacctcctgcatctgcgggagcgctgggagcagcaggtgagtgccgccgacggtaagcccgggcgccagtcaagaaaggaagtgactcaggcaacacaaccagaggccattccccagggtactaacatcacagaagagaagcctggccggaaaagggccgaggcaaaagggaatcgatcatggagtgaggagagtctaaagccatctgacaacgagcaggggttgccagtcttctctgggtcacctcctatgaaaagcctgtcctccacgagcgccggcggcaaaaagcaggctcagcccagctgcgcaccagctagtcgcccgcccgccaagcagcagaagattaaggagaaccagaagacagacgttctttgcgcagatgaggaggaggattgtcaggccgcttcattactccagaagtatactgacaactcagagaagccttcaggcaagcggctgtgtaagaccaaacaccttattccccaagaatcacggaggggcctccctctcactggagaatattatgtggaaaacgctgacggcaaggtgaccgtcagaaggttcagaaagaggccagagccttcttccgattatgatttgtcccccgccaagcaggagcccaagccctttgaccgtctgcagcaactgctacccgcttcacagtcgacacagctgccttgttcctctagcccccaggagaccactcagagcaggcctatgcctcccgaagcaagaaggctgatagtgaacaaaaatgctggcgaaactctgctccagagagccgctcgcctgggctatgaggaagtggtgttgtactgccttgaaaataaaatctgtgatgtgaaccaccgggacaatgcagggtattgtgccttacatgaagcctgcgcaagaggttggctaaacatcgtgcgccatcttcttgagtacggcgccgacgtgaattgctcggcacaggatgggacaaggcctcttcatgatgcggttgaaaatgatcacctcgagatcgtacggctgctgctctcgtatggcgccgatcccaccctggcaacatacagcgggcgtaccattatgaaaatgacccatagcgagttgatggagaaatttctcactgactacttaaatgacctccagggcagaaatgatgatgatgctagcggtacatgggatttctacggcagtagtgtgtgcgagcccgatgacgaatccggatatgacgtgctggccaacccacccggcccagaggaccaggatgatgatgatgacgcctactcagacgtcttcgagttcgagttttctgagactcctctcctgccctgctataacattcaggtatcagtggcacaggggcccagaaactggctccttctgtctgacgttttgaagaagttaaaaatgtctagtaggatcttccggtgtaactttcctaacgtggagatagtgactatagccgaagcagaattctatcgtcaggtgtcagcttctctgctcttcagctgcagcaaggatctagaagcttttaacccagagtccaaagaattgctggacctcgtcgagtttaccaatgaaatccagactttgctaggaagtagtgtagagtggttacatccctctgacctggcctccgacaattattggtag

SEQ ID NO: 44013 - DNA, 5166 bp, Artificial Sequence
  derived and/or modified sequence
atgctgagcgccacccccctgtacggcaacgtgcacagctggatgaacagcgaacgggtgaggatgtgcggtgcctctgaagatcgtaagatcctggtaaacgatggggatgcttccaaggcccgacttgagctccgagaggaaaatcctctcaatcataatgtagtggatgcttccaccgcccacaggatagatggtctggccgcactgtcaatggaccgtacaggcctgatccgagagggattgagagtgcccggcaacatcgtatacagctccctgtgcgggctgggttccgaaaagggtcgggaggcggcgacctcaacgctgggaggcctgggattctcttctgaaagaaaccctgagatgcagttcaaaccaaatacaccggaaacagtggaagctagcgcggtgtccgggaaacccccaaacgggttttcagctatctacaagacacccccgggaattcagaaatctgccgtcgctaccgccgaggccctgggactagacagaccagccagcgacaaacaaagccccttgaatatcaacggagccagctacttgagactcccatgggtcaatccttatatggagggggctacgccagccatctacccttttctggactccccaaacaagtactcccttaatatgtacaaagctttattgccgcaacagagctactctctggcacagcccctctatagtccggtctgtactaatggagagagattcctctatctgcccccccctcactacgtgggaccacacatccctagctctcttgccagtcctatgcgtctgagcacacccagcgcaagtccagcaattccaccactggttcactgtgctgacaagagtctgccatggaagatgggggtttcgcctgggaaccctgttgactctcacgcctatccccacattcagaactcaaaacaaccacgcgtcccctctgctaaagccgtgacctccggactcccaggggatacagcactgctcctcccaccctccccccgtccctctccaagggttcacttgccgacccaacctgcggcagacacatacagtgaatttcataaacattatgcccgcatctctactagccctagtgtagctctgagcaagccctatatgacggtgtcctcagagttcccagccgcaaggcttagcaacggaaagtaccctaaggctccggagggaggggagggtgcacaaccggttcccggccacgcccgtaagaccgccgtgcaggatcggaaagacgggagctcccccccgctgctggagaaacagaccgttaccaaagacgtgaccgacaagccactggacctgtcatctaaagtggtcgacgtggatgcatctaaggcagatcacatgaagaagatggcacccacagtgcttgtacattccagagccggatccggacttgtcctgagcggaagtgagatacccaaggagactctgtccccacctggtaacgggtgtgccatatatcgctccgaaatcattagcaccgccccttcaagttgggtggtaccaggtccgtctccaaacgaggagaataacggaaagtctatgtcactcaagaacaaagccctagattgggccatcccccagcagcgatcttcttcatgcccccgcatgggaggcactgacgctgttatcaccaatgtctctggctccgtgagttctgcagggcggcccgccagtgcctctccagctcccaacgctaatgctgacggcacaaaaacatctcgctcgtcggtagagaccaccccctccgttattcagcatgtcgggcagcccccagccacaccagccaagcattcctcctctacatccagcaagggtgcaaaagcttccaatccggagccttcctttaaagcaaacgagaatggcctgccccctagcagcatattcctcagtccaaatgaggccttccggagcccccccatcccatatccaaggagttatctaccgtacccggcgccggaagggatcgctgtgtctccgctgtcactgcacggcaaaggtccagtgtaccctcaccctgtgctgctgccaaatggtagcctgtttcctggacatctcgcacccaaaccgggactaccttacggactgcctacagggcgtccagagttcgttacctaccaagatgcattagggttggggatggtgcacccaatgttaattcctcacactcctatagaaatcaccaaagaagagaaaccagagaggagaagtagaagtcatgaaagagcccggtacgaggatcccactctaaggaaccgattctcggagattctggaaacctcctctactaagctgcaccccgatgtgcccaccgacaagaatctcaagcccaaccccaactggaatcagggtaagaccgtcgtgaaatctgataagctggtgtatgtggacttgctgagggaagagccagacgcaaaaaccgacaccaacgtttcaaagccgtccttcgccgcggaatctgtcggacagtccgccgaaccgcccaaaccgagtgtagagcccgcccttcagcaacatcgcgatttcattgctctgagagaggaattgggacggatatccgactttcatgaaacatatactttcaagcagcccgtcttcaccgtttctaaagactctgtactagccggtaccaacaaggaaaatcttggattaccagtgtccacaccctttctggagcctccgcttggtagtgatggtccggccgtgacattcggaaaaacgcaggaagaccctaaacccttttgcgtgggctctgccccacccagtgtggatgtgacacccacgtatacaaaggacggggctgatgaggctgaatccaacgacgggaaggtgctgaaaccaaaaccctcaaaactcgcgaagcgaattgctaacagcgctgggtacgtcggcgaccgctttaaatgcgtgactacagagctgtacgctgactcctcacaactgtctagagagcagcgggccctgcagatggagggcctgcaagaagacagcatcttatgtctgccagcagcctattgtgaaagggcgatgatgcggttctctgaattagaaatgaaggagcgagagggggggcaccccgccaccaaagatagtgaaatgtgcaagttttcacccgctgactgggaaagattgaaggggaaccaggacaagaaacccaaatctgtgacgctggaagaagctatagccgaacagaacgagagcgaacggtgtgaatacagcgttggcaataaacaccgggacccattcgaggcccccgaagacaaggaccttcctgtcgaaaaatactttgtggaaaggcagccagtgtcagagccaccagccgaccaggtcgcgtcagacatgccacactcccccaccttacgcgtggaccgcaaacgcaaagtcagcggagactcttcgcatacggaaaccactgctgaagaagttcccgaggacccgctattaaaagctaaacgtagacgtgtgtccaagggcttgcaccccaagaagcagcggcatctgttgcacttaagagagcgctgggagcagcaagtgagcgcagctgacggaaagccaggtcggcagtccagaaaagaagtgacacaggccacccagcctgaagcaatcccccagggcactaacattaccgaagagaagccaggcagaaaaagagctgaagcaaaaggaaacagatcttggagcgaagagtccttaaagccttcagacaatgaacagggactgcccgtcttttctggttcccctccaatgaagagtttaagctccacatccgctggaggaaaaaagcaagcccagccgagctgcgcccctgcctcccgcccaccagccaaacaacaaaagattaaggagaaccagaaaactgatgtgctttgcgccgacgaagaggaggactgccaggccgcttccctgctccagaagtacaccgataactctgagaaaccaagcgggaaacggttgtgcaaaaccaagcatctgatacctcaggaaagccggagaggcttgccacttactggcgagtattacgtagagaatgccgatgggaaggtgacagttcgtaggttccgcaaaaggccggagccatcctccgactacgatctgtctccggccaagcaggaaccgaagccttttgaccggctgcaacagctgctacccgcgagccaatcaacccagcttccatgctcctcgagcccacaagagactacacagtccaggcctatgcctcctgaagccagacggctgatcgtgaacaagaatgcaggagaaaccctgctacagcgcgcagcccgcctgggttacgaagaagtcgtgctgtactgtctggaaaacaaaatttgtgacgtgaatcaccgcgacaatgccgggtactgcgctttgcatgaggcctgcgcgagaggctggctaaacatcgtaagacatttacttgaatacggagcagatgtgaactgttctgctcaggacggcacacgtcccctccatgacgccgtcgaaaacgatcacctcgagattgtaagactattattatcgtacggcgccgacccaacactggccacatactccggccgcactattatgaaaatgacccacagcgaactgatggagaagtttctgactgattacctgaacgatctgcaaggaaggaatgatgacgatgccagcggcacctgggatttttatgggtcctctgtctgtgaacctgacgatgagagtggatatgacgtgttagctaatccgcctggcccagaagatcaggatgatgacgatgatgcgtattccgacgtgtttgaatttgagtttagtgagaccccactgctcccctgttacaatattcaggtgagcgtagcccaaggaccccgaaactggcttctgttaagtgacgtcctcaagaagttgaaaatgtcctctaggattttccggtgcaattttcctaatgtggagattgtgaccatcgccgaggccgaattctatagacaggtgagtgccagtttactgttctcttgttcaaaagatctggaggcctttaaccctgagtcaaaggagttactcgatctagtcgaattcacaaatgagattcagaccttgctgggcagtagcgtggaatggctgcatccatctgatctggcgtcagacaattattggtag

SEQ ID NO: 44014 - DNA, 5165 bp, Artificial Sequence
  derived and/or modified sequence
atgctctcagctaccccattatatggtaacgttcactcctggatgaactctgagcgcgtgagaatgtgcggggcaagtgaggaccgaaagatccttgttaatgacggagacgccagtaaggcacggcttgagctgcgagaggagaatcctctgaaccacaacgttgtggatgccagcactgcacatagaatcgatggactggctgccttgtccatggatcggaccggcttgatccgcgaaggacttagagtacctgggaacatcgtgtattccagcctgtgtggtcttggtagcgagaagggacgggaggcagcgacatctacactggggggtcttgggttttcctcggagcgcaaccctgaaatgcagtttaagcccaacactcccgagacagtggaagcttccgcagtgtctggtaagccgccaaacggattcagcgcaatttacaaaacacctccaggtatccagaaaagtgccgttgccactgctgaagcccttggtctagacagaccagcctcggataaacagtctccacttaatattaacggggcaagttacctgaggctgccctgggtaaatccatatatggaaggagcaacacccgctatatatcctttcttggattctcccaacaagtattctctaaatatgtataaagccctgctgccacaacagtcctatagcctggcccagcccctctactctcctgtctgcacaaatggcgaacgctttctgtatttgcctcccccacactacgtcggaccacacattcctagttctctcgctagtcccatgcggctgagtactccatcagcgtcacctgcgatcccgcctctcgtgcactgcgctgacaagtcactgccctggaaaatgggggtgagcccagggaatcccgttgacagtcatgcatacccacatatccaaaattccaaacagccaagagtgccctcagccaaggctgttacatctggccttcctggagatactgcattgttgcttccaccgtccccgagacctagcccacgcgtgcatttacctacacaacccgcagcagatacatactctgagttccacaagcactatgcaaggatcagtacgagccccagcgtggccctgagtaaaccttacatgaccgtatcaagcgaattcccagcagctcgcttgagcaatggcaaatatccaaaggcacccgagggtggggagggagcccaacctgtgcctggccacgctaggaagacagcagtacaagacagaaaggacggttcgtctccccctcttctcgaaaagcaaacggtgacaaaggacgtgaccgataaaccattagatctgtcgtctaaagttgtggacgtggacgcctcaaaggccgaccatatgaaaaaaatggcccctactgtcttggtgcacagcagggctgggagcgggctcgttctttccgggtccgaaattccgaaggagaccctttccccaccagggaatggatgcgcaatctacaggtcagagatcataagcactgctccttcaagttgggtcgtccccggtccttcccctaacgaggaaaacaatgggaaaagtatgtctctcaaaaacaaagcactggactgggcaattccgcaacagagaagctcctcttgtccgaggatgggcggaactgatgcggtgatcactaacgtctcaggctctgtaagttctgccggacgcccagctagcgccagccccgcaccaaacgccaacgcagatggtaccaagaccagcagatccagcgtcgaaactacgcctagcgtaattcaacacgtgggtcagcccccagctactcccgctaagcacagctcatcaaccagcagcaagggggcaaaggcatccaacccagaacctagctttaaagcgaatgagaatggtctgcctcctagttcaatatttttgtctccgaatgaggccttccggtctccccctattccatacccccgtagctacctcccttatcctgctccagaggggatcgctgtgtctccgctgtctctgcatggaaaaggcccagtgtacccccacccggtgctgctccctaacggttctttgtttccgggacacctggcccctaagcccggactgccgtatggcttgcctacaggcaggccggagttcgtgacttatcaggacgcactcggtttgggaatggtacatccgatgttgatccctcacaccccgatagaaattaccaaggaagagaaaccagaaagacgcagtaggtcccatgaacgcgctaggtacgaagaccccactctccgcaaccgcttttccgaaatcttagagacgagtagcaccaaattgcacccagacgttcctacggacaagaatctcaaacctaatcccaactggaaccaggggaagaccgttgtaaagtctgataaactggtgtatgtggacttactgagggaggagccagatgcaaaaacagacacaaacgtctctaagcctagctttgccgcagagtccgtgggtcagtccgccgagccgccaaaaccctccgtcgaacccgcactgcagcagcacagagactttatagcactgagggaggagctcggcagaatcagtgactttcacgaaacatatacattcaagcaacccgtgttcactgtcagcaaagatagcgtgctagctggaacaaataaagaaaaccttggcctccccgtttctaccccctttctggaaccccctctcggtagcgatgggccagcagtgacctttgggaaaacccaagaagacccaaagccattctgcgtgggcagcgcacctcccagtgtggatgtcactcctacatacaccaaagacggagccgatgaggccgagtccaacgatggaaaggtattaaagcccaaaccttccaagctagccaaaaggatcgccaactctgcaggctacgttggcgacaggttcaaatgcgtgactacagaactctacgccgatagctcacaactgagccgagaacagagagccctgcagatggaagggttgcaggaggattccatactgtgcttaccagcagcctactgcgaacgcgctatgatgaggttctcagagctggaaatgaaagaaagggagggcggacatccagcaacgaaggattctgaaatgtgcaagttctccccagccgactgggagagacttaaaggcaaccaagataaaaaacccaagtctgtgactctggaagaggcaatagccgagcagaatgaatctgaacgctgtgaatacagtgtcggaaacaagcatagagatccatttgaagccccagaggacaaggatctgcccgtggaaaagtattttgtagaaagacaacccgtttctgagccccctgccgaccaggtggcctcagatatgccgcattctcctacacttagagtcgatagaaagagaaaagtctctggcgattcgtctcacactgagaccactgcagaggaagtgccggaggacccgctgctgaaagctaagagacgcagggtgtcaaagggcctgcaccctaagaaacagcgccacctgctgcacctgagggagcgctgggagcagcaagttagtgccgcagatggcaaacctggcagacagtcaagaaaagaggtgacacaggccacacaacccgaagcgatacctcagggcaccaacatcacggaagaaaaacctgggcgaaagcgggcagaggccaaggggaaccggtcttggtcagaagaatcccttaagccttcggacaatgagcagggactccccgtcttctccgggtcacctccaatgaagtctctgagctcgacttcggctggaggcaaaaagcaggcacagccttcatgcgcgcctgcctcacgacctccggctaagcagcaaaaaatcaaagaaaaccagaaaaccgacgtgctgtgtgcggatgaagaagaggattgccaggccgctagcctgctgcagaaatacaccgataactcagagaagcctagcggaaagcggctgtgcaagacaaagcacctcattcctcaagaatcacggcgtggactgcctctcactggcgagtattacgtggagaatgcagacggtaaggtaaccgtgagacgttttaggaaaagacccgagcccagttctgattatgatctctcgccagcaaagcaggagccgaagccctttgatcggctgcagcagttactccccgctagccagtccacccagctgccatgttcatcgagcccacaagagaccacacagtcacggcctatgcctcctgaggctagacgcctcatcgtgaataagaatgctggcgaaactttactccagcgggcagccagattaggttacgaggaggtcgtgctctattgcctggagaataagatatgtgatgtcaaccaccgtgataacgccggttattgtgccctccacgaggcctgtgctaggggttggctcaacatcgtgaggcacctactcgaatacggagccgatgttaactgtagcgcccaggatggtacaagacctcttcacgatgctgtagagaatgatcacttggagatcgtgagactgctactctcctatggagcagatcccaccctggccacatacagcgggaggacaatcatgaagatgactcatagcgaactcatggagaagttcttgaccgattacctcaacgatttgcaggggaggaacgatgatgacgcatctgggacgtgggatttctacggcagctctgtgtgcgaacccgatgacgaaagcggctatgatgttctggccaatccgcctggccctgaggatcaagacgatgatgacgatgcttatagcgatgttttcgagttcgagttcagcgaaacccccttactgccttgttacaatatccaggtttcagtcgcccaggggcctagaaactggctcctgctgtctgatgtcctgaaaaagctcaagatgtctagcagaatatttagatgcaacttcccaaacgtagagatagtcactattgctgaagctgagttctataggcaggtttctgcaagcctgctgttcagttgttccaaggatctggaagcttttaacccagagtccaaggaacttttggatcttgtcgaatttactaacgagatccagacgctgctggggagttctgtcgaatggctgcatcctagtgatttggcttctgacaactattggta

SEQ ID NO: 44015 - DNA, 5165 bp, Artificial Sequence
  derived and/or modified sequence
atgttgtcagcaacccctctgtatggcaatgtccatagctggatgaactcagagagagttaggatgtgtggagcgtcagaagaccgcaagatccttgtaaatgatggcgatgcaagtaaggcaagattggagctacgggaagagaatcctctaaaccacaacgtggtcgatgcatcgaccgctcataggatcgacggtctggccgcactctccatggacaggacaggtttaattcgcgaaggccttcgcgtgccgggaaacatcgtttactctagcctctgtggactgggctctgaaaagggcagagaggcagcaaccagtacgcttgggggattggggttctcatccgagcgcaacccagagatgcagttcaaacctaatacgcctgagaccgtcgaggcaagcgccgtgtcaggaaagccacctaatggcttcagcgctatatacaaaacaccacccggaatccagaagagcgcagtggccactgcagaggcgctggggctggaccgtcctgccagcgataagcaatcacctctgaacattaacggggcatcttaccttcggctgccgtgggtcaatccttacatggagggcgctacccctgcaatttacccattcctcgattcaccgaataaatactctctgaatatgtataaggctcttcttccacagcagagctacagtcttgcccagcctctctacagtcctgtctgtactaatggggaaaggtttctgtacttgcccccaccccactatgttggcccacatattccaagctctctggcaagccctatgcgccttagtacaccctctgcaagccccgcaatacctccacttgttcactgtgctgataaatccttgccctggaaaatgggagtttcgccaggcaaccctgtggactctcacgcctatccgcacatccagaacagtaagcagcccagggtcccatctgccaaagccgtcacttctggcctccctggtgatacagcactgttactgccaccgtctccaaggccctcacccagagtgcatctgcctactcagcccgctgctgacacgtattccgaatttcataagcattacgcacggatatctactagcccaagcgtcgctctctccaaaccttacatgactgtttcatcggaattcccggctgctaggctgagcaatgggaagtatccgaaagctccagaaggtggcgagggcgctcagccagtccccggtcacgcccgaaaaacagccgttcaggaccggaaagacgggagtagcccgccactgctagaaaagcagacagtcacgaaagatgtgaccgacaaacccttggacctgagcagcaaagtagtggacgtggatgcctccaaagccgatcacatgaagaagatggccccaacggtactggtccacagtcgtgccggatccggactggtcctgagcggcagcgagatacccaaggaaactctgtcccccccaggaaacggctgtgccatttaccgcagcgagattatctcgacggcccctagttcctgggtcgtgccaggcccttccccaaatgaggagaacaatggaaagagtatgagcttgaagaataaggccttagattgggccataccccagcagagatcatcaagctgtcctaggatgggtggaactgatgccgtgatcacaaacgtgagtggatcagtctcctccgcaggcaggcccgcttccgcctcccctgcacccaacgccaacgcggacggcacaaaaacgtctaggagctcagtggaaacgaccccttcggttatccagcacgtgggtcaaccaccagctactcctgcaaagcattccagcagcacttcaagtaaaggggctaaagcatcaaatcctgaaccatctttcaaggccaacgagaacgggctgcccccaagctccatattcctgtcccctaatgaagcgttccggagcccacctatcccctaccctagaagctacctgccttaccccgctcccgaagggatcgctgtttccccactctccttacacgggaagggccctgtctacccacatccagtgctgctccccaatggatccttatttccaggacacttggccccaaagccaggattaccatacgggctccctactggcaggccagaatttgttacatatcaggacgctctggggctggggatggtgcaccctatgctgattcctcacacacctattgagatcaccaaggaagaaaagccagagaggcgcagtcggagtcatgagagggcaaggtatgaagacccgactttacgaaaccgcttctccgaaatcttggagacaagctccaccaaattacacccggacgtgccgactgacaaaaacctcaagcccaacccgaattggaaccagggcaagacagtggttaagtcagacaagctcgtgtacgtcgacttgctgagggaggaacccgacgctaagacagacactaacgtaagtaaacccagttttgccgcagagagcgtcggccaatccgctgagcctcccaagcctagtgtggaacccgctctgcagcaacatagggatttcattgcccttcgggaagaactcgggcgtatttctgattttcacgaaacctatacttttaagcagcccgtttttacagtttcaaaagacagcgtgttggcaggtactaacaaagagaatctcggcctacctgtttccaccccttttctcgagcctccgctgggcagcgacggaccggcagttactttcggaaagactcaggaggaccccaagccattctgtgtgggttcggcgcctcctagtgttgacgtgacccctacctacaccaaagatggagcggacgaagcggaaagcaatgatgggaaggttcttaaacccaaaccctccaagctcgctaagcggatagccaattctgctgggtatgttggggatcgctttaaatgtgtgaccactgaactatacgctgatagctcacagctgagccgggagcaacgagccctccaaatggaggggttacaagaggattccatcctatgcttgccggctgcgtattgcgaacgtgccatgatgcggttctcagaactggagatgaaggagcgtgaagggggacaccccgcaactaaagattcggagatgtgtaaattctccccagcagattgggagagactcaaaggcaatcaagacaaaaagccaaaatccgtcactttggaagaggctatcgccgagcagaacgaatcagagaggtgcgagtatagtgtggggaataagcacagagacccctttgaggcgccagaagataaagatctccccgtcgaaaagtatttcgtggaaaggcagccagtgtccgagccccctgctgatcaggtcgcttctgatatgccccactccccaaccctccgcgtggatcgaaaaagaaaggtgagtggcgattcatctcacacggagaccaccgccgaggaggtcccagaagacccactcctgaaagcaaaacgccgacgtgtttctaaaggccttcatcctaagaaacagcgccatttactccatctgagagaacgctgggagcagcaagtgagtgcagccgatgggaaacccggtaggcaatccagaaaggaagtcacccaagcaacacagcccgaggctataccacagggaactaatatcacggaagagaaaccgggaagaaagcgtgcggaagcaaaagggaataggtcttggtctgaagagagcctgaaaccttctgacaatgaacagggacttcccgtgttctcggggtctccccctatgaagagtctttcctcgacgagtgccggaggcaagaaacaggcccagccaagttgtgctcctgcctcacgtcccccagccaagcagcagaaaattaaggagaatcaaaagactgacgttctgtgtgccgacgaggaagaggactgtcaagccgcaagcctgctgcaaaaatatacagataattcagaaaagcccagcggcaagagactgtgtaagacgaagcatttgatcccacaggaaagccggagaggcctgccactaacaggcgagtactacgtagagaatgctgatggtaaggtgacagtgagaaggttccggaaacgtccagagcctagttcggactacgacctgagcccagccaaacaagaacccaaaccctttgatcggttacagcagctgctgccagctagccagtccacccagttaccatgctcctcgtccccccaggagactacacaatcccgcccaatgccacccgaggctcggagactcatcgtcaataagaacgcaggcgagaccctgctgcaacgggcagcgaggctgggatacgaagaggtggttctctactgcctcgaaaacaagatttgtgatgtcaatcaccgtgataatgccggatactgtgcgcttcatgaagcgtgcgcccgtggctggctgaacattgttagacacctgctggagtacggggctgacgtcaactgcagtgcccaggatggcacccgaccactacacgatgccgtggaaaatgaccacctggaaattgtgagattgctcctgagttatggagcagacccgaccctggccacttacagtggccgaactattatgaagatgacacacagcgagctgatggaaaagttcttgacagattacctgaatgatctccagggtaggaatgacgacgacgccagtggaacgtgggacttttacggaagttccgtttgtgagcccgatgacgaaagtggctacgatgtgctcgccaatccccctggaccggaagatcaggatgatgatgatgacgcatattcagatgtgttcgagttcgaattcagtgagactcctctcctgccttgttataatatccaagtaagtgtggctcagggaccacggaattggctcctcttgagcgacgttcttaagaagcttaagatgagctctcggatctttaggtgtaacttccccaacgtggagatagtcacgattgccgaagctgaattctaccggcaggtcagcgcctcactgctttttagttgctctaaggatctggaggcattcaatccggaatccaaagagctgctggacctggtggagttcactaacgaaatccaaacacttcttggctctagtgtggagtggctgcatccctcagatttggccagcgacaactattggta

SEQ ID NO: 44016 - DNA, 6390 bp, Artificial Sequence
  derived and/or modified sequence
ggtatttccgaagctggccaggccctctgctgctgaccctggaaatcgggtcacactagacaaggctgcatgtgcggggagaaggcgggggggctcctttgcacgcggctgctcgcgtttccccaaggcctccaaatagtctaaaaactcacctcggaggaggagaaagagcgtgaagtggctctttcgatctgagacaccccctcccggagaactcgccccctcccccccagcccagagcggagtgaaatcttagaagccgtggctgctgggtttgaacggaatgctggagtcagtggaagacggagctggtcggcccgaagactagacgcttgaagcaaagctgccatcccagaagacgacatgctctcagcaacccccctgtatgggaacgttcacagctggatgaacagcgagagggtccgcatgtgtggggcgagcgaagacaggaaaatccttgtaaatgatggtgacgcttcaaaagccagactggaactgagggaagagaatcccttgaaccacaacgtggtggatgcgagcacggcccataggatcgatggcctggcagcactgagcatggaccgcactggcctgatccgggaagggctgcgggtcccgggaaacatcgtctattctagcttgtgtggactgggctcagagaaaggtcgggaggctgccacaagcactctaggtggccttgggttttcttcggaaagaaatccagagatgcagttcaaaccgaatacacccgagacagtggaggcttctgccgtctctggaaaacccccaaatggcttcagtgctatatacaaaacaccgcctggaatacaaaaaagtgctgtagccacagcagaagcgctgggcttggacaggcctgccagcgacaaacagagccctctcaacatcaatggtgctagttatctgcggctgccctgggtcaatccttacatggagggtgccacgccagccatctaccctttcctcgactcgccaaataagtattcactgaacatgtacaaggccttgctacctcagcagtcctacagcttggcccagccgctgtattctccagtctgcaccaatggggagcgctttctctacctgccgccacctcactacgtcggtccccacatcccatcgtccttggcatcacccatgaggctctcgacaccttcggcctccccagccatcccgcctctcgtccattgcgcagacaaaagcctcccgtggaagatgggcgtcagccctgggaatcctgttgattcccacgcctatcctcacatccagaacagtaagcagcccagggttccctctgccaaggcggtcaccagtggcctgccgggggacacagctctcctgttgcccccctcgcctcggccgtcaccccgagtccaccttcccacccagcctgctgcagacacctactcggagttccacaagcactatgccaggatctccacctctccttcagttgccctgtcaaagccatacatgacagttagcagcgagttccccgcggccaggctctccaatggcaagtatcccaaggctccggaagggggcgaaggtgcccagccagtgcccgggcatgcccggaagacagcggttcaagacagaaaagatggcagctcacctcctctgttggagaagcagaccgttaccaaagacgtcacagataagccactagacttgtcttctaaagtggtggatgtagatgcttccaaagctgaccacatgaaaaagatggctcccacggtcctggttcacagcagggctggaagtggcttagtgctctccggaagtgagattccgaaagaaacactatctcctccaggaaatggttgtgctatctatagatctgaaatcatcagcactgctccctcatcctgggtggtgcccgggccaagtcctaacgaagagaacaatggcaaaagcatgtcgctgaaaaacaaggcattggactgggcgataccacagcagcggagttcatcatgcccgcgcatgggcggcaccgatgctgtcatcactaacgtttcagggtcagtgtcgagtgcaggccgcccagcctccgcatcacccgcccccaatgccaatgcagatggcaccaaaaccagcaggagctctgtagaaaccacaccatccgttattcagcacgtgggccagcccccggccactcctgccaagcacagtagcagcaccagcagcaagggcgccaaagccagcaacccagaaccgagtttcaaagcaaacgagaacggccttccaccaagctctatatttctgtctccaaatgaggcattcaggtccccaccaattccctaccccaggagttacctcccttacccagcccctgagggcattgctgtaagtcccctctccttacatggcaaaggacctgtctaccctcacccagttttgttacccaatggcagtctgtttcctgggcaccttgccccaaagcctgggctgccctatgggcttcccaccggccgtccagagtttgtgacctaccaagatgccctggggttgggcatggtgcatcccatgttgataccacacacgcccatagagattactaaagaggagaaaccagagaggagatcccggtcccatgagagagcccgttacgaggacccaaccctccggaatcggttttccgagattttggaaactagcagcaccaagttacatccagatgtccccaccgacaagaacctaaagccgaaccccaactggaatcaagggaagactgttgtcaaaagcgacaagcttgtctacgtagaccttctccgagaagaaccagatgctaaaactgacacaaacgtgtccaaacccagctttgcagcagagagtgttggccagagcgctgagccccccaagccctcagttgagccggccctgcagcagcaccgtgatttcatcgccctgagagaggagttggggcgcatcagtgacttccacgaaacttatactttcaaacagccagtcttcaccgtaagcaaggacagtgttctggcaggtaccaacaaagagaacctagggttgccagtctcgactccattcctggagccacctctggggagcgatggccctgctgtaacttttggtaaaacccaagaggatcccaaaccattttgtgtgggcagtgccccaccaagtgtggatgtgacccccacctataccaaagatggagctgatgaggctgaatcaaatgatggcaaagttctgaaaccgaagccatctaagctggcaaagagaatcgccaactcagcgggttacgtgggtgaccgattcaaatgtgtcactaccgaactgtatgcagattccagtcagctcagccgggagcaacgggcattgcagatggaaggattacaagaggacagtattttatgtctacccgctgcttactgtgagcgtgcaatgatgcgcttctcagagttggagatgaaagaaagagaaggtggccacccagcaaccaaagactccgagatgtgcaaattcagcccagccgactgggaaaggttgaaaggaaatcaggacaaaaagccaaagtcggtcaccctggaggaggccattgcagaacagaacgaaagtgagagatgcgagtatagtgttggaaacaagcaccgtgatccctttgaagccccagaggacaaagatcttcctgtggagaagtactttgtggagaggcagcctgtgagcgagcctcccgcagaccaggtggcctcggacatgcctcacagccccaccctccgggtggacaggaaacgcaaagtctcaggtgacagcagccacactgagaccactgcggaggaggtgccagaggaccctctgctgaaagccaaacgccgacgagtctctaaagggctccatcctaaaaaacaacgccacttgctgcaccttagagaacgatgggagcagcaggtgtcggcagcagatggcaaacctggccggcaaagcaggaaggaagtgacccaggccactcagcctgaggccattcctcaggggactaacatcactgaagagaaacctggcaggaaaagggcagaggccaaaggcaacagaagctggtcggaagagtctcttaaacccagtgacaatgaacaaggcttgcctgtgttctccggctctccgcccatgaagagtctttcatccaccagtgcaggcggcaaaaagcaggctcagccaagctgcgcaccagcctccaggccgcctgccaaacagcagaaaattaaagaaaaccagaagacagatgtgctgtgtgcagacgaagaagaggattgccaggctgcctccctgctgcagaaatacaccgacaacagcgagaagccatccgggaagagactgtgcaaaaccaaacacttgatccctcaggagtccaggcggggattgccactgacaggggaatactacgtggagaatgccgatggcaaggtgactgtccggagattcagaaagcggccggagcccagttcggactatgatctgtcaccagccaagcaggagccaaagcccttcgaccgcttgcagcaactgctaccagcctcccagtccacacagctgccatgctcaagttcccctcaggagaccacccagtctcgccctatgccgccggaagcacggagacttattgtcaataagaacgctggcgagacccttctgcagcgggcagccaggcttggctatgaggaagtggtcctgtactgcttagagaacaagatttgtgatgtaaatcatcgggacaacgcaggttactgcgccctgcatgaagcttgtgctaggggctggctcaacattgtgcgacacctccttgaatatggcgctgatgtcaactgtagtgcccaggatggaaccaggcctctgcacgatgctgttgagaacgatcacttggaaattgtccgactacttctctcttatggtgctgaccccaccttggctacgtactcaggtagaaccatcatgaaaatgacccacagtgaacttatggaaaagttcttaacagattatttaaatgacctccagggtcgcaatgatgatgacgccagtggcacttgggacttctatggcagctctgtttgtgaaccagatgatgaaagtggctatgatgttttagccaaccccccaggaccagaagaccaggatgatgatgacgatgcctatagcgatgtgtttgaatttgaattttcagagacccccctcttaccgtgttataacatccaagtatctgtggctcaggggccacgaaactggctactgctttcggatgtccttaagaaattgaaaatgtcctcccgcatatttcgctgcaattttccaaacgtggaaattgtcaccattgcagaggcagaattttatcggcaggtttctgcaagtctcttgttctcttgctccaaagacctggaagccttcaaccctgaaagtaaggagctgttagatctggtggaattcacgaacgaaattcagactctgctgggctcctctgtagagtggctccaccccagtgatctggcctcagacaactactggtgagcaagctggacccaccatgtacagtgtgttatagtgttaatccttgtgcatatgtgtcataatacaactatttctgtaaagaaaggacactattacatatgaaaatatctcttctttatataagagaaattactccagtcagaaggacttagaaacatgtttttttccttttaaacttttaagtcagtttttatgaagttgttataatgtttctttacttttcaatgcacacatgctttgggatacgtttgtttttacttggaacatttgtttcttttcttttttaaggagaaaaaaaaatgagtaaaaggagctccacactttgacttaatttcatacaaagctctgatgacaggccatgactgtagagtggtcagaactgtgtggttggtttgagggagcgaattcggggaaggcacttggtgatataactttgttttgtttacagagtacctgctcgggccaggtaaatgctattggatgtaatccagtagtgtgtaatataaattcaaaccatatccacacacaacaactaattgtatgaaacttttatatcctaatttaaaagctgtgaaattagttttcacgcatcaaaccggattgtttatatgtttaaacattttatgctcttatttaaagaagactttgagctatttttttctgtaccctgtaaaatattgaaaactaacataatatgttgaggttgcttggaaatgtacataaaactaaaattttctgaatcgtgtgtttatgtttgaaatctgtgttttaactttgtaagtaaattctctgcctttgtatttatattttacaaaaattttcttaaaaggcaataaaactgttgaggaaaggagaaaattg

SEQ ID NO: 44017 - DNA, 6258 bp, Artificial Sequence
  derived and/or modified sequence
gctcgccgcgcttctccggcccggctccttctccgctcgttaacgtcgccaaccccccccacccctcatatctctctccacccacccaaccgccccccgctccttctcgccgcctcgagtccgcttgggggaaaacttcaaagagccggatcgcaggctccctgcctactcccccaccggggatttcagactagacgcttgaagcaaagctgccatcccagaagacgacatgctctcagcaacccccctgtatgggaacgttcacagctggatgaacagcgagagggtccgcatgtgtggggcgagcgaagacaggaaaatccttgtaaatgatggtgacgcttcaaaagccagactggaactgagggaagagaatcccttgaaccacaacgtggtggatgcgagcacggcccataggatcgatggcctggcagcactgagcatggaccgcactggcctgatccgggaagggctgcgggtcccgggaaacatcgtctattctagcttgtgtggactgggctcagagaaaggtcgggaggctgccacaagcactctaggtggccttgggttttcttcggaaagaaatccagagatgcagttcaaaccgaatacacccgagacagtggaggcttctgccgtctctggaaaacccccaaatggcttcagtgctatatacaaaacaccgcctggaatacaaaaaagtgctgtagccacagcagaagcgctgggcttggacaggcctgccagcgacaaacagagccctctcaacatcaatggtgctagttatctgcggctgccctgggtcaatccttacatggagggtgccacgccagccatctaccctttcctcgactcgccaaataagtattcactgaacatgtacaaggccttgctacctcagcagtcctacagcttggcccagccgctgtattctccagtctgcaccaatggggagcgctttctctacctgccgccacctcactacgtcggtccccacatcccatcgtccttggcatcacccatgaggctctcgacaccttcggcctccccagccatcccgcctctcgtccattgcgcagacaaaagcctcccgtggaagatgggcgtcagccctgggaatcctgttgattcccacgcctatcctcacatccagaacagtaagcagcccagggttccctctgccaaggcggtcaccagtggcctgccgggggacacagctctcctgttgcccccctcgcctcggccgtcaccccgagtccaccttcccacccagcctgctgcagacacctactcggagttccacaagcactatgccaggatctccacctctccttcagttgccctgtcaaagccatacatgacagttagcagcgagttccccgcggccaggctctccaatggcaagtatcccaaggctccggaagggggcgaaggtgcccagccagtgcccgggcatgcccggaagacagcggttcaagacagaaaagatggcagctcacctcctctgttggagaagcagaccgttaccaaagacgtcacagataagccactagacttgtcttctaaagtggtggatgtagatgcttccaaagctgaccacatgaaaaagatggctcccacggtcctggttcacagcagggctggaagtggcttagtgctctccggaagtgagattccgaaagaaacactatctcctccaggaaatggttgtgctatctatagatctgaaatcatcagcactgctccctcatcctgggtggtgcccgggccaagtcctaacgaagagaacaatggcaaaagcatgtcgctgaaaaacaaggcattggactgggcgataccacagcagcggagttcatcatgcccgcgcatgggcggcaccgatgctgtcatcactaacgtttcagggtcagtgtcgagtgcaggccgcccagcctccgcatcacccgcccccaatgccaatgcagatggcaccaaaaccagcaggagctctgtagaaaccacaccatccgttattcagcacgtgggccagcccccggccactcctgccaagcacagtagcagcaccagcagcaagggcgccaaagccagcaacccagaaccgagtttcaaagcaaacgagaacggccttccaccaagctctatatttctgtctccaaatgaggcattcaggtccccaccaattccctaccccaggagttacctcccttacccagcccctgagggcattgctgtaagtcccctctccttacatggcaaaggacctgtctaccctcacccagttttgttacccaatggcagtctgtttcctgggcaccttgccccaaagcctgggctgccctatgggcttcccaccggccgtccagagtttgtgacctaccaagatgccctggggttgggcatggtgcatcccatgttgataccacacacgcccatagagattactaaagaggagaaaccagagaggagatcccggtcccatgagagagcccgttacgaggacccaaccctccggaatcggttttccgagattttggaaactagcagcaccaagttacatccagatgtccccaccgacaagaacctaaagccgaaccccaactggaatcaagggaagactgttgtcaaaagcgacaagcttgtctacgtagaccttctccgagaagaaccagatgctaaaactgacacaaacgtgtccaaacccagctttgcagcagagagtgttggccagagcgctgagccccccaagccctcagttgagccggccctgcagcagcaccgtgatttcatcgccctgagagaggagttggggcgcatcagtgacttccacgaaacttatactttcaaacagccagtcttcaccgtaagcaaggacagtgttctggcaggtaccaacaaagagaacctagggttgccagtctcgactccattcctggagccacctctggggagcgatggccctgctgtaacttttggtaaaacccaagaggatcccaaaccattttgtgtgggcagtgccccaccaagtgtggatgtgacccccacctataccaaagatggagctgatgaggctgaatcaaatgatggcaaagttctgaaaccgaagccatctaagctggcaaagagaatcgccaactcagcgggttacgtgggtgaccgattcaaatgtgtcactaccgaactgtatgcagattccagtcagctcagccgggagcaacgggcattgcagatggaaggattacaagaggacagtattttatgtctacccgctgcttactgtgagcgtgcaatgatgcgcttctcagagttggagatgaaagaaagagaaggtggccacccagcaaccaaagactccgagatgtgcaaattcagcccagccgactgggaaaggttgaaaggaaatcaggacaaaaagccaaagtcggtcaccctggaggaggccattgcagaacagaacgaaagtgagagatgcgagtatagtgttggaaacaagcaccgtgatccctttgaagccccagaggacaaagatcttcctgtggagaagtactttgtggagaggcagcctgtgagcgagcctcccgcagaccaggtggcctcggacatgcctcacagccccaccctccgggtggacaggaaacgcaaagtctcaggtgacagcagccacactgagaccactgcggaggaggtgccagaggaccctctgctgaaagccaaacgccgacgagtctctaaagggctccatcctaaaaaacaacgccacttgctgcaccttagagaacgatgggagcagcaggtgtcggcagcagatggcaaacctggccggcaaagcaggaaggaagtgacccaggccactcagcctgaggccattcctcaggggactaacatcactgaagagaaacctggcaggaaaagggcagaggccaaaggcaacagaagctggtcggaagagtctcttaaacccagtgacaatgaacaaggcttgcctgtgttctccggctctccgcccatgaagagtctttcatccaccagtgcaggcggcaaaaagcaggctcagccaagctgcgcaccagcctccaggccgcctgccaaacagcagaaaattaaagaaaaccagaagacagatgtgctgtgtgcagacgaagaagaggattgccaggctgcctccctgctgcagaaatacaccgacaacagcgagaagccatccgggaagagactgtgcaaaaccaaacacttgatccctcaggagtccaggcggggattgccactgacaggggaatactacgtggagaatgccgatggcaaggtgactgtccggagattcagaaagcggccggagcccagttcggactatgatctgtcaccagccaagcaggagccaaagcccttcgaccgcttgcagcaactgctaccagcctcccagtccacacagctgccatgctcaagttcccctcaggagaccacccagtctcgccctatgccgccggaagcacggagacttattgtcaataagaacgctggcgagacccttctgcagcgggcagccaggcttggctatgaggaagtggtcctgtactgcttagagaacaagatttgtgatgtaaatcatcgggacaacgcaggttactgcgccctgcatgaagcttgtgctaggggctggctcaacattgtgcgacacctccttgaatatggcgctgatgtcaactgtagtgcccaggatggaaccaggcctctgcacgatgctgttgagaacgatcacttggaaattgtccgactacttctctcttatggtgctgaccccaccttggctacgtactcaggtagaaccatcatgaaaatgacccacagtgaacttatggaaaagttcttaacagattatttaaatgacctccagggtcgcaatgatgatgacgccagtggcacttgggacttctatggcagctctgtttgtgaaccagatgatgaaagtggctatgatgttttagccaaccccccaggaccagaagaccaggatgatgatgacgatgcctatagcgatgtgtttgaatttgaattttcagagacccccctcttaccgtgttataacatccaagtatctgtggctcaggggccacgaaactggctactgctttcggatgtccttaagaaattgaaaatgtcctcccgcatatttcgctgcaattttccaaacgtggaaattgtcaccattgcagaggcagaattttatcggcaggtttctgcaagtctcttgttctcttgctccaaagacctggaagccttcaaccctgaaagtaaggagctgttagatctggtggaattcacgaacgaaattcagactctgctgggctcctctgtagagtggctccaccccagtgatctggcctcagacaactactggtgagcaagctggacccaccatgtacagtgtgttatagtgttaatccttgtgcatatgtgtcataatacaactatttctgtaaagaaaggacactattacatatgaaaatatctcttctttatataagagaaattactccagtcagaaggacttagaaacatgtttttttccttttaaacttttaagtcagtttttatgaagttgttataatgtttctttacttttcaatgcacacatgctttgggatacgtttgtttttacttggaacatttgtttcttttcttttttaaggagaaaaaaaaatgagtaaaaggagctccacactttgacttaatttcatacaaagctctgatgacaggccatgactgtagagtggtcagaactgtgtggttggtttgagggagcgaattcggggaaggcacttggtgatataactttgttttgtttacagagtacctgctcgggccaggtaaatgctattggatgtaatccagtagtgtgtaatataaattcaaaccatatccacacacaacaactaattgtatgaaacttttatatcctaatttaaaagctgtgaaattagttttcacgcatcaaaccggattgtttatatgtttaaacattttatgctcttatttaaagaagactttgagctatttttttctgtaccctgtaaaatattgaaaactaacataatatgttgaggttgcttggaaatgtacataaaactaaaattttctgaatcgtgtgtttatgtttgaaatctgtgttttaactttgtaagtaaattctctgcctttgtatttatattttacaaaaattttcttaaaaggcaataaaactgttgaggaaaggagaaaattgaa

SEQ ID NO: 44018 - DNA, 5166 bp, Artificial Sequence
  derived and/or modified sequence
atgctgagcgccacccccctgtacggcaacgtgcacagctggatgaacagcgagagagtgagaatgtgcggcgccagcgaggacagaaagatcctggtgaacgacggcgacgccagcaaggccagactggagctgagagaggagaaccccctgaaccacaacgtggtggacgccagcaccgcccacagaatcgacggcctggccgccctgagcatggacagaaccggcctgatcagagagggcctgagagtgcccggcaacatcgtgtacagcagcctgtgcggcctgggcagcgagaagggcagagaggccgccaccagcaccctgggcggcctgggcttcagcagcgagagaaaccccgagatgcagttcaagcccaacacccccgagaccgtggaggccagcgccgtgagcggcaagccccccaacggcttcagcgccatctacaagaccccccccggcatccagaagagcgccgtggccaccgccgaggccctgggcctggacagacccgccagcgacaagcagagccccctgaacatcaacggcgccagctacctgagactgccctgggtgaacccctacatggagggcgccacccccgccatctaccccttcctggacagccccaacaagtacagcctgaacatgtacaaggccctgctgccccagcagagctacagcctggcccagcccctgtacagccccgtgtgcaccaacggcgagagattcctgtacctgccccccccccactacgtgggcccccacatccccagcagcctggccagccccatgagactgagcacccccagcgccagccccgccatcccccccctggtgcactgcgccgacaagagcctgccctggaagatgggcgtgagccccggcaaccccgtggacagccacgcctacccccacatccagaacagcaagcagcccagagtgcccagcgccaaggccgtgaccagcggcctgcccggcgacaccgccctgctgctgccccccagccccagacccagccccagagtgcacctgcccacccagcccgccgccgacacctacagcgagttccacaagcactacgccagaatcagcaccagccccagcgtggccctgagcaagccctacatgaccgtgagcagcgagttccccgccgccagactgagcaacggcaagtaccccaaggcccccgagggcggcgagggcgcccagcccgtgcccggccacgccagaaagaccgccgtgcaggacagaaaggacggcagcagcccccccctgctggagaagcagaccgtgaccaaggacgtgaccgacaagcccctggacctgagcagcaaggtggtggacgtggacgccagcaaggccgaccacatgaagaagatggcccccaccgtgctggtgcacagcagagccggcagcggcctggtgctgagcggcagcgagatccccaaggagaccctgagcccccccggcaacggctgcgccatctacagaagcgagatcatcagcaccgcccccagcagctgggtggtgcccggccccagccccaacgaggagaacaacggcaagagcatgagcctgaagaacaaggccctggactgggccatcccccagcagagaagcagcagctgccccagaatgggcggcaccgacgccgtgatcaccaacgtgagcggcagcgtgagcagcgccggcagacccgccagcgccagccccgcccccaacgccaacgccgacggcaccaagaccagcagaagcagcgtggagaccacccccagcgtgatccagcacgtgggccagccccccgccacccccgccaagcacagcagcagcaccagcagcaagggcgccaaggccagcaaccccgagcccagcttcaaggccaacgagaacggcctgccccccagcagcatcttcctgagccccaacgaggccttcagaagcccccccatcccctaccccagaagctacctgccctaccccgcccccgagggcatcgccgtgagccccctgagcctgcacggcaagggccccgtgtacccccaccccgtgctgctgcccaacggcagcctgttccccggccacctggcccccaagcccggcctgccctacggcctgcccaccggcagacccgagttcgtgacctaccaggacgccctgggcctgggcatggtgcaccccatgctgatcccccacacccccatcgagatcaccaaggaggagaagcccgagagaagaagcagaagccacgagagagccagatacgaggaccccaccctgagaaacagattcagcgagatcctggagaccagcagcaccaagctgcaccccgacgtgcccaccgacaagaacctgaagcccaaccccaactggaaccagggcaagaccgtggtgaagagcgacaagctggtgtacgtggacctgctgagagaggagcccgacgccaagaccgacaccaacgtgagcaagcccagcttcgccgccgagagcgtgggccagagcgccgagccccccaagcccagcgtggagcccgccctgcagcagcacagagacttcatcgccctgagagaggagctgggcagaatcagcgacttccacgagacctacaccttcaagcagcccgtgttcaccgtgagcaaggacagcgtgctggccggcaccaacaaggagaacctgggcctgcccgtgagcacccccttcctggagccccccctgggcagcgacggccccgccgtgaccttcggcaagacccaggaggaccccaagcccttctgcgtgggcagcgccccccccagcgtggacgtgacccccacctacaccaaggacggcgccgacgaggccgagagcaacgacggcaaggtgctgaagcccaagcccagcaagctggccaagagaatcgccaacagcgccggctacgtgggcgacagattcaagtgcgtgaccaccgagctgtacgccgacagcagccagctgagcagagagcagagagccctgcagatggagggcctgcaggaggacagcatcctgtgcctgcccgccgcctactgcgagagagccatgatgagattcagcgagctggagatgaaggagagagagggcggccaccccgccaccaaggacagcgagatgtgcaagttcagccccgccgactgggagagactgaagggcaaccaggacaagaagcccaagagcgtgaccctggaggaggccatcgccgagcagaacgagagcgagagatgcgagtacagcgtgggcaacaagcacagagaccccttcgaggcccccgaggacaaggacctgcccgtggagaagtacttcgtggagagacagcccgtgagcgagccccccgccgaccaggtggccagcgacatgccccacagccccaccctgagagtggacagaaagagaaaggtgagcggcgacagcagccacaccgagaccaccgccgaggaggtgcccgaggaccccctgctgaaggccaagagaagaagagtgagcaagggcctgcaccccaagaagcagagacacctgctgcacctgagagagagatgggagcagcaggtgagcgccgccgacggcaagcccggcagacagagcagaaaggaggtgacccaggccacccagcccgaggccatcccccagggcaccaacatcaccgaggagaagcccggcagaaagagagccgaggccaagggcaacagaagctggagcgaggagagcctgaagcccagcgacaacgagcagggcctgcccgtgttcagcggcagcccccccatgaagagcctgagcagcaccagcgccggcggcaagaagcaggcccagcccagctgcgcccccgccagcagaccccccgccaagcagcagaagatcaaggagaaccagaagaccgacgtgctgtgcgccgacgaggaggaggactgccaggccgccagcctgctgcagaagtacaccgacaacagcgagaagcccagcggcaagagactgtgcaagaccaagcacctgatcccccaggagagcagaagaggcctgcccctgaccggcgagtactacgtggagaacgccgacggcaaggtgaccgtgagaagattcagaaagagacccgagcccagcagcgactacgacctgagccccgccaagcaggagcccaagcccttcgacagactgcagcagctgctgcccgccagccagagcacccagctgccctgcagcagcagcccccaggagaccacccagagcagacccatgccccccgaggccagaagactgatcgtgaacaagaacgccggcgagaccctgctgcagagagccgccagactgggctacgaggaggtggtgctgtactgcctggagaacaagatctgcgacgtgaaccacagagacaacgccggctactgcgccctgcacgaggcctgcgccagaggctggctgaacatcgtgagacacctgctggagtacggcgccgacgtgaactgcagcgcccaggacggcaccagacccctgcacgacgccgtggagaacgaccacctggagatcgtgagactgctgctgagctacggcgccgaccccaccctggccacctacagcggcagaaccatcatgaagatgacccacagcgagctgatggagaagttcctgaccgactacctgaacgacctgcagggcagaaacgacgacgacgccagcggcacctgggacttctacggcagcagcgtgtgcgagcccgacgacgagagcggctacgacgtgctggccaacccccccggccccgaggaccaggacgacgacgacgacgcctacagcgacgtgttcgagttcgagttcagcgagacccccctgctgccctgctacaacatccaggtgagcgtggcccagggccccagaaactggctgctgctgagcgacgtgctgaagaagctgaagatgagcagcagaatcttcagatgcaacttccccaacgtggagatcgtgaccatcgccgaggccgagttctacagacaggtgagcgccagcctgctgttcagctgcagcaaggacctggaggccttcaaccccgagagcaaggagctgctggacctggtggagttcaccaacgagatccagaccctgctgggcagcagcgtggagtggctgcaccccagcgacctggccagcgacaactactggtag

SEQ ID NO: 44019 - protein, 121 aa, Artificial Sequence
  derived and/or modified sequence
MLSTSRSRFIRNTNESGEEVTTFFDYDYGAPCHKFDVKQIGAQLLPPLYSLVFIFGFVGNMLVVLILINCKKLKCLTDIYLLNLAISDLLFLITLPLWAHSAANEWVFGNAMCKLFTGLYH

SEQ ID NO: 44020 - protein, 360 aa, Artificial Sequence
  derived and/or modified sequence
MLSTSRSRFIRNTNESGEEVTTFFDYDYGAPCHKFDVKQIGAQLLPPLYSLVFIFGFVGNMLVVLILINCKKLKCLTDIYLLNLAISDLLFLITLPLWAHSAANEWVFGNAMCKLFTGLYHIGYFGGIFFIILLTIDRYLAIVHAVFALKARTVTFGVVTSVITWLVAVFASVPGIIFTKCQKEDSVYVCGPYFPRGWNNFHTIMRNILGLVLPLLIMVICYSGILKTLLRCRNEKKRHRAVRVIFTIMIVYFLFWTPYNIVILLNTFQEFFGLSNCESTSQLDQATQVTETLGMTHCCINPIIYAFVGEKFRRYLSVFFRKHITKRFCKQCPVFYRETVDGVTSTNTPSTGEQEVSAGL

SEQ ID NO: 44021 - DNA, 366 bp, Artificial Sequence
  derived and/or modified sequence
atgttgagtacctctcgctcaaggtttatcaggaatactaatgagagtggggaagaggtgactacttttttcgattatgattacggcgccccctgccataagttcgacgtcaagcaaattggcgcacagctgctaccccctttatactccttggtattcatcttcgggtttgttgggaacatgctcgttgtcttaatactcatcaactgcaagaaactcaagtgcctcaccgacatctatctactcaacctcgcaatctcggatctgttattcctaattaccttgcctctgtgggcccattccgcggccaacgagtgggtctttgggaacgctatgtgcaaactcttcactggcctgtaccactag

SEQ ID NO: 44022 - DNA, 1083 bp, Artificial Sequence
  derived and/or modified sequence
atgctgagcacgtcccggagtcggtttataagaaataccaatgaaagcggggaggaagttaccacattttttgactatgactatggcgcaccctgccacaaatttgatgtcaaacagataggggctcaattactgccccctctctacagcctcgtgttcatctttgggtttgtcggaaacatgttagtggttctcatcctcattaactgtaagaaactcaagtgtctgaccgacatttatcttctgaatctcgcaatctccgatctactcttcctgattactctacctttgtgggctcatagcgccgcaaatgagtgggtgttcggtaacgccatgtgtaagcttttcacaggcctgtaccatattggctatttcggcggcatctttttcataattttgctgacaattgaccggtatttagcgattgtgcacgctgtgtttgctctaaaggcccggacagtgacattcggagtggtgacatcggtcataacatggctagtcgccgtgtttgcgagtgtacctggcattatcttcaccaagtgtcagaaagaagattctgtctacgtttgcggaccgtatttccctagaggttggaataactttcataccatcatgagaaatatcctgggcttggtgcttccattgttgatcatggtgatttgctactccggcatcctgaaaacactcttaaggtgtagaaatgagaaaaagcgacacagagctgttagggtaatattcaccatcatgatcgtgtattttctattttggactccttacaatatcgtcattctgctgaacaccttccaagagttcttcggcttgagcaactgtgagagcacctcacaattagaccaggcaacgcaggtgactgagacacttggaatgacacactgctgtattaatccgataatctatgcgttcgtgggcgagaagtttcgcaggtatctgagcgttttcttcaggaagcatatcaccaaaagattttgcaagcagtgtcctgtcttctatcgggagactgtagacggtgtaacctcaactaacaccccttcaacaggagagcaggaggtgagcgctggattgtag

SEQ ID NO: 44023 - DNA, 366 bp, Artificial Sequence
  derived and/or modified sequence
atgctgagcaccagccgcagccgcttcatccggaacaccaatgaaagtggagaggaggtgaccaccttctttgattatgactatggagccccctgccacaagtttgatgtgaagcagatcggggcccagctgctgccccccctgtacagcctggtgttcatctttggatttgtgggcaacatgctggtggtgctgatcctgatcaactgcaagaagctgaagtgcctgacagacatctacctgctgaacctggccatcagtgacctgctcttcctgatcaccctgcccctgtgggcccacagcgctgccaatgagtgggtgtttggaaatgccatgtgcaagctgttcaccggcctgtaccactag

SEQ ID NO: 44024 - DNA, 1083 bp, Artificial Sequence
  derived and/or modified sequence
atgctgagcaccagccgcagccgcttcatccggaacaccaatgaaagtggagaggaggtgaccaccttctttgattatgactatggagccccctgccacaagtttgatgtgaagcagatcggggcccagctgctgccccccctgtacagcctggtgttcatctttggatttgtgggcaacatgctggtggtgctgatcctgatcaactgcaagaagctgaagtgcctgacagacatctacctgctgaacctggccatcagtgacctgctcttcctgatcaccctgcccctgtgggcccacagcgctgccaatgagtgggtgtttggaaatgccatgtgcaagctgttcaccggcctgtaccacatcggctactttggaggcatcttcttcatcatcctgctgaccatcgaccgctacctggccatcgtgcatgctgtgtttgccctgaaggccaggacagtgaccttcggcgtggtgaccagcgtcatcacctggctggtggccgtgtttgcctctgtgcccggcatcatcttcaccaagtgccagaaggaggacagcgtgtatgtgtgtggcccctacttcccccggggctggaacaacttccacaccatcatgaggaacatcctgggcctggtgctgcccctgctgatcatggtgatctgctacagcggcatcctgaagaccctgctgcgctgcagaaatgagaagaagaggcacagagctgtgcgggtcatcttcaccatcatgattgtgtacttcctgttctggaccccctacaacatcgtcatcctgctgaacaccttccaggagttcttcggcctgagcaactgtgagagcaccagccagctggaccaggccacccaggtgacagagaccctgggcatgacccactgctgcatcaaccccatcatctatgcctttgtgggggagaagttccgccgctacctgtctgtgttcttcaggaagcacatcaccaagcgcttctgcaagcagtgccctgtgttctaccgggagaccgtggatggagtgaccagcaccaacacccccagcactggagagcaggaggtgtctgctggcctgtag

SEQ ID NO: 44025 - DNA, 366 bp, Artificial Sequence
  derived and/or modified sequence
atgctgagcaccagccggagccggttcatccggaacaccaacgagagcggcgaggaagtgacgactttttttgactatgattacggagccccttgtcacaagtttgacgtgaaacagattggagcccagttgctgccgccactgtatagcctggtgttcatatttggattcgtgggaaacatgctcgtggtgcttatactgattaactgtaagaagctgaaatgcctaacagatatatatctcctcaacctggccatttccgatcttttgttcttgatcaccctccctctatgggcacactctgcagctaacgaatgggtttttggtaatgcgatgtgtaagctgttcacaggtctgtatcactag

SEQ ID NO: 44026 - DNA, 1083 bp, Artificial Sequence
  derived and/or modified sequence
atgctgagcaccagccggagccggttcatccggaacaccaacgagagtggcgaggaagtgacgaccttcttcgactacgactatggtgccccttgtcataagtttgatgtgaaacagattggggcacagttactgccgccgttatacagtcttgtgtttatctttggattcgttgggaacatgctggtagtgctcatcctgataaattgcaagaaacttaagtgtctgactgatatctacctgctgaatcttgccatcagcgatctgctctttttgatcaccctaccactgtgggcacactcagccgcaaatgaatgggtgttcggtaatgccatgtgcaaactgtttactggcctctaccacatcgggtacttcggcggcattttttttatcatactgttgacaatagacaggtatctcgccattgttcacgccgtgttcgcgctcaaggcgcgtacagtgacattcggcgtcgtgacaagtgtaattacttggctagttgctgtgtttgcctctgtgcctggcataattttcactaaatgtcaaaaggaggatagcgtgtacgtatgcggaccgtacttcccaagagggtggaacaactttcacacgatcatgaggaacatactgggcctggtgcttcccctactgatcatggtgatttgctactcggggatattgaaaaccctccttcgttgcagaaacgagaaaaagaggcacagagctgtgcgggtgatttttactatcatgattgtgtattttcttttctggacaccctataatattgttatcttattaaatacttttcaggagttcttcggactatcaaattgcgagtccacctcgcaactcgaccaggccacacaggtgacagagacactcggcatgacgcattgttgcatcaacccaattatttacgcctttgtgggcgagaagtttcggcggtatctgagcgtcttttttaggaaacacattaccaaacgcttttgcaaacagtgtccagttttctacagggaaactgtagatggtgtgacctccactaatacacctagcaccggggaacaggaagtctccgcaggtctttag

SEQ ID NO: 44027 - DNA, 366 bp, Artificial Sequence
  derived and/or modified sequence
atgctgtctactagccggtcgcgctttattaggaataccaacgagtcaggtgaggaggtgacaacctttttcgactacgactatggtgccccatgccacaagttcgatgtcaagcagataggtgctcagctcttaccacccctctattcactggtttttatcttcggatttgttgggaatatgctggtggtactgatcctgatcaattgtaagaaacttaaatgcctcacagatatctacttattgaatctcgctatctctgacctgctgtttctgatcacgctgcccctttgggcgcacagcgccgcaaatgaatgggtttttgggaacgcaatgtgcaagctcttcaccgggctgtatcactag

SEQ ID NO: 44028 - DNA, 1083 bp, Artificial Sequence
  derived and/or modified sequence
atgctcagcacctcacgatccagattcatccggaacactaacgagtctggggaagaagtgacaaccttctttgactatgattacggggcaccttgccataaattcgatgttaaacagatcggtgcccagttacttccccctctgtactctttggtgttcatcttcggatttgtgggaaatatgctagtcgtgctcatcctgattaattgcaaaaagctcaaatgcctgactgatatatatctgctgaatctggctattagtgatctccttttccttattactctgccattgtgggcccacagtgccgcaaatgagtgggtctttggcaatgccatgtgcaaactatttacgggtctgtaccatatagggtattttggaggtatattctttattattctgttgaccatagatcgttacctggctattgtgcacgcagtctttgcacttaaggcaagaactgtaacattcggagtggtgacctctgtgataacgtggctggtggcagtgtttgctagcgttcccggaattatcttcaccaaatgtcaaaaggaggactctgtgtatgtatgcggaccatattttccacgaggatggaacaactttcacactataatgaggaacattctcggattggtgttgccccttctgattatggtgatttgttattccgggattctgaagacattgctcaggtgccgaaacgagaaaaagagacaccgtgcggtgagagtgatctttaccattatgatcgtatactttctgttttggaccccctacaacattgtcatcctcttgaatacttttcaggaattttttggcttatccaattgcgaatccacgagccagctggatcaggcaactcaggtgaccgagacactgggaatgacacattgctgtatcaatccaatcatatatgctttcgtcggggagaagtttcggcgatatctctcagttttcttccgtaagcacatcacgaagcgcttttgcaagcagtgtcctgtgttttatagagaaactgttgacggcgtgacatcaaccaacaccccctcaaccggtgagcaagaggtcagcgctggcctgtag

SEQ ID NO: 44029 - DNA, 563 bp, Artificial Sequence
  derived and/or modified sequence
agttgctgagaagcctgacataccaggactgcctgagacaagccacaagctgcttctccagatttcaagaatctggctcagtgatatgaaatacaagacttgtgaaaagtgtcaattgcaagagaaatggaaggataaagtatacagaacagagaaagtggattgaacaaggacgcatttccccagtacatccacaacatgctgtccacatctcgttctcggtttatcagaaataccaacgagagcggtgaagaagtcaccaccttttttgattatgattacggtgctccctgtcataaatttgacgtgaagcaaattggggcccaactcctgcctccgctctactcgctggtgttcatctttggttttgtgggcaacatgctggtcgtcctcatcttaataaactgcaaaaagctgaagtgcttgactgacatttacctgctcaacctggccatctctgatctgctttttcttattactctcccattgtgggctcactctgctgcaaatgagtgggtctttgggaatgcaatgtgcaaattattcacagggctgtatcacat

SEQ ID NO: 44030 - DNA, 2386 bp, Artificial Sequence
  derived and/or modified sequence
accaataccctttattctctggaacatgaaacattctgttgtgctcatatcatgcaaattatcactagtaggagagcagagagtggaaatgttccaggtataaagacccacaagataaagaagctcagagtcgttagaaacaggagcagatgtacagggtttgcctgactcacactcaaggttgcataagcaagatttcaaaattaatcctattctggagacctcaacccaatgtacaatgttcctgactggaaaagaagaactatatttttctgattttttttttcaaatctttaccattagttgccctgtatctccgccttcactttctgcaggaaactttatttcctacttctgcatgccaagtttctacctctagatctgtttggttcagttgctgagaagcctgacataccaggactgcctgagacaagccacaagctgaacagagaaagtggattgaacaaggacgcatttccccagtacatccacaacatgctgtccacatctcgttctcggtttatcagaaataccaacgagagcggtgaagaagtcaccaccttttttgattatgattacggtgctccctgtcataaatttgacgtgaagcaaattggggcccaactcctgcctccgctctactcgctggtgttcatctttggttttgtgggcaacatgctggtcgtcctcatcttaataaactgcaaaaagctgaagtgcttgactgacatttacctgctcaacctggccatctctgatctgctttttcttattactctcccattgtgggctcactctgctgcaaatgagtgggtctttgggaatgcaatgtgcaaattattcacagggctgtatcacatcggttattttggcggaatcttcttcatcatcctcctgacaatcgatagatacctggctattgtccatgctgtgtttgctttaaaagccaggacggtcacctttggggtggtgacaagtgtgatcacctggttggtggctgtgtttgcttctgtcccaggaatcatctttactaaatgccagaaagaagattctgtttatgtctgtggcccttattttccacgaggatggaataatttccacacaataatgaggaacattttggggctggtcctgccgctgctcatcatggtcatctgctactcgggaatcctgaaaaccctgcttcggtgtcgaaacgagaagaagaggcatagggcagtgagagtcatcttcaccatcatgattgtttactttctcttctggactccctataatattgtcattctcctgaacaccttccaggaattcttcggcctgagtaactgtgaaagcaccagtcaactggaccaagccacgcaggtgacagagactcttgggatgactcactgctgcatcaatcccatcatctatgccttcgttggggagaagttcagaaggtatctctcggtgttcttccgaaagcacatcaccaagcgcttctgcaaacaatgtccagttttctacagggagacagtggatggagtgacttcaacaaacacgccttccactggggagcaggaagtctcggctggtttataaaacgaggagcagtttgattgttgtttataaagggagataacaatctgtatataacaacaaacttcaagggtttgttgaacaatagaaacctgtaaagcaggtgcccaggaacctcagggctgtgtgtactaatacagactatgtcacccaatgcatatccaacatgtgctcagggaataatccagaaaaactgtgggtagagactttgactctccagaaagctcatctcagctcctgaaaaatgcctcattaccttgtgctaatcctctttttctagtcttcataatttcttcactcaatctctgattctgtcaatgtcttgaaatcaagggccagctggaggtgaagaagagaatgtgacaggcacagatgaatgggagtgagggatagtggggtcagggctgagaggagaaggagggagacatgagcatggctgagcctggacaaagacaaaggtgagcaaagggctcacgcattcagccaggagatgatactggtccttagccccatctgccacgtgtatttaaccttgaagggttcaccaggtcagggagagtttgggaactgcaataacctgggagttttggtggagtccgatgattctcttttgcataagtgcatgacatatttttgctttattacagtttatctatggcacccatgcaccttacatttgaaatctatgaaatatcatgctccattgttcagatgcttcttaggccacatccccctgtctaaaaattcagaaaatttttgtttataaaagatgcattatctatgatatgctaatatatgtatatgcaatata

SEQ ID NO: 44031 - DNA, 366 bp, Artificial Sequence
  derived and/or modified sequence
atgctgagcaccagcagaagcagattcatcagaaacaccaacgagagcggcgaggaggtgaccaccttcttcgactacgactacggcgccccctgccacaagttcgacgtgaagcagatcggcgcccagctgctgccccccctgtacagcctggtgttcatcttcggcttcgtgggcaacatgctggtggtgctgatcctgatcaactgcaagaagctgaagtgcctgaccgacatctacctgctgaacctggccatcagcgacctgctgttcctgatcaccctgcccctgtgggcccacagcgccgccaacgagtgggtgttcggcaacgccatgtgcaagctgttcaccggcctgtaccactag

SEQ ID NO: 44032 - DNA, 1083 bp, Artificial Sequence
  derived and/or modified sequence
atgctgagcaccagcagaagcagattcatcagaaacaccaacgagagcggcgaggaggtgaccaccttcttcgactacgactacggcgccccctgccacaagttcgacgtgaagcagatcggcgcccagctgctgccccccctgtacagcctggtgttcatcttcggcttcgtgggcaacatgctggtggtgctgatcctgatcaactgcaagaagctgaagtgcctgaccgacatctacctgctgaacctggccatcagcgacctgctgttcctgatcaccctgcccctgtgggcccacagcgccgccaacgagtgggtgttcggcaacgccatgtgcaagctgttcaccggcctgtaccacatcggctacttcggcggcatcttcttcatcatcctgctgaccatcgacagatacctggccatcgtgcacgccgtgttcgccctgaaggccagaaccgtgaccttcggcgtggtgaccagcgtgatcacctggctggtggccgtgttcgccagcgtgcccggcatcatcttcaccaagtgccagaaggaggacagcgtgtacgtgtgcggcccctacttccccagaggctggaacaacttccacaccatcatgagaaacatcctgggcctggtgctgcccctgctgatcatggtgatctgctacagcggcatcctgaagaccctgctgagatgcagaaacgagaagaagagacacagagccgtgagagtgatcttcaccatcatgatcgtgtacttcctgttctggaccccctacaacatcgtgatcctgctgaacaccttccaggagttcttcggcctgagcaactgcgagagcaccagccagctggaccaggccacccaggtgaccgagaccctgggcatgacccactgctgcatcaaccccatcatctacgccttcgtgggcgagaagttcagaagatacctgagcgtgttcttcagaaagcacatcaccaagagattctgcaagcagtgccccgtgttctacagagagaccgtggacggcgtgaccagcaccaacacccccagcaccggcgagcaggaggtgagcgccggcctgtag

SEQ ID NO: 44033 - protein, 456 aa, Artificial Sequence
  derived and/or modified sequence
MAFAETYPAASSLPNGDCGRPRARPGGNRVTVVLGAQWGDEGKGKVVDLLAQDADIVCRCQGGNNAGHTVVVDSVEYDFHLLPSGIINPNVTAFIGNGVVIHLPGLFEEAEKNVQKGKGLEGWEKRLIISDRAHIVFDFHQAADGIQEQQRQEQAGKNLGTTKKGIGPVYSSKAARSGLRMCDLVSDFDGFSERFKVLANQYKSIYPTLEIDIEGELQKLKGYMEKIKPMVRDGVYFLYEALHGPPKKILVEGANAALLDIDFGTYPFVTSSNCTVGGVCTGLGMPPQNVGEVYGVVKAYTTRVGIGAFPTEQDNEIGELLQTRGREFGVTTGRKRRCGWLDLVLLKYAHMINGFTALALTKLDILDMFTEIKVGVAYKLDGEIIPHIPANQEVLNKVEVQYKTLPGWNTDISNARAFKELPVNAQNYVRFIEDELQIPVKWIGVGKSRESMIQLF

SEQ ID NO: 44034 - protein, 435 aa, Artificial Sequence
  derived and/or modified sequence
MAFAETYPAASSLPNGDCDEGKGKVVDLLAQDADIVCRCQGGNNAGHTVVVDSVEYDFHLLPSGIINPNVTAFIGNGVVIHLPGLFEEAEKNVQKGKGLEGWEKRLIISDRAHIVFDFHQAADGIQEQQRQEQAGKNLGTTKKGIGPVYSSKAARSGLRMCDLVSDFDGFSERFKVLANQYKSIYPTLEIDIEGELQKLKGYMEKIKPMVRDGVYFLYEALHGPPKKILVEGANAALLDIDFGTYPFVTSSNCTVGGVCTGLGMPPQNVGEVYGVVKAYTTRVGIGAFPTEQDNEIGELLQTRGREFGVTTGRKRRCGWLDLVLLKYAHMINGFTALALTKLDILDMFTEIKVGVAYKLDGEIIPHIPANQEVLNKVEVQYKTLPGWNTDISNARAFKELPVNAQNYVRFIEDELQIPVKWIGVGKSRESMIQLF

SEQ ID NO: 44035 - DNA, 1371 bp, Artificial Sequence
  derived and/or modified sequence
atggccttcgccgagacttaccccgcagccagcagcctgccgaatggggattgtggaaggcctcgggcgagacctggcggaaatagggtgacggtggtcctaggtgcgcagtggggtgacgaagggaaagggaaggtggtcgacctacttgcacaggacgccgacatagtgtgcaggtgccagggggggaacaatgccgggcatacagtcgtagtggatagtgtagagtatgattttcatctgcttccctccgggatcataaaccctaatgtcaccgcattcattggtaacggtgtggttatccacctccctggcctttttgaggaagctgagaagaatgttcagaagggtaaggggttggagggttgggaaaagcgtctgatcataagcgacagagcgcacatcgtctttgactttcatcaggctgcggatggaatacaggaacagcagcggcaggaacaggccggcaagaacttgggaaccacaaaaaagggtatcggccctgtctactcttccaaggccgcaaggagcggactcagaatgtgcgatttggtgagcgacttcgacggcttttccgagcgctttaaagtgctggctaaccagtacaagagtatataccctaccttggaaatagatattgaaggcgaactccaaaaactcaagggttatatggagaagatcaagccaatggtacgggatggagtctacttcttgtacgaggccctgcacggtccccctaagaagattctagtcgagggggccaacgccgcactgctggatatcgattttggaacttacccttttgtcacatctagcaactgtacagtcggcggcgtttgcactggactcgggatgccacctcaaaatgtaggggaggtctatggggtggtcaaggcctacaccacaagagttggcatcggcgcattccccactgaacaggacaatgaaatcggcgaactattgcaaacccgtggtcgagagtttggtgttaccacggggagaaaaagaagatgcggttggctggacctggtgctgcttaaatatgcccatatgattaacgggttcaccgccctcgccctcacaaagctcgacatattagatatgtttaccgaaataaaggtgggggtggcttacaagctggacggcgaaatcattcctcacatccctgcaaatcaggaggtgctgaacaaagtggaggtccagtacaaaaccctgccaggatggaatactgacattagcaacgcgagggcattcaaggagctgcctgtgaatgcacagaattatgtaagatttatcgaggatgagctccaaatccctgtgaagtggattggtgtggggaaatcccgggagagtatgattcagttgttctag

SEQ ID NO: 44036 - DNA, 1308 bp, Artificial Sequence
  derived and/or modified sequence
atggcctttgccgagacgtatccagcagcctcgagcctccctaatggggattgcgatgagggcaaagggaaagtcgtggatctcctggctcaagatgccgacatcgtatgccggtgtcagggtgggaacaacgccggacacaccgtggtcgtcgactcagtcgagtatgatttccacctactgccctctggtattataaatcctaacgttacagccttcataggcaacggcgtggtcattcatctgcctggactttttgaggaggctgagaagaacgtacagaaaggaaaaggactggagggatgggaaaagaggctgattatctccgatcgagcccatattgtctttgattttcatcaagctgctgacggaattcaagaacaacaaaggcaggagcaagcaggcaagaatttggggacaacaaaaaagggcattggccccgtgtactccagcaaggccgccaggagcgggctgaggatgtgcgatctggtgagcgacttcgatggtttcagcgagcgcttcaaagtactcgccaatcagtacaaaagtatctatccaaccctggagatcgacatcgaaggggaactacagaagcttaaaggctatatggagaaaatcaaacccatggtgagggatggggtgtattttctgtacgaagcgctgcatgggcccccgaagaagattctggttgaaggagctaacgcagcgttattggatatcgatttcggcacatacccttttgtgacctcatctaattgcacagtcgggggcgtgtgtacagggcttggcatgccccctcagaacgtgggagaggtttatggagtggtgaaagcctataccacccgcgtgggtattggcgcattccccacagaacaagataatgagattggggagctcctgcaaacaaggggacgggagtttggggttaccaccggcagaaagaggcgttgtggctggctggacttggttctcttaaagtacgcccatatgatcaatggtttcaccgcactcgccttgacgaaattggatatccttgacatgtttactgaaatcaaggtcggagtggcgtataagctggacggcgagattatcccccacatcccagcgaaccaggaagtgctgaacaaggtcgaagtgcaatataaaacactgccaggatggaacactgacataagtaacgcccgggccttcaaggagctcccagttaatgcccagaactatgtgcggtttatcgaggatgaattgcagatccccgtgaagtggatcggcgtcggcaagtcaagagaatcaatgatccaactattctag

SEQ ID NO: 44037 - DNA, 2780 bp, Artificial Sequence
  derived and/or modified sequence
acgggagtggcgcgccaggccgcggaaggggcgtggcctcggtccggggtggcggccgttgccgccaccagggcctcttcctgcgggcggtgctgccgaggccggcctgcgcggggcagtcatggtacccccttgagcgggctgtggcggagagcggggcggggactggctggagggtggcggcccggcggggcgggggcggggccggcctctggctccttcttcctctgcatgtggctggcggccgcagagcagttcagttcgctcactcctcgccggccgcctctccttcgggctctcctcgcgtcactggagccatggcgttcgccgagacctacccggcggcatcctccctgcccaacggcgattgcggccgccccagggcgcggcccggaggaaaccgggtgacggtggtgctcggtgcgcagtggggcgacgaaggcaaagggaaggtggtggacctgctggcgcaggacgccgacatcgtgtgccgctgccagggaggaaataatgctggccatacagttgttgtggattctgtggaatatgattttcatctcttacccagtggaataattaatccaaatgtcactgcattcattggaaatggtgtggtaattcatctacctggattgtttgaagaagcagagaaaaatgttcaaaaaggaaaaggactagaaggctgggaaaaaaggcttattatatctgacagagctcatattgtatttgattttcatcaagcagctgatggtatccaggaacaacagagacaagaacaagcaggaaaaaatttgggtacaacaaaaaagggcattggcccagtttattcgtccaaagctgctcggagtggactcaggatgtgcgaccttgtttctgactttgatggcttctctgagaggtttaaagttctagctaaccaatacaaatctatataccccactttggaaatagacattgaaggtgaattacaaaaactcaagggttatatggaaaagattaaaccaatggtgagagatggagtttattttctatatgaggccctacatggaccaccaaagaaaatcttggtagaaggtgcaaatgcagcactattagatattgattttgggacttacccttttgtaacctcttcaaattgtactgttggaggtgtttgtactggtttgggtatgccacctcaaaatgttggagaagtgtatggagttgtgaaagcttatacaactagagttggtattggtgcctttcctacagagcaagacaatgaaattggagaattattacaaacaaggggtagagagtttggtgtaactactggaaggaaaagaagatgtggctggttggacctcgttttgctcaaatatgctcatatgatcaatggatttactgcgttggcacttaccaagttggatattttggacatgtttacggaaatcaaagttggagttgcttacaagttagatggtgaaatcatacctcatatcccagcaaaccaagaagtcttaaataaagttgaagttcaatataagactctcccaggatggaacacagacatatcaaatgcaagggcgtttaaagaactacctgttaatgcacaaaactatgttcgatttattgaagatgagcttcaaattccagttaagtggattggtgttggtaaatccagagaatctatgattcaactcttttaatgattgccagtaatgcaagaaacactccttgagagggaggggaaaagactttcttaaatatttcatttatgacctgcaaattcaagaataaagacactgaagtaagtttgaagccctacagttgtttccagtcttttcagatggatgcctactgtggagattaactttggcatattccagtgtcagctttctttagctggaattgccaaatcatttgttgctcctgctgctctcatggtgccacgttttttttttcaatgtttagtaatagtataatccatgttgtttgatatcaaaagtagaattacttttaatgtagtttttcttcattattgtcattgcgtgttcttaagttttacccctattagatggtaagaacaattaatgcagttttgcacaaatatttttacattctgatcattcagttctgtcattgtaatctttgttgttagaaacaaatgatgaaaacataggggttctgtaaacttttgtaatgctatgaattctgtttaaattttgggctgtctattttctgctgaaaccatgcaaaattgagctttggtggggctgggagggggttatgtattcatgggacctttaatttgtacagaacacagaacttatttctgtcagttatttaatacattgaaaatttagtgaaatgttcaaagagaatagatgtttcccaaaacaacaatctttatgttaaaaatagtcattaaaagatctgttgtaatatatggtggatatttttctttaatttcaaacattacctctgaaatgtgtatcttttcttttttatcttaccattaattttaaatctagtggattggttttcaacatcgtgcctgccgatatgcctacagaatcatctgtaagtgtcaaaatgaacccacgttgttagccataattttgattatgcctttatttctcctttcttgaaaaaaaaaaggtgttattttgacaattaggcataacattgttttgtagattatcttttaatgaactattttaaatgttaaattaggtgccacttaaatttattttattacaccatgaatagctgattaaaagaaccaaatatttctagta

SEQ ID NO: 44038 - DNA, 2399 bp, Artificial Sequence
  derived and/or modified sequence
atggcgttcgccgagacctacccggcggcatcctccctgcccaacggcgattgcgacgaaggcaaagggaaggtggtggacctgctggcgcaggacgccgacatcgtgtgccgctgccagggaggaaataatgctggccatacagttgttgtggattctgtggaatatgattttcatctcttacccagtggaataattaatccaaatgtcactgcattcattggaaatggtgtggtaattcatctacctggattgtttgaagaagcagagaaaaatgttcaaaaaggaaaaggactagaaggctgggaaaaaaggcttattatatctgacagagctcatattgtatttgattttcatcaagcagctgatggtatccaggaacaacagagacaagaacaagcaggaaaaaatttgggtacaacaaaaaagggcattggcccagtttattcgtccaaagctgctcggagtggactcaggatgtgcgaccttgtttctgactttgatggcttctctgagaggtttaaagttctagctaaccaatacaaatctatataccccactttggaaatagacattgaaggtgaattacaaaaactcaagggttatatggaaaagattaaaccaatggtgagagatggagtttattttctatatgaggccctacatggaccaccaaagaaaatcttggtagaaggtgcaaatgcagcactattagatattgattttgggacttacccttttgtaacctcttcaaattgtactgttggaggtgtttgtactggtttgggtatgccacctcaaaatgttggagaagtgtatggagttgtgaaagcttatacaactagagttggtattggtgcctttcctacagagcaagacaatgaaattggagaattattacaaacaaggggtagagagtttggtgtaactactggaaggaaaagaagatgtggctggttggacctcgttttgctcaaatatgctcatatgatcaatggatttactgcgttggcacttaccaagttggatattttggacatgtttacggaaatcaaagttggagttgcttacaagttagatggtgaaatcatacctcatatcccagcaaaccaagaagtcttaaataaagttgaagttcaatataagactctcccaggatggaacacagacatatcaaatgcaagggcgtttaaagaactacctgttaatgcacaaaactatgttcgatttattgaagatgagcttcaaattccagttaagtggattggtgttggtaaatccagagaatctatgattcaactcttttaatgattgccagtaatgcaagaaacactccttgagagggaggggaaaagactttcttaaatatttcatttatgacctgcaaattcaagaataaagacactgaagtaagtttgaagccctacagttgtttccagtcttttcagatggatgcctactgtggagattaactttggcatattccagtgtcagctttctttagctggaattgccaaatcatttgttgctcctgctgctctcatggtgccacgttttttttttcaatgtttagtaatagtataatccatgttgtttgatatcaaaagtagaattacttttaatgtagtttttcttcattattgtcattgcgtgttcttaagttttacccctattagatggtaagaacaattaatgcagttttgcacaaatatttttacattctgatcattcagttctgtcattgtaatctttgttgttagaaacaaatgatgaaaacataggggttctgtaaacttttgtaatgctatgaattctgtttaaattttgggctgtctattttctgctgaaaccatgcaaaattgagctttggtggggctgggagggggttatgtattcatgggacctttaatttgtacagaacacagaacttatttctgtcagttatttaatacattgaaaatttagtgaaatgttcaaagagaatagatgtttcccaaaacaacaatctttatgttaaaaatagtcattaaaagatctgttgtaatatatggtggatatttttctttaatttcaaacattacctctgaaatgtgtatcttttcttttttatcttaccattaattttaaatctagtggattggttttcaacatcgtgcctgccgatatgcctacagaatcatctgtaagtgtcaaaatgaacccacgttgttagccataattttgattatgcctttatttctcctttcttgaaaaaaaaaaggtgttattttgacaattaggcataacattgttttgtagattatcttttaatgaactattttaaatgttaaattaggtgccacttaaatttattttattacaccatgaatagctgattaaaagaaccaaatatttctagt

SEQ ID NO: 44039 - DNA, 1371 bp, Artificial Sequence
  derived and/or modified sequence
atggcctttgctgagacctacccagctgccagcagcctgcccaatggagactgtggccggccccgggcccggcctgggggcaacagagtgacagtggtgctgggcgcccagtggggagatgagggcaagggcaaggtggtggacctgctggcccaggatgctgacatcgtgtgccgctgccagggcggcaacaatgccggccacacagtggtggtggacagcgtggagtatgacttccacctgctgcccagcggcatcatcaaccccaacgtgacagccttcatcggaaatggagtggtgatccacctgcccggcctgtttgaggaggccgagaagaatgtgcagaagggcaagggcctggagggctgggagaagaggctcatcatcagtgaccgggcccacatcgtgtttgacttccaccaggccgcagatggcatccaggagcagcagaggcaggagcaggccggcaagaacctgggcaccaccaagaagggcatcggccctgtgtacagcagcaaggccgcccggagcggcctgaggatgtgtgacctggtgtctgactttgatggcttcagcgagcgcttcaaggtgctggccaaccagtacaagagcatctaccccaccctggagattgatattgaaggagagctgcagaagctgaagggctacatggagaagatcaagcccatggtgagagatggagtgtacttcctgtatgaggccctgcacggcccccccaagaagatcctggtggagggcgccaatgctgccctgctggacatcgactttggcacctacccctttgtgaccagcagcaactgcaccgtgggcggcgtgtgcaccggcctgggcatgccaccccagaatgtgggggaggtgtatggagtggtgaaggcctacaccaccagggtgggcatcggggccttccccacagagcaggacaatgaaattggagagctgctgcagacccggggccgggagtttggagtgaccaccggcaggaagaggcgctgtggctggctggacctggtgctgctgaagtatgcccacatgatcaatggcttcaccgccctggccctgaccaagctggacatcctggacatgttcacagagatcaaggtgggcgtggcctacaagctggatggagagatcatcccccacatcccagccaaccaggaggtgctgaacaaggtggaggtgcagtacaagaccctgcccggctggaacacagacatcagcaatgcccgggccttcaaggagctgcctgtgaatgcccagaactacgtgcgcttcattgaagatgagctgcagatccctgtgaagtggattggagtgggcaagagccgggagagcatgatccagctgttctag

SEQ ID NO: 44040 - DNA, 1308 bp, Artificial Sequence
  derived and/or modified sequence
atggcctttgctgagacctacccagctgccagcagcctgcccaatggagactgtgatgagggcaagggcaaggtggtggacctgctggcccaggatgctgacatcgtgtgccgctgccagggcggcaacaatgccggccacacagtggtggtggacagcgtggagtatgacttccacctgctgcccagcggcatcatcaaccccaacgtgacagccttcatcggaaatggagtggtgatccacctgcccggcctgtttgaggaggccgagaagaatgtgcagaagggcaagggcctggagggctgggagaagaggctcatcatcagtgaccgggcccacatcgtgtttgacttccaccaggccgcagatggcatccaggagcagcagaggcaggagcaggccggcaagaacctgggcaccaccaagaagggcatcggccctgtgtacagcagcaaggccgcccggagcggcctgaggatgtgtgacctggtgtctgactttgatggcttcagcgagcgcttcaaggtgctggccaaccagtacaagagcatctaccccaccctggagattgacatcgagggggagctgcagaagctgaagggctacatggagaagatcaagcccatggtgagagatggagtgtacttcctgtatgaggccctgcacggcccccccaagaagatcctggtggagggcgccaatgctgccctgctggacatcgactttggcacctacccctttgtgaccagcagcaactgcaccgtgggcggcgtgtgcaccggcctgggcatgccaccccagaatgtgggggaggtgtatggagtggtgaaggcctacaccaccagggtgggcattggagccttccccacagagcaggacaatgagatcggggagctgctgcagacccggggccgggagtttggagtgaccactggaaggaagagaagatgtggctggctggacctggtgctgctgaagtatgcccacatgatcaatggcttcaccgccctggccctgaccaagctggacatcctggacatgttcacagagatcaaggtgggcgtggcctacaagctggatggagagatcatcccccacatcccagccaaccaggaggtgctgaacaaggtggaggtgcagtacaagaccctgcccggctggaacacagacatcagcaatgcccgggccttcaaggagctgcctgtgaatgcccagaactacgtgcgcttcattgaagatgagctgcagatccctgtgaagtggattggagtgggcaagagccgggagagcatgatccagctgttctag

SEQ ID NO: 44041 - DNA, 1371 bp, Artificial Sequence
  derived and/or modified sequence
atggccttcgccgagacctaccccgccgccagcagcctgcccaacggggactgcgggcgcccccgggcccgacctggagggaatagagttacagtggtgctgggggcccaatggggggacgagggaaagggcaaggtagtcgacttactcgcacaggacgcagacattgtgtgccggtgtcaggggggaaataacgcggggcatacagtcgttgtggatagcgttgagtatgacttccacttactcccttctggcattatcaatcctaacgtgacagcatttattggtaacggggtggtgatccatctgcccggcttgtttgaggaagccgagaagaacgtgcagaagggcaaaggactcgaaggctgggagaagcggctgattatatcagacagggcccacatcgtctttgactttcaccaggctgcagatgggattcaggagcaacagaggcaggagcaagctggaaaaaatctggggacgactaaaaagggcatcggccctgtttattccagtaaggcagcacgatctgggttgcgaatgtgcgacctggttagcgactttgacggcttcagcgaaaggtttaaggtccttgccaatcaatataaaagcatttacccaaccctagagatcgatatcgaaggtgagttgcagaagctgaagggatatatggagaagattaagccgatggtgagagacggcgtgtactttctctacgaagcactccacggccctcctaagaaaattctcgtggagggagccaacgctgccctcctagacattgatttcggaacttacccttttgtaacatccagtaattgcaccgtcggtggcgtgtgcacaggcctgggaatgcctcctcagaatgttggggaagtgtatggtgtggtgaaggcatataccacacgagtcggcatcggggcctttccaacggagcaggacaacgagatcggcgaactgctgcaaactcggggaagagagtttggggtcacaaccggcaggaaacgtagatgcggttggctcgatttagtgctcctgaagtatgcacacatgatcaatgggtttacggccttggcgttgaccaagttggacattctggacatgtttactgaaattaaggtcggggttgcttataaactcgatggagagatcatcccacatatccccgccaaccaggaggtgctgaataaggtggaggtgcagtacaagactttgcccggctggaacactgatatctctaacgccagggctttcaaggaactgccagtaaatgcccagaactatgtgaggttcatcgaggacgaactccaaattcctgtgaaatggattggagtcggcaaaagtcgggagtccatgatacagttgttttag

SEQ ID NO: 44042 - DNA, 1308 bp, Artificial Sequence
  derived and/or modified sequence
atggccttcgccgagacctaccccgccgccagcagcctgcccaacggagattgcgacgaagggaaaggaaaagtggtggacttattggcccaggacgcggacattgtttgccggtgtcaaggaggcaacaacgccggacacaccgtggtggtagacagcgtcgaatacgacttccatcttctgccgtccgggatcatcaatcccaacgtgacagcttttatcggtaacggcgtggtaattcatctgcccggacttttcgaagaggcagaaaagaacgtgcagaaaggcaaaggattggaggggtgggagaaacggctgattatctccgaccgagcccatattgttttcgactttcaccaggccgccgacgggatccaagaacaacagcggcaggaacaagcaggtaagaatctgggcacaactaaaaaggggatcggcccggtgtactcgtccaaggccgccaggtcaggcctccgcatgtgtgaccttgtctcagattttgatggattctccgaaagattcaaagtgcttgctaatcaatacaaatccatttatcctaccctagagattgacatcgagggggagcttcagaaactgaagggttatatggagaagatcaaacccatggtgagggatggcgtttacttcctatacgaagctctgcacggaccgccaaagaaaatcctggtagagggagctaatgctgccctgcttgatattgattttggaacctatcccttcgtgacgagcagtaattgtaccgtcggcggggtgtgtaccggcctcgggatgcctcctcagaatgtcggcgaggtctacggggtagtgaaggcatacaccaccagagtcggcatcggggcttttcctactgagcaggacaatgagataggcgagctcctgcagacccggggccgggagtttggtgtgaccacgggccggaagcgccgctgcggttggctggatcttgtcttactgaagtatgctcacatgataaatggcttcaccgccctcgcactcaccaaattagacatcttagacatgttcacggagatcaaggttggcgtcgcctataaactggatggggagatcattccgcacattcccgccaatcaggaagtacttaacaaagtggaggtgcaatacaaaacgctgccagggtggaataccgatatcagcaacgcacgggcttttaaggaactgcctgtaaacgctcaaaactatgtgcgcttcatcgaagacgagctgcagataccagtgaagtggattggggtggggaaaagccgcgagtccatgatccagcttttctag

SEQ ID NO: 44043 - DNA, 1371 bp, Artificial Sequence
  derived and/or modified sequence
atggcgtttgctgaaacataccccgcagcttcctcactgccaaacggtgactgcggacgaccccgagctcgaccaggtggaaatagggtgacagttgtcctaggcgctcagtggggtgacgaggggaagggcaaagtcgtggatctgctcgcacaagatgccgacatcgtctgtcgctgtcaaggaggcaataatgccggacatacagtggttgtggattccgtagagtatgactttcacctgctgccgtccggtattatcaaccctaacgtgaccgctttcatcggaaatggggtcgtcattcatctgccaggactgtttgaagaggctgagaaaaacgtccaaaaaggcaagggactggagggctgggaaaagaggcttattatttctgatcgggctcacattgtgttcgactttcaccaagcagcggatggaatccaggagcagcagcggcaagaacaggccggtaagaatctgggtactacaaaaaagggcatcggtcccgtatactcatctaaagctgccaggtcggggctgcggatgtgcgacctggtgtctgattttgatggatttagtgagcggtttaaggtactcgccaatcagtataagtcaatttaccccacattggaaatcgatatagagggtgagctgcaaaaactgaagggctatatggagaaaatcaagccaatggtgcgggatggcgtctatttcctttacgaggcccttcacggaccccctaagaagattctagtcgagggcgcaaacgctgcactgctcgatatagactttggcacgtaccccttcgtgacctcatcgaattgcaccgtgggcggagtgtgtacaggccttggcatgcctccgcagaatgtgggggaagtgtatggtgtggttaaagcctataccacccgcgtagggattggtgcattccctactgagcaggacaatgagattggcgagctgctccagaccagagggagggagttcggcgtaaccacggggcgaaagcgccgatgcggctggttggacctcgttcttctgaaatatgcacatatgattaacgggtttacggcactcgcactcaccaagcttgatattctcgacatgtttacggaaattaaggttggggtggcctacaagctcgatggggaaattatacctcacatccccgctaaccaggaggtactaaataaagttgaagtccaatataagaccctccccggttggaatacagacatctccaatgctcgggcttttaaggaactaccagtgaatgcccaaaactacgtgcggttcattgaagatgaacttcaaatccctgtgaaatggattggagtaggcaaatcccgcgagagtatgatccagctcttctag

SEQ ID NO: 44044 - DNA, 1308 bp, Artificial Sequence
  derived and/or modified sequence
atggctttcgcagaaacttacccagccgctagctctttgccaaatggtgattgcgatgagggcaaagggaaggtggtggacctcctggcacaggacgctgacatcgtatgcaggtgccaggggggaaataacgcagggcacacagtagttgtggactcagtcgaatacgactttcatttactgccctcaggcattatcaaccccaacgttactgccttcattggaaatggggtcgtgatacacctacccggtttgtttgaggaggcggagaaaaatgtgcagaaagggaagggtctcgaggggtgggagaagagactaattattagtgaccgcgcacacatcgtgtttgactttcaccaagcagctgatgggatacaagagcagcaaagacaggagcaagccggaaaaaatttaggaaccaccaagaaagggataggacctgtgtactctagtaaggctgcgagatccggactgaggatgtgcgatttggtttcggattttgacggattcagtgagcgattcaaggtgcttgccaaccagtacaagtctatttacccaacactcgaaatcgacatagagggtgaactgcagaagcttaagggttacatggagaaaattaaacctatggtgcgagacggggtgtattttttgtacgaagcattacacgggccacctaaaaaaatccttgtcgaaggcgctaatgctgccctcctcgacattgattttggcacctacccctttgtgacttcatccaactgtaccgtgggcggagtgtgcaccggcctcggaatgccccctcagaacgtgggcgaagtgtatggggttgtcaaagcttacacaactcgagtgggaatcggtgccttccccacggaacaggacaacgagatcggagagctgttacagacacgaggccgagaatttggggtgacaacgggacggaaacggagatgtggatggctcgacttagtactattaaagtatgcacatatgattaatggattcaccgcgttggctctgaccaaactggatatcctggatatgtttaccgagattaaagttggtgtggcctacaaacttgacggcgaaatcatcccccacattcctgctaaccaggaagtattgaataaggtggaagtgcagtacaaaacacttcctggttggaacaccgatatctctaacgccagagcattcaaggagctgcccgtcaacgcacaaaattacgtgagattcattgaggatgagctgcagatccccgtgaaatggatcggcgtgggcaagagtcgcgagtcaatgatccaactcttttag

SEQ ID NO: 44045 - DNA, 1371 bp, Artificial Sequence
  derived and/or modified sequence
atggccttcgccgagacctaccccgccgccagcagcctgcccaacggcgactgcggcagacccagagccagacccggcggcaacagagtgaccgtggtgctgggcgcccagtggggcgacgagggcaagggcaaggtggtggacctgctggcccaggacgccgacatcgtgtgcagatgccagggcggcaacaacgccggccacaccgtggtggtggacagcgtggagtacgacttccacctgctgcccagcggcatcatcaaccccaacgtgaccgccttcatcggcaacggcgtggtgatccacctgcccggcctgttcgaggaggccgagaagaacgtgcagaagggcaagggcctggagggctgggagaagagactgatcatcagcgacagagcccacatcgtgttcgacttccaccaggccgccgacggcatccaggagcagcagagacaggagcaggccggcaagaacctgggcaccaccaagaagggcatcggccccgtgtacagcagcaaggccgccagaagcggcctgagaatgtgcgacctggtgagcgacttcgacggcttcagcgagagattcaaggtgctggccaaccagtacaagagcatctaccccaccctggagatcgacatcgagggcgagctgcagaagctgaagggctacatggagaagatcaagcccatggtgagagacggcgtgtacttcctgtacgaggccctgcacggcccccccaagaagatcctggtggagggcgccaacgccgccctgctggacatcgacttcggcacctaccccttcgtgaccagcagcaactgcaccgtgggcggcgtgtgcaccggcctgggcatgcccccccagaacgtgggcgaggtgtacggcgtggtgaaggcctacaccaccagagtgggcatcggcgccttccccaccgagcaggacaacgagatcggcgagctgctgcagaccagaggcagagagttcggcgtgaccaccggcagaaagagaagatgcggctggctggacctggtgctgctgaagtacgcccacatgatcaacggcttcaccgccctggccctgaccaagctggacatcctggacatgttcaccgagatcaaggtgggcgtggcctacaagctggacggcgagatcatcccccacatccccgccaaccaggaggtgctgaacaaggtggaggtgcagtacaagaccctgcccggctggaacaccgacatcagcaacgccagagccttcaaggagctgcccgtgaacgcccagaactacgtgagattcatcgaggacgagctgcagatccccgtgaagtggatcggcgtgggcaagagcagagagagcatgatccagctgttctag

SEQ ID NO: 44046 - DNA, 1308 bp, Artificial Sequence
  derived and/or modified sequence
atggccttcgccgagacctaccccgccgccagcagcctgcccaacggcgactgcgacgagggcaagggcaaggtggtggacctgctggcccaggacgccgacatcgtgtgcagatgccagggcggcaacaacgccggccacaccgtggtggtggacagcgtggagtacgacttccacctgctgcccagcggcatcatcaaccccaacgtgaccgccttcatcggcaacggcgtggtgatccacctgcccggcctgttcgaggaggccgagaagaacgtgcagaagggcaagggcctggagggctgggagaagagactgatcatcagcgacagagcccacatcgtgttcgacttccaccaggccgccgacggcatccaggagcagcagagacaggagcaggccggcaagaacctgggcaccaccaagaagggcatcggccccgtgtacagcagcaaggccgccagaagcggcctgagaatgtgcgacctggtgagcgacttcgacggcttcagcgagagattcaaggtgctggccaaccagtacaagagcatctaccccaccctggagatcgacatcgagggcgagctgcagaagctgaagggctacatggagaagatcaagcccatggtgagagacggcgtgtacttcctgtacgaggccctgcacggcccccccaagaagatcctggtggagggcgccaacgccgccctgctggacatcgacttcggcacctaccccttcgtgaccagcagcaactgcaccgtgggcggcgtgtgcaccggcctgggcatgcccccccagaacgtgggcgaggtgtacggcgtggtgaaggcctacaccaccagagtgggcatcggcgccttccccaccgagcaggacaacgagatcggcgagctgctgcagaccagaggcagagagttcggcgtgaccaccggcagaaagagaagatgcggctggctggacctggtgctgctgaagtacgcccacatgatcaacggcttcaccgccctggccctgaccaagctggacatcctggacatgttcaccgagatcaaggtgggcgtggcctacaagctggacggcgagatcatcccccacatccccgccaaccaggaggtgctgaacaaggtggaggtgcagtacaagaccctgcccggctggaacaccgacatcagcaacgccagagccttcaaggagctgcccgtgaacgcccagaactacgtgagattcatcgaggacgagctgcagatccccgtgaagtggatcggcgtgggcaagagcagagagagcatgatccagctgttctag

SEQ ID NO: 44047 - protein, 549 aa, Artificial Sequence
  derived and/or modified sequence
MMCLECASAAAGGAEEEEADAERRRRRRGAQRGAGGSGCCGARGAGGAGVSAAGDEVQTLSGSVRRAPTGPPGTPGTPGCAATAKGPGAQQPKPASLGRGRGAAAAILSLGNVLNYLDRYTVAGVLLDIQQHFGVKDRGAGLLQSVFICSFMVAAPIFGYLGDRFNRKVILSCGIFFWSAVTFSSSFIPQQYFWLLVLSRGLVGIGEASYSTIAPTIIGDLFTKNTRTLMLSVFYFAIPLGSGLGYITGSSVKQAAGDWHWALRVSPVLGMITGTLILILVPATKRGHADQLGDQLKARTSWLRDMKALIRNRSYVFSSLATSAVSFATGALGMWIPLYLHRAQVVQKTAETCNSPPCGAKDSLIFGAITCFTGFLGVVTGAGATRWCRLKTQRADPLVCAVGMLGSAIFICLIFVAAKSSIVGAYICIFVGETLLFSNWAITADILMYVVIPTRRATAVALQSFTSHLLGDAGSPYLIGFISDLIRQSTKDSPLWEFLSLGYALMLCPFVVVLGGMFFLATALFFVSDRARAEQQVNQLAMPPASVKV

SEQ ID NO: 44048 - DNA, 1650 bp, Artificial Sequence
  derived and/or modified sequence
atgatgtgcctggagtgcgccagcgccgccgccggcggcgccgaggaggaggaggccgacgccgagagaagaagaagaagaagaggcgcccagagaggcgccggcggcagcggctgctgcggcgccagaggcgccggcggcgccggcgtgagcgccgccggcgacgaggtgcagaccctgagcggcagcgtgagaagagcccccaccggcccccccggcacccccggcacccccggctgcgccgccaccgccaagggccccggcgcccagcagcccaagcccgccagcctgggcagaggcagaggcgccgccgccgccatcctgagcctgggcaacgtgctgaactacctggacagatacaccgtggccggcgtgctgctggacatccagcagcacttcggcgtgaaggacagaggcgccggcctgctgcagagcgtgttcatctgcagcttcatggtggccgcccccatcttcggctacctgggcgacagattcaacagaaaggtgatcctgagctgcggcatcttcttctggagcgccgtgaccttcagcagcagcttcatcccccagcagtacttctggctgctggtgctgagcagaggcctggtgggcatcggcgaggccagctacagcaccatcgcccccaccatcatcggcgacctgttcaccaagaacaccagaaccctgatgctgagcgtgttctacttcgccatccccctgggcagcggcctgggctacatcaccggcagcagcgtgaagcaggccgccggcgactggcactgggccctgagagtgagccccgtgctgggcatgatcaccggcaccctgatcctgatcctggtgcccgccaccaagagaggccacgccgaccagctgggcgaccagctgaaggccagaaccagctggctgagagacatgaaggccctgatcagaaacagaagctacgtgttcagcagcctggccaccagcgccgtgagcttcgccaccggcgccctgggcatgtggatccccctgtacctgcacagagcccaggtggtgcagaagaccgccgagacctgcaacagccccccctgcggcgccaaggacagcctgatcttcggcgccatcacctgcttcaccggcttcctgggcgtggtgaccggcgccggcgccaccagatggtgcagactgaagacccagagagccgaccccctggtgtgcgccgtgggcatgctgggcagcgccatcttcatctgcctgatcttcgtggccgccaagagcagcatcgtgggcgcctacatctgcatcttcgtgggcgagaccctgctgttcagcaactgggccatcaccgccgacatcctgatgtacgtggtgatccccaccagaagagccaccgccgtggccctgcagagcttcaccagccacctgctgggcgacgccggcagcccctacctgatcggcttcatcagcgacctgatcagacagagcaccaaggacagccccctgtgggagttcctgagcctgggctacgccctgatgctgtgccccttcgtggtggtgctgggcggcatgttcttcctggccaccgccctgttcttcgtgagcgacagagccagagccgagcagcaggtgaaccagctggccatgccccccgccagcgtgaaggtgtag

SEQ ID NO: 44049 - DNA, 1650 bp, Artificial Sequence
  derived and/or modified sequence
atgatgtgcctggagtgcgccagtgccgcagccgggggggcagaagaagaggaggcggatgctgagcgacggcggcgaagacgaggagcccagcgaggcgcaggaggctcaggctgttgcggtgccaggggcgccggcggggccggagtaagcgcggccggcgacgaagtgcagactctttccggctccgtccgtcgcgctccaaccgggcctccaggcacgccagggacaccagggtgtgccgcaaccgctaaaggaccaggagctcaacagcctaagcccgcctcactaggtcgtgggcgcggcgccgccgccgccatattgtcactggggaacgtcctcaattatttagacaggtataccgtcgcaggggtgcttttggatatccaacaacactttggagtcaaagaccggggggcaggccttctccaatctgtgttcatctgtagttttatggtggcagcacccatttttggctacctgggggacagattcaatcgaaaggtgatccttagttgcggtatctttttttggagcgcagtcaccttctctagttccttcattccacagcagtacttctggctgctggttctgagccgaggcctggtgggtatcggcgaggcttcatactcaacaatcgctccaaccataataggcgatctgtttaccaaaaacacgcgaaccctgatgctttctgtgttctattttgctataccactcggctccgggttggggtacataacaggttccagtgtgaaacaagccgccggcgattggcactgggccttgcgcgtgagtcccgtactgggcatgattactgggactttaatattgattcttgtcccagccacaaaacgggggcacgctgatcagttaggcgaccagttaaaagcccgtactagttggcttagagacatgaaagctctgattcgaaatagatcatatgtcttctcttctcttgccacaagcgctgtatcttttgccacgggtgccctgggaatgtggatacccttatatttgcaccgcgcacaggttgtgcagaaaaccgcagaaacttgcaactcccccccatgtggggcaaaagactccctgatctttggcgcaataacctgcttcacaggattcctcggggttgttacaggcgctggcgcaactaggtggtgccgcctcaaaacacagcgggcagatcctctggtgtgcgctgtgggcatgttgggaagcgcaatcttcatatgcctcattttcgtagcagccaagagctctatcgtgggtgcctacatatgcatttttgtgggtgagacactgttgtttagcaattgggccataacagctgacattctgatgtacgtcgtcattccaacacgtcgtgccactgcagtcgcgctccagagcttcacttctcacctgctcggagatgcggggtccccctatttgatcggttttattagtgacttaatcagacagtccactaaggattctcctctgtgggaattcctatcccttggttacgccctgatgctatgtccattcgtggtcgtgctcgggggcatgttctttcttgccacggcactgttttttgtgagcgacagggccagagccgaacagcaggtgaatcagttggcaatgcccccggcttcagttaaagtatag

SEQ ID NO: 44050 - DNA, 1650 bp, Artificial Sequence
  derived and/or modified sequence
atgatgtgcctggagtgtgccagcgctgctgctggaggagctgaggaggaggaggctgatgctgagaggagaagaagaagaagaggagcccagagaggagctgggggcagcggctgctgcggggcccggggagctggaggagctggggtgtctgctgctggagatgaggtgcagaccctgagcggctctgtgagaagagcccccactggacctcctggcaccccaggcaccccaggctgtgccgccacagccaagggccctggggcccagcagcccaagccagccagcctgggccggggcagaggagctgctgctgccatcctgagcctgggcaatgtgctgaactacctggaccgctacacagtggccggcgtgctgctggacatccagcagcactttggagtgaaggacagaggagctggcctgctgcagagcgtcttcatctgcagcttcatggtggccgcccccatcttcggctacctgggggaccgcttcaacaggaaggtgatcctgagctgtggcatcttcttctggagcgctgtgaccttcagcagcagcttcatcccccagcagtacttctggctgctggtgctgagccggggcctggtgggcattggagaggccagctacagcaccatcgcccccaccatcatcggggacctcttcaccaagaacaccaggaccctgatgctgagcgtcttctactttgccatccccctgggcagcggcctgggctacatcaccggcagctctgtgaagcaggccgccggggactggcactgggccctgcgggtgtcccctgtgctgggcatgatcaccggcaccctcatcctgatcctggtgcctgccaccaagaggggccatgctgaccagctgggggaccagctgaaggcccggacctcctggctgcgggacatgaaggccctgatccggaacagaagctatgtgttcagcagcctggccaccagcgctgtgtcctttgccactggagccctgggcatgtggatccccctgtacctgcaccgggcccaggtggtgcagaagacagctgagacctgcaacagccccccctgtggggccaaggacagcctcatctttggagccatcacctgcttcaccggcttcctgggcgtggtgactggagctggggccacccgctggtgccgcctgaagacccagagagctgaccccctggtgtgtgctgtgggcatgctgggcagcgccatcttcatctgcctgatctttgtggccgccaagagcagcatcgtgggcgcctacatctgcatctttgtgggggagaccctgctcttcagcaactgggccatcacagctgacatcctgatgtatgtggtgatccccacccggcgggccacagctgtggccctgcagagcttcaccagccacctgctgggagatgctggcagcccctacctgattggcttcatcagtgacctgatccggcagagcaccaaggacagccccctgtgggagttcctgagcctgggctacgccctgatgctgtgcccctttgtggtggtgctgggcggcatgttcttcctggccacagccctcttctttgtgtctgaccgggcccgggcagagcagcaggtgaaccagctggccatgcccccagcctctgtgaaggtgtag

SEQ ID NO: 44051 - DNA, 1650 bp, Artificial Sequence
  derived and/or modified sequence
atgatgtgcctggagtgcgccagcgccgccgccggcggcgccgaggaagaggaggccgatgcggaacgaaggcgaagaaggcggggtgcccagcggggggccggcgggtctggatgttgtggcgccagaggcgcgggcggcgctggggtcagcgctgcaggagacgaggtgcaaactctaagtgggagtgtgagacgggcacctaccggccccccaggcacccccggcacacctgggtgtgccgccaccgccaagggccccggcgcacagcaaccaaaacccgcctccctggggcgaggtcgaggcgccgctgcagccattctgagcttgggtaatgtactcaactatctagacaggtacaccgtggccggggttctgctagatatacagcagcattttggtgtcaaagaccgcggagcagggttgctgcagtccgtgttcatctgctcattcatggtggctgcccccatttttgggtacttgggtgacagattcaaccggaaggtgatcttatcatgcggcatttttttctggagtgccgtgacattcagttcgtcatttatcccacaacagtatttctggctcttagttttatcgagaggactggttggcatcggtgaggcctcttatagcacaatcgcacctacgatcatcggggatctgttcaccaagaatacccgcactcttatgttaagcgttttctactttgccattccactgggctcagggctgggatacattactggttcaagcgtgaagcaggccgcgggggactggcattgggcgctgcgggtgagtcccgttctgggaatgattactgggacgctgatactaatcttggtcccggcaaccaagagagggcacgcagaccagttgggagaccaactgaaagcacgcacgtcatggctccgggacatgaaggccctcatacgcaacaggtcgtacgtgtttagcagtctggcaaccagcgctgtcagctttgctactggggcactggggatgtggatccctctctacctccaccgagcccaggtcgtccagaaaactgcagagacatgtaatagccctccttgcggagccaaggattctctgatcttcggggcaataacctgctttacaggctttttaggagtggtgaccggagctggggccacccggtggtgtcggctgaaaactcaacgggctgatccactggtttgcgccgtgggaatgctgggatccgctatcttcatttgtctcatttttgtcgccgctaagagctctattgttggggcttatatctgcatctttgtgggggagactctgctgttcagcaattgggccatcacagccgatatcctgatgtatgtggtgattcctactagaagggccactgcagttgccctccagtccttcacgagtcaccttctaggtgacgctgggagcccatatctgatcggttttatttccgatctgatcaggcagtcaacaaaggacagccccttgtgggaatttttatctcttggttacgcgttgatgctgtgcccgttcgttgtggtgttgggcgggatgtttttcctggcaaccgcccttttttttgtttctgaccgcgccagagccgagcagcaggtgaatcagctagcaatgccgccggcatctgtgaaagtttag

SEQ ID NO: 44052 - DNA, 1650 bp, Artificial Sequence
  derived and/or modified sequence
atgatgtgcctggaatgtgcatcggcagccgcaggcggagccgaagaagaagaggcagatgctgagagacggcgacgtcgacgtggagctcagaggggagccggaggctctggctgctgtggagcccgaggcgctggaggggctggagtgagcgccgcaggcgacgaagtgcagactctgtctggatcagtaaggcgcgcaccaaccgggccaccagggacacccggaactcctgggtgcgcagccaccgctaagggccctggggcacaacagccaaaacccgcttccctgggcaggggacggggagctgccgctgccatattgtccctaggcaacgtattaaactacttagacaggtatacggtggccggagtgctgctcgatatccagcaacattttggagttaaggataggggggctgggcttctgcagagcgtctttatctgctcatttatggtggctgccccaatatttggctacctgggcgatagatttaacaggaaggtgattctgtcttgcggcattttcttttggtcagcggttacattcagcagctctttcatcccccaacagtacttttggctgctagtgttgtcccggggacttgtgggcatcggggaggcctcttattccacgattgccccaacgatcatcggagacctctttaccaagaatacccggactctcatgctgagcgtgttctattttgccatccccctcggcagcgggctgggctacatcacgggatctagcgtgaaacaagctgccggagattggcactgggcgctgagagtgtctcctgtcctgggcatgatcactggcactctcatcctgattctcgtgcccgctacaaagagggggcatgcagatcagttaggcgatcagctgaaggctcgtactagctggctgcgtgacatgaaggcactgatccgcaatagaagttacgtgttctcatcgttggctacttcagccgtctcatttgcaactggtgcccttggcatgtggattcctctctacttacatcgagcccaagtcgtgcagaagaccgccgaaacgtgcaactccccaccatgtggggcaaaggacagccttatttttggagccattacctgctttaccggcttcctcggcgtagtgaccggggctggggctaccaggtggtgccgcttgaaaacccagcgcgctgatcctctcgtttgtgctgtgggcatgctgggctctgccatctttatatgcttaatctttgtggctgctaagtctagtatcgtgggcgcatatatctgcatattcgtgggagaaacgctgctgttcagtaattgggcgatcacagctgacatcttgatgtacgtcgtgatccccacgagacgcgctaccgctgtggcgttgcaatccttcactagtcatcttctgggtgacgccggttctccctacctcatcggattcatttccgacctgattcgccagtctactaaagactcccccctttgggaattcttatcactgggctacgccctgatgctctgcccttttgtcgtggtacttggcggtatgttctttcttgccactgccttatttttcgtgtctgatcgagccagggccgagcaacaagtgaaccagctcgcaatgccaccagcctccgtgaaagtttag

SEQ ID NO: 44053 - DNA, 4349 bp, Artificial Sequence
  derived and/or modified sequence
gggcggggccgggccgcagctgtcagagccgcggcggcgaacgaggcgcagcgagctgagcggtggcagcgccgcagccggggccggagcgcaggagccgacggggcccgaccaggatggtgcagtggcggctccgcggcgcacgcacgcgctgagcgggcccagcctgggccccgcgccccccgcgccccccgccgccccgatccgggccggcatgatgtgcctggaatgcgcctcggcggcggcgggcggcgcggaggaggaggaggcggacgcggagcggcggcgccggcgccggggggcgcagcgaggggctggcggtagcggttgctgcggggcgcggggcgcgggcggcgctggagtctcggccgcgggcgatgaggtgcagacgctgtcgggcagcgtaaggcgggccccgaccggaccccccggcacccccggcacccccggctgcgcagctactgcaaagggccccggcgctcagcagcccaaaccggccagcttgggccgcgggcggggggcagccgccgccatcctcagcttgggcaacgtgctcaactacctggacaggtacaccgtggcaggcgtccttctggacatccagcagcactttggggtcaaggaccgaggcgccggcctgctgcagtcagtgttcatctgtagcttcatggtggctgcccccatcttcggctacctgggcgaccgcttcaacaggaaggtgattctcagctgcggcattttcttctggtcggccgtcaccttctccagctccttcattccccagcagtacttctggctgctggtcctgtcccgggggctggtgggcatcggggaggccagctactccaccatcgcccccactatcattggcgacctcttcaccaagaacacgcgtacgctcatgctgtccgtcttctacttcgccatcccactgggcagtggcctgggctacattactggctccagcgtgaagcaggcagccggagactggcactgggcattgcgggtgtcccctgtcctgggcatgatcacaggaacactcatcctcattctggtcccagccactaaaaggggtcatgccgaccagctcggggaccagctcaaggcccggacctcatggctccgagatatgaaggccctgattcgaaaccgcagctacgtcttctcctccctggccacgtcggctgtctccttcgccacgggggccctgggcatgtggatcccgctctacctgcaccgcgcccaagttgtgcagaagacagcagagacgtgcaacagcccgccctgtggggccaaggacagcctcatctttggggccatcacctgctttacgggatttctgggcgtggtcacgggggcaggagccacgcgctggtgccgcctgaagacccagcgggccgacccactggtgtgtgccgtgggcatgctgggctctgccatcttcatctgcctgatcttcgtggctgccaagagcagcatcgtaggagcctatatctgtatcttcgtcggggagacgctgctgttttctaactgggccatcactgcagacatcctcatgtacgtggtcatccccacgcggcgcgccactgccgtggccttgcagagcttcacctcccacctgctgggggacgccgggagcccctacctcattggctttatctcagacctgatccgccagagcactaaggactccccgctctgggagttcctgagcctgggctacgcgctcatgctctgccctttcgtcgtggtcctgggcggcatgttcttcctcgccactgcgctcttcttcgtcagcgaccgcgccagggctgagcagcaggtgaaccagctggcgatgccgcccgcatctgtgaaagtctgaggtggtgccattgggacaatgaagaacccacactcccacctcgtctgggaggtgtcctacagcgtccgggaccggctgggctgccccaaagctttctgtgtgatccacggctaggcacccaccctctctggcccaggcctgctgagtggccctggcatcaagaagaggctgtgtcctcagttaccctggaaggatgtgtgtgttggagccacacggttggacaggttcccagccctaggtttgggccgcagggcccctggggccaaggaagaagacagccccaagtgggtgtccggggagagcctggcctgccaccagcttatgtgatcttgggcaagtccctgccctccctggaacgaagggccagggggctggactttcccacacaacttgctgggcaaagcacgatctgcagctttgaagactcaacagaccctggaccatacggagagcaggtggcccaggcctcagggcggcagtcccggctttgaggctcacgcgagggcctggtatgcagggaccactgctcagctgggcctcggaccttggggatattggacgcaacctggcaaatgaagctgggcgcccaagtctctgggtactccctggaggacactgtctcactgtctcgggttggctcccagcctggaggtcccagatggggactgttctgacaagctggcatcaccaggggtgaaggccctggctgcagctgtacaccacctgtgcccccaggctcaaggtctctggcaggtgcacaccagcccaactctgcagggcttctctccctgccaccaccccccaagccaggaccccactccttccccgaggctgagctgagccttttccaggggcagggcccaggagaccattcccagaatccatggggcagtagccagggctccggctgctggaggaagcagctatccacaaagcttcctgccccagagctgaggctgaggccccgggagaggcggcccctacccaaacactggctgctggcattccaccaagtgaccccaggggggggccaggccttcgatcacccacctcccatccatgcacacaccaggatgcagctgccaacttcacaccagccccaacccgctttgggggagcttagccccctgcgtcacccactccctgcacttctgctgcaatcaaggtggttctggtgcgggggtggggtggggggtgaggccttgtggccaatgggggaccccccaagagccagcttggacaatgctcttcttgccccttagttactggctggctgtggcttcagtggtgtgtaagcaggtggaatactcacccaccaagctctggggtaccccgagggcctgacaagaggatggggtgggggtggcatcctccaaagaccagcctccacccccactccagcctcagcggggccccagcgatgttttcttgttgtacaagaaccaggtccgagtgttgcctcctcttccttccggaagccaaactgctcctttattttttagagctgctgattgtgaatctcagagtcttaagagagaagccaaatatattcctcttgtaaatgaagaaataaacctatttaaatcaccccctggtggctccctcacagcaaaaaagcctgggggcaaagaggtggcaggcacgagagatggtcacacctgcctgcagccagcacatcaacctgcaccaacccaggcaaacaccagagccctggacatggccctggagccagggtcccagcccagaaccgggggtggggaggtctctgcaccctgggacccctgcaggaatggctcaggctgtgcttgccagagcaggatgcccgggcaggcggcaacagccaccctccccagtggcagcgccttagaaacagcttgcgtattaaaatcatggtttaaaaaaaaaaaaaaaaaataggcgtctcaggcagatggaggcaggggctgaggggggcccgtacctgtgctcagggcttccctgccttcctcacctgtgctttcttcttggccccactctgaagcaggctgggactcctgatgaccaaagacagccttgcctttttccgtgccagcgcggacagtggtgatttgcccaagaccccctttttgggaagagccttctgatgctgcttttggcctgcaggttccgtgggggacccgggagctccattcacctgggacggcttctggtttttcttctgcagttttggggatttggcaggggtgctggggctccgggtgggggcgccaggggctggactcttggtggttggcgtcccgtttgcctgggctgggaccttagcctttgtcctgttcctcttcttcctgcccatgctggggggctggctcccgccggtggctgcaggtgtgccatcctccgctggcgtgccatcctctgacttgcgtttcttgcgcttcttcgtctctggcaagaatccctttttcttccgcttcttactgatggggctctgggtggcactggggat

SEQ ID NO: 44054 - protein, 178 aa, Artificial Sequence
  derived and/or modified sequence
MDRPGPGSARPGRTVHVWGYRVEWKVRNGRKLQPSEWAGRGDLGGFKRRWKDTRATVGTTFRRRSRVSLVGELSKFPLPSDSSGGKSSSSFARGALAWCRQRNPNPSCAAAETGARTSLPKERCRGWRLGNWLHKHPHPNTCPRLPACWLPPILTERGERVPKLVPLLACYPKSKPKD

SEQ ID NO: 44055 - DNA, 537 bp, Artificial Sequence
  derived and/or modified sequence
atggaccggcctggacctggctcggcgcgccccggcaggactgtgcacgtgtggggctatagagttgaatggaaggttcggaacggaaggaagttgcagccgagcgaatgggccggccggggagatctgggtggcttcaaacgccgctggaaagacacaagagcgacggtgggcaccactttccgccggcgatcccgcgtgagcctggtcggggaattgtccaagttccccctgcctagcgattctagcgggggaaagagttcaagtagcttcgcccgaggagccctcgcctggtgtaggcagaggaatccgaaccctagctgtgccgcagcagaaaccggggctcgaacatctcttcccaaagagagatgtcggggatggagattagggaactggttacataaacaccctcaccccaacacatgccctaggctgccagcatgctggttgccaccgatcctgaccgagaggggcgaacgcgttccgaagcttgtcccgctgctggcctgttacccgaagtctaagccaaaagactag

SEQ ID NO: 44056 - DNA, 537 bp, Artificial Sequence
  derived and/or modified sequence
atggatcgcccggggccaggctccgcgcgccccggccggaccgtgcacgtttggggttaccgggttgagtggaaagtacggaacggtaggaagctgcagcccagcgagtgggcggggcgaggagacctaggagggttcaaaaggaggtggaaggatacacgggccacagtcggaactactttccgaaggaggtcacgtgtgtccctagttggggaactttccaaattcccactccccagtgatagctccggaggcaagtcgtcttcttcctttgctcggggtgctcttgcctggtgcaggcagcggaaccccaacccttcctgcgccgcggcggaaacaggggctcggaccagcctcccgaaggagcgctgtcggggctggcgcttggggaactggttacacaagcacccacatccaaacacgtgcccccgcctccccgcctgctggctgccgccgattcttacagaacgcggggagagagtccccaaactggtgccactcctcgcctgctaccctaagagcaagccaaaggactga

SEQ ID NO: 44057 - DNA, 537 bp, Artificial Sequence
  derived and/or modified sequence
atggaccggcccggccctggcagcgcccggcccggccgcacagtgcacgtgtggggctacagagtggagtggaaggtgagaaatggaaggaagctgcagcccagcgagtgggccggccgcggggacctgggcggcttcaagaggcgctggaaggacacccgggccaccgtgggcaccaccttcagaagaagaagccgggtgtccctggtgggggagctgagcaagttccccctgcccagcgacagcagcggcggcaagagcagcagcagctttgcccggggggccctggcctggtgccggcagaggaaccccaaccccagctgtgccgctgctgagactggagcccggaccagcctgcccaaggagcgctgccggggctggaggctgggcaactggctgcacaagcacccccaccccaacacctgcccccggctgcctgcctgctggctgccccccatcctgacagagcggggggagcgggtgcccaagctggtgcccctgctggcctgctaccccaagagcaagcccaaggactag

SEQ ID NO: 44058 - DNA, 537 bp, Artificial Sequence
  derived and/or modified sequence
atggaccggcccggccccggcagcgcccggcccggccggaccgtgcacgtgtgggggtatagagtggagtggaaagttaggaatggacgaaaactgcagccttcggagtgggcaggtaggggagacttgggaggcttcaagcgccgttggaaagatacccgagcaacagtgggtaccactttcagacgtaggagtagagtatcgttagtgggcgagctgtcgaagttccctctgccatccgattcttctggcggaaaatcatcctcgtcatttgcgcgtggcgcactcgcctggtgtagacagcgtaatcccaatccatcctgcgcagcggcagaaacgggagccagaacgtccctccctaaggaaagatgccggggctggaggctgggcaactggctgcacaagcatccacaccccaatacttgtcctcgcctacctgcctgctggctgccccctatcctgacagaacggggagaaagagtccccaagttggtacccctccttgcctgctaccccaaaagcaaaccaaaggattag

SEQ ID NO: 44059 - DNA, 537 bp, Artificial Sequence
  derived and/or modified sequence
atggaccgcccagggcctggcagcgccagaccagggaggaccgtgcacgtatgggggtaccgcgtggagtggaaggtcagaaatggacgaaaactgcagccctcagaatgggccggaagaggggatctgggaggctttaagcgcaggtggaaggacacaagggcaactgtggggactacttttaggagacgctctcgtgtgtcactggttggtgagctgagtaaattccccctgccaagcgactccagcggaggaaaatcaagctcttcttttgcccgaggcgctcttgcttggtgccgacaaaggaacccaaacccgtcatgtgccgctgctgaaaccggcgctcggacatctctgcctaaggagcggtgcaggggatggagactagggaactggctccacaagcacccacatccaaacacttgccccaggctgccggcatgttggttaccgccaatattaacagaacgcggagagcgggtgcccaaactggtgccattattggcctgctaccctaagtctaagcctaaagactag

SEQ ID NO: 44060 - DNA, 537 bp, Artificial Sequence
  derived and/or modified sequence
atggacagacccggccccggcagcgccagacccggcagaaccgtgcacgtgtggggctacagagtggagtggaaggtgagaaacggcagaaagctgcagcccagcgagtgggccggcagaggcgacctgggcggcttcaagagaagatggaaggacaccagagccaccgtgggcaccaccttcagaagaagaagcagagtgagcctggtgggcgagctgagcaagttccccctgcccagcgacagcagcggcggcaagagcagcagcagcttcgccagaggcgccctggcctggtgcagacagagaaaccccaaccccagctgcgccgccgccgagaccggcgccagaaccagcctgcccaaggagagatgcagaggctggagactgggcaactggctgcacaagcacccccaccccaacacctgccccagactgcccgcctgctggctgccccccatcctgaccgagagaggcgagagagtgcccaagctggtgcccctgctggcctgctaccccaagagcaagcccaaggactag

SEQ ID NO: 44061 - protein, 256 aa, Artificial Sequence
  derived and/or modified sequence
MHPEGGQFVPQLLGHLLATKLKRFLLSKGGRRAQIPDVSRATPHTIDEMPEAAVKSTANKYQVFFFGTHETAFLGPKDLFPYEESKEKFGKPNKRKGFSEGLWEIENNPTVKASGYQSSQKKSCVEEPEPEPEAAEGDGDKKGNAEGSSDEEGKLVIDEPAKEKNEKGALKRRAGDLLEDSPKRPKEAENPEGEEKEAATLEVERPLPMEVEKNSTPSEPGSGRGPPQEEEEEEDEEEEATKEDAEAPGIRDHESL

SEQ ID NO: 44062 - DNA, 771 bp, Artificial Sequence
  derived and/or modified sequence
atgcacccagagggaggccaattcgtccctcagctcctcggacatctgctcgccaccaaactcaagaggtttctcttatccaaaggcggcaggcgggcccagatcccagatgtcagccgcgccacccctcatactattgacgaaatgcctgaggcggccgtgaagtccactgccaacaaatatcaggtcttttttttcggtacgcatgaaacggccttcctcggacccaaagacttgtttccatatgaagagagtaaagagaagttcggcaaacctaacaagcgcaagggattctccgagggtctctgggagatcgagaataacccgacagtgaaagcgtcgggttatcagagctctcagaagaaatcctgcgtggaggagcctgaacccgagccagaggcagcggaaggtgacggagataagaaggggaacgcagaggggagcagtgacgaggaaggcaaattagtcatagacgaaccagcaaaagagaagaatgagaagggcgctctgaagcgaagggccggcgacttgctagaggattcaccgaagagacctaaagaggctgagaatcccgaaggtgaagagaaggaggctgccaccctggaggtggagaggcctctgcctatggaggtggaaaaaaactcaaccccatctgagccagggagcggccgggggcctccccaggaagaggaagaagaggaggatgaggaagaggaagcaactaaggaagatgcggaagctccaggaatccgcgatcatgagagtctgtag

SEQ ID NO: 44063 - DNA, 960 bp, Artificial Sequence
  derived and/or modified sequence
agaactgagctcatctttgcggggttagctagccgttgagtccaagtctccttggcaagacagtagcttagagaaacgagatcgaatgcacccggaaggtggccaatttgtgcctcaactccttggccatctcctggctaccaaactcaagcgtttcctccttagcaaaggcggacgtagggctcaaatccccgacgtttccagggccaccccccatacgattgacgagatgcctgaggctgccgtgaaatcaacagccaacaaataccaagtcttttttttcgggacccacgagacggcattcctgggccccaaagacctcttcccttacgaggaatccaaggagaagtttggcaagcccaacaagaggaaagggttcagcgaggggctgtgggagatcgagaacaaccctactgtcaaggcttccggctatcagtcctcccagaaaaagagctgtgtggaagagcctgaaccagagcccgaagctgcagagggtgacggtgataagaaggggaatgcagagggcagcagcgacgaggaagggaagctggtcattgatgagccagccaaggagaagaacgagaaaggagcgttgaagaggagagcaggggacttgctggaggactctcctaaacgtcccaaggaggcagaaaaccctgaaggagaggagaaggaggcagccaccttggaggttgagaggccccttcctatggaggtggaaaagaatagcaccccctctgagcccggctctggccgggggcctccccaagaggaagaagaggaggaggatgaagaggaagaggctaccaaggaagatgctgaggccccaggcatcagagatcatgagagcctgtagccaccaatgtttcaagaggagcccccaccctgttcctgctgctgtctgggtgctactggggaaactggccatggcctgcaaactgggaacccctttcccacccc

SEQ ID NO: 44064 - DNA, 771 bp, Artificial Sequence
  derived and/or modified sequence
atgcaccctgagggcggccagtttgtgccccagctgctgggccacctgctggccaccaagctgaagcgcttcctgctgagcaagggcggcagaagagcccagatcccagatgtgtcccgggccaccccccacaccattgatgagatgcctgaggccgctgtgaagagcacagccaacaagtaccaggtgttcttcttcggcacccatgaaacagccttcctgggccccaaggacctcttcccctatgaggagagcaaggagaagtttgggaagcccaacaagaggaagggcttcagcgagggcctgtgggagattgagaacaaccccaccgtgaaggccagcggctaccagagcagccagaagaagagctgtgtggaggagcctgagcctgagcctgaggccgcagaaggagatggagacaagaagggaaatgctgagggcagcagtgatgaggagggcaagctggtgattgatgagcccgccaaggagaagaatgaaaaaggagccctgaagaggcgggccggggacctgctggaggacagccccaagaggcccaaggaggctgaaaatcctgagggggaggagaaggaggccgccaccctggaggtggagcggcccctgcccatggaggtggagaagaacagcacccccagcgagcccggcagcggccggggccccccccaggaggaggaggaggaggaggatgaggaggaggaggccaccaaggaggatgctgaggcccctggcatccgggaccacgagagcctgtag

SEQ ID NO: 44065 - DNA, 771 bp, Artificial Sequence
  derived and/or modified sequence
atgcaccccgagggcggccagttcgtgccccagctgctgggccacctgcttgctactaagctgaaacggttcctgctcagcaagggaggccggcgagcacagattcctgatgtcagcagagccacaccccataccatcgatgagatgcctgaggcagccgtcaagtcaaccgctaacaaataccaggtgtttttctttggtacacatgagacagctttcctgggtcctaaggatctgttcccttatgaggagagtaaggagaagttcggtaagcccaacaagagaaaagggttttcggagggcctctgggagatcgaaaataaccctacggtaaaagcatccggctatcagagttcccagaagaagtcttgcgtagaagaacccgagcccgagccggaggccgccgaaggagacggtgataagaagggcaacgccgagggtagctccgatgaggagggcaagcttgtaattgatgaacctgcaaaagagaagaacgagaagggggccctgaagcgacgagccggggatttgctggaagatagccctaagcggccgaaggaagctgagaaccctgagggtgaggagaaggaagccgccaccctcgaagtcgagcgcccattgccaatggaagtggaaaagaactctacgccaagtgagccggggtctgggaggggcccgcctcaggaagaggaggaagaagaggacgaagaagaagaggccactaaagaagatgcagaagcacccggaatcagagaccacgaatctctgtag

SEQ ID NO: 44066 - DNA, 771 bp, Artificial Sequence
  derived and/or modified sequence
atgcaccccgaggggggacagttcgtgccacaactcctaggacacctactagccaccaagctcaaacgattcctcttatcaaaggggggtcgcagagcccaaatcccagatgtgtcgagagccacacctcacaccatagacgaaatgcctgaggcagcggttaaatcgaccgcaaataagtaccaggtgttcttcttcggtactcacgagaccgctttcttagggccaaaagacctcttcccctatgaggaatccaaggagaagtttggtaagcctaacaaacgcaaggggtttagtgaggggctgtgggaaattgaaaataatccaaccgtaaaggccagtgggtaccagagtagtcagaagaagagctgcgtggaagagcctgagcctgagcccgaagccgcagagggagatggagacaagaaggggaacgccgaggggtcctccgacgaggagggtaagcttgtgatcgacgagccggctaaagaaaaaaacgagaagggtgcgctgaagcggcgtgccggtgaccttcttgaagatagtcctaagaggcctaaggaagcagagaacccagagggcgaggaaaaagaagccgctacgctcgaagtggagcgccctcttcccatggaggtggaaaaaaactcaactccatcagagcccggatctggcagaggacccccacaagaagaggaggaagaggaagacgaagaggaggaggctaccaaagaggacgccgaagcacccggaattagagaccatgaaagcctgtag

SEQ ID NO: 44067 - DNA, 771 bp, Artificial Sequence
  derived and/or modified sequence
atgcaccccgagggcggccagttcgtgccccagctgctgggccacctgctggccaccaagctgaagagattcctgctgagcaagggcggcagaagagcccagatccccgacgtgagcagagccaccccccacaccatcgacgagatgcccgaggccgccgtgaagagcaccgccaacaagtaccaggtgttcttcttcggcacccacgagaccgccttcctgggccccaaggacctgttcccctacgaggagagcaaggagaagttcggcaagcccaacaagagaaagggcttcagcgagggcctgtgggagatcgagaacaaccccaccgtgaaggccagcggctaccagagcagccagaagaagagctgcgtggaggagcccgagcccgagcccgaggccgccgagggcgacggcgacaagaagggcaacgccgagggcagcagcgacgaggagggcaagctggtgatcgacgagcccgccaaggagaagaacgagaagggcgccctgaagagaagagccggcgacctgctggaggacagccccaagagacccaaggaggccgagaaccccgagggcgaggagaaggaggccgccaccctggaggtggagagacccctgcccatggaggtggagaagaacagcacccccagcgagcccggcagcggcagaggccccccccaggaggaggaggaggaggaggacgaggaggaggaggccaccaaggaggacgccgaggcccccggcatcagagaccacgagagcctgtag

SEQ ID NO: 44068 - protein, 233 aa, Artificial Sequence
  derived and/or modified sequence
MEQRAGGNRVQTSTLNCAGAAVIDEMPEAAVKSTANKYQVFFFGTHETAFLGPKDLFPYEESKEKFGKPNKRKGFSEGLWEIENNPTVKASGYQSSQKKSCVEEPEPEPEAAEGDGDKKGNAEGSSDEEGKLVIDEPAKEKNEKGALKRRAGDLLEDSPKRPKEAENPEGEEKEAATLEVERPLPMEVEKNSTPSEPGSGRGPPQEEEEEEDEEEEATKEDAEAPGIRDHESL

SEQ ID NO: 44069 - protein, 208 aa, Artificial Sequence
  derived and/or modified sequence
MPEAAVKSTANKYQVFFFGTHETAFLGPKDLFPYEESKEKFGKPNKRKGFSEGLWEIENNPTVKASGYQSSQKKSCVEEPEPEPEAAEGDGDKKGNAEGSSDEEGKLVIDEPAKEKNEKGALKRRAGDLLEDSPKRPKEAENPEGEEKEAATLEVERPLPMEVEKNSTPSEPGSGRGPPQEEEEEEDEEEEATKEDAEAPGIRDHESL

SEQ ID NO: 44070 - DNA, 702 bp, Artificial Sequence
  derived and/or modified sequence
atggagcaacgggcagggggaaaccgggtgcagaccagcaccctgaactgcgcaggcgcagcggtcatcgacgagatgccggaggctgctgtgaaaagtacggcaaataagtaccaggtcttctttttcgggacgcacgagaccgccttcctggggccaaaagacctgtttccttacgaggagtctaaagaaaagttcggaaaaccgaataaacggaaaggcttcagcgagggcctgtgggagatcgagaataatcccaccgttaaagcctcagggtaccaatcctcccagaagaagagctgtgtcgaggagccagagccagagcctgaggccgctgagggagatggagacaaaaaagggaacgctgaaggatcaagcgatgaagaggggaagctcgtgatcgatgagccggccaaagagaagaatgagaaaggcgcactgaagagacgagccggagatctcctcgaagatagccctaaaagacccaaggaggccgagaaccctgagggggaggaaaaagaagccgctactttggaggtggagagacctcttccaatggaggttgagaagaactctaccccctccgaaccgggtagtggaagagggccgccacaggaggaggaagaagaagaagatgaagaagaggaggccactaaggaggatgctgaggcgccaggtattcgggaccacgaaagcctgtag

SEQ ID NO: 44071 - DNA, 2171 bp, Artificial Sequence
  derived and/or modified sequence
atacggtaagcacggcgaggtccagagaggaccccagtgcgcggagcggcacggcgcccactcctctcgccctcggcgcctagcacgctgccaagaaccgcgggtgcccagtaaatatttgtggattgagatggagcagagggcaggcggaaaccgtgtacagacgtccacacttaactgcgctggggccgcggtgattgacgagatgcctgaggctgccgtgaaatcaacagccaacaaataccaagtcttttttttcgggacccacgagacggcattcctgggccccaaagacctcttcccttacgaggaatccaaggagaagtttggcaagcccaacaagaggaaagggttcagcgaggggctgtgggagatcgagaacaaccctactgtcaaggcttccggctatcagtcctcccagaaaaagagctgtgtggaagagcctgaaccagagcccgaagctgcagagggtgacggtgataagaaggggaatgcagagggcagcagcgacgaggaagggaagctggtcattgatgagccagccaaggagaagaacgagaaaggagcgttgaagaggagagcaggggacttgctggaggactctcctaaacgtcccaaggaggcagaaaaccctgaaggagaggagaaggaggcagccaccttggaggttgagaggccccttcctatggaggtggaaaagaatagcaccccctctgagcccggctctggccgggggcctccccaagaggaagaagaggaggaggatgaagaggaagaggctaccaaggaagatgctgaggccccaggcatcagagatcatgagagcctgtagccaccaatgtttcaagaggagcccccaccctgttcctgctgctgtctgggtgctactggggaaactggccatggcctgcaaactgggaacccctttcccaccccaacctgctctcctcttctactcacttttcccactccaagcccagcccatggagattgacctggatggggcaggccacctggctctcacctctaggtccccatactcctatgatctgagtcagagccatgtcttctccctggaatgagttgaggccactgtgttccttccgcttggagctattttccaggcttctgctggggcctgggacaactgctcccacctcctgacacccttctcccactctcctaggcattctggacctctgggttgggatcaggggtaggaatggaaaggatggagcatcaacagcagggtgggcttgtggggcctgggaggggcaatcctcaaatgcggggtgggggcagcacaggagggcggcctccttctgagctcctgtcccctgctacacctattatcccagctgcctagattcagggaaagtgggacagcttgtaggggaggggctcctttccataaatccttgatgattgacaacacccatttttccttttgccgaccccaagagttttgggagttgtagttaatcatcaagagaatttggggcttccaagttgttcgggccaaggacctgagacctgaagggttgactttacccatttgggtgggagtgttgagcatctgtccccctttagatctctgaagccacaaataggatgcttgggaagactcctagctgtcctttttcctctccacacagtgctcaaggccagcttatagtcatatatatcacccagacataaaggaaaagacacattttttaggaaatgtttttaataaaagaaaattacaaaaaaaaattttaaagacccctaaccctttgtgtgctctccattctgctccttccccatcgttgcccccatttctgaggtgcactgggaggctccccttctatttggggcttgatgactttctttttgtagctggggctttgatgttccttccagtgtcatttctcatccacataccctgacctggccccctcagtgttgtcaccagatctgatttgtaacccactgagaggacagagagaaataagtgccctctcccaccctcttcctactggtctctctatgcctctctacagtctcgtctcttttaccctggcccctctcccttgggctctgatgaaaaattgctgactgtagctttggaagtttagctctgagaaccgtagatgatttcagttctaggaaaataaaacccgttgattact

SEQ ID NO: 44072 - DNA, 1292 bp, Artificial Sequence
  derived and/or modified sequence
ataacaccgggaagggcacgagcgctccgcgcggagcgggcagagattgacgagatgcctgaggctgccgtgaaatcaacagccaacaaataccaagtcttttttttcgggacccacgagacggcattcctgggccccaaagacctcttcccttacgaggaatccaaggagaagtttggcaagcccaacaagaggaaagggttcagcgaggggctgtgggagatcgagaacaaccctactgtcaaggcttccggctatcagtcctcccagaaaaagagctgtgtggaagagcctgaaccagagcccgaagctgcagagggtgacggtgataagaaggggaatgcagagggcagcagcgacgaggaagggaagctggtcattgatgagccagccaaggagaagaacgagaaaggagcgttgaagaggagagcaggggacttgctggaggactctcctaaacgtcccaaggaggcagaaaaccctgaaggagaggagaaggaggcagccaccttggaggttgagaggccccttcctatggaggtggaaaagaatagcaccccctctgagcccggctctggccgggggcctccccaagaggaagaagaggaggaggatgaagaggaagaggctaccaaggaagatgctgaggccccaggcatcagagatcatgagagcctgtagccaccaatgtttcaagaggagcccccaccctgttcctgctgctgtctgggtgctactggggaaactggccatggcctgcaaactgggaacccctttcccaccccaacctgctctcctcttctactcacttttcccactccaagcccagcccatggagattgacctggatggggcaggccacctggctctcacctctaggtccccatactcctatgatctgagtcagagccatgtcttctccctggaatgagttgaggccactgtgttccttccgcttggagctattttccaggcttctgctggggcctgggacaactgctcccacctcctgacacccttctcccactctcctaggcattctggacctctgggttgggatcaggggtaggaatggaaaggatggagcatcaacagcagggtgggcttgtggggcctgggaggggcaatcctcaaatgcggggtgggggcagcacaggagggcggcctccttctgagctcctgtcccctgctacacctattatcccagctgcctagattcagggaaagtgggacagcttgtaggggaggggctcctttccataaatccttgatgattgacaacacccattttt

SEQ ID NO: 44073 - DNA, 702 bp, Artificial Sequence
  derived and/or modified sequence
atggagcagagagctgggggcaacagagtgcagaccagcaccctgaactgtgccggggctgctgtgattgatgagatgcctgaggccgctgtgaagagcacagccaacaagtaccaggtgttcttcttcggcacccatgaaacagccttcctgggccccaaggacctcttcccctatgaggagagcaaggagaagtttgggaagcccaacaagaggaagggcttcagcgagggcctgtgggagattgagaacaaccccaccgtgaaggccagcggctaccagagcagccagaagaagagctgtgtggaggagcctgagcctgagcctgaggccgcagaaggagatggagacaagaagggaaatgctgagggcagcagtgatgaggagggcaagctggtgattgatgagcccgccaaggagaagaatgagaagggggccctgaagagaagagctggggacctgctggaggacagccccaagaggcccaaggaggccgagaaccctgagggggaggagaaggaggccgccaccctggaggtggagcggcccctgcccatggaggtggagaagaacagcaccccatctgagcccggcagcggccggggccccccccaggaggaggaggaggaggaggatgaggaggaggaggccaccaaggaggatgctgaggcccctggcatccgggaccacgagagcctgtag

SEQ ID NO: 44074 - DNA, 702 bp, Artificial Sequence
  derived and/or modified sequence
atggagcagcgggccggcggcaaccgggtgcagaccagcaccctgaactgtgcaggtgccgctgtgattgatgaaatgcccgaagccgctgtcaaatccaccgcaaataaataccaggtgtttttctttggaacgcatgaaacagccttcctgggaccaaaggacctgttcccctacgaggagagcaaagagaagttcggaaagcccaataaacgtaaaggtttcagcgaggggctttgggagatcgaaaacaacccaaccgtcaaggccagcgggtatcagagcagtcagaaaaagagctgcgttgaagaaccagagccggaacccgaagcagcagagggcgatggggacaaaaaagggaatgccgagggctccagtgacgaagagggcaagttggtcatcgatgaaccggctaaagaaaagaacgagaagggagccctcaaacgtagggcgggagacctgttggaagactctcctaaacgccccaaggaggctgagaacccggaaggggaggaaaaagaagctgctacactggaggtggaacggcccctacctatggaagtggagaaaaattctacaccctcagaacccggtagcggccgtggtcctcctcaggaggaggaagaagaagaagatgaggaggaagaagcaacaaaagaggacgccgaggcccccggtatccgcgatcacgagagtctgtag

SEQ ID NO: 44075 - DNA, 702 bp, Artificial Sequence
  derived and/or modified sequence
atggagcagcgcgcaggtggaaacagggttcagacttccacactgaattgcgcaggagcagccgtgatcgatgagatgcctgaagcagccgtcaagtcaactgctaacaagtatcaggtctttttttttggcacacatgagacggccttcttgggacccaaggacctgtttccgtatgaggagagcaaggaaaaatttgggaagccaaataagaggaagggattctctgaagggctgtgggaaatcgaaaataatccaaccgttaaagcctcaggttatcagagctcacagaagaaatcttgtgtcgaggaacctgaacctgagcccgaggccgcagaaggcgatggggacaaaaagggtaacgctgagggaagttccgacgaggagggcaagttagttattgacgaaccagcgaaagagaaaaatgaaaaaggcgctctaaagcgcagggcaggcgacctacttgaagacagtcccaagcggccaaaggaggcggagaacccagaaggagaagagaaagaagctgctacactggaggtggaaaggcccctgcccatggaggtggagaagaattctactccaagtgagccgggtagcggacgtggccctccccaggaggaggaggaggaagaggatgaagaggaggaggcgacaaaggaagacgctgaggctcccggaattcgtgaccacgagtccctttag

SEQ ID NO: 44076 - DNA, 702 bp, Artificial Sequence
  derived and/or modified sequence
atggagcagagagccggcggcaacagagtgcagaccagcaccctgaactgcgccggcgccgccgtgatcgacgagatgcccgaggccgccgtgaagagcaccgccaacaagtaccaggtgttcttcttcggcacccacgagaccgccttcctgggccccaaggacctgttcccctacgaggagagcaaggagaagttcggcaagcccaacaagagaaagggcttcagcgagggcctgtgggagatcgagaacaaccccaccgtgaaggccagcggctaccagagcagccagaagaagagctgcgtggaggagcccgagcccgagcccgaggccgccgagggcgacggcgacaagaagggcaacgccgagggcagcagcgacgaggagggcaagctggtgatcgacgagcccgccaaggagaagaacgagaagggcgccctgaagagaagagccggcgacctgctggaggacagccccaagagacccaaggaggccgagaaccccgagggcgaggagaaggaggccgccaccctggaggtggagagacccctgcccatggaggtggagaagaacagcacccccagcgagcccggcagcggcagaggccccccccaggaggaggaggaggaggaggacgaggaggaggaggccaccaaggaggacgccgaggcccccggcatcagagaccacgagagcctgtag

SEQ ID NO: 44077 - protein, 590 aa, Artificial Sequence
  derived and/or modified sequence
MADDDVLFEDVYELCEVIGKGPFSVVRRCINRETGQQFAVKIVDVAKFTSSPGLSTEDLKREASICHMLKHPHIVELLETYSSDGMLYMVFEFMDGADLCFEIVKRADAGFVYSEAVASHYMRQILEALRYCHDNNIIHRDVKPHCVLLASKENSAPVKLGGFGVAIQLGESGLVAGGRVGTPHFMAPEVVKREPYGKPVDVWGCGVILFILLSGCLPFYGTKERLFEGIIKGKYKMNPRQWSHISESAKDLVRRMLMLDPAERITVYEALNHPWLKERDRYAYKIHLPETVEQLRKFNARRKLKGAVLAAVSSHKFNSFYGDPPEELPDFSEDPTSSGLLAAERAVSQVLDSLEEIHALTDCSEKDLDFLHSVFQDQHLHTLLDLYDKINTKSSPQIRNPPSDAVQRAKEVLEEISCYPENNDAKELKRILTQPHFMALLQTHDVVAHEVYSDEALRVTPPPTSPYLNGDSPESANGDMDMENVTRVRLVQFQKNTDEPMGITLKMNELNHCIVARIMHGGMIHRQGTLHVGDEIREINGISVANQTVEQLQKMLREMRGSITFKIVPSYRTQSSSCEVMTLTNHPHLL

SEQ ID NO: 44078 - protein, 898 aa, Artificial Sequence
  derived and/or modified sequence
MADDDVLFEDVYELCEVIGKGPFSVVRRCINRETGQQFAVKIVDVAKFTSSPGLSTEDLKREASICHMLKHPHIVELLETYSSDGMLYMVFEFMDGADLCFEIVKRADAGFVYSEAVASHYMRQILEALRYCHDNNIIHRDVKPHCVLLASKENSAPVKLGGFGVAIQLGESGLVAGGRVGTPHFMAPEVVKREPYGKPVDVWGCGVILFILLSGCLPFYGTKERLFEGIIKGKYKMNPRQWSHISESAKDLVRRMLMLDPAERITVYEALNHPWLKERDRYAYKIHLPETVEQLRKFNARRKLKGAVLAAVSSHKFNSFYGDPPEELPDFSEDPTSSGLLAAERAVSQVLDSLEEIHALTDCSEKDLDFLHSVFQDQHLHTLLDLYDKINTKSSPQIRNPPSDAVQRAKEVLEEISCYPENNDAKELKRILTQPHFMALLQTHDVVAHEVYSDEALRVTPPPTSPYLNGDSPESANGDMDMENVTRVRLVQFQKNTDEPMGITLKMNELNHCIVARIMHGGMIHRQGTLHVGDEIREINGISVANQTVEQLQKMLREMRGSITFKIVPSYRTQSSSCEDLPSTTQPKGRQIYVRAQFEYDPAKDDLIPCKEAGIRFRVGDIIQIISKDDHNWWQGKLENSKNGTAGLIPSPELQEWRVACIAMEKTKQEQQASCTWFGKKKKQYKDKYLAKHNADLVTYEEVVKLPAFKRKTLVLLGAHGVGRRHIKNTLITKHPDRFAYPIPHTTRPPKKDEENGKNYYFVSHDQMMQDISNNEYLEYGSHEDAMYGTKLETIRKIHEQGLIAILDVEPQALKVLRTAEFAPFVVFIAAPTITPGLNEDESLQRLQKESDILQRTYAHYFDLTIINNEIDETIRHLEEAVELVCTAPQWVPVSWVY

SEQ ID NO: 44079 - DNA, 1773 bp, Artificial Sequence
  derived and/or modified sequence
atggccgacgatgatgtcttatttgaagacgtctatgagctctgcgaagttatcggaaaaggcccattttctgtcgtgcgtcgctgtatcaaccgcgaaacaggtcagcagttcgccgtaaagatagtagacgttgccaagtttaccagttcaccggggttatccactgaggacctgaagcgggaggcaagcatctgccatatgcttaagcaccctcacattgttgaattgctggagacctattcaagcgatggcatgttgtatatggtgtttgagtttatggatggggcggatctgtgcttcgagatagttaaaagagcggacgctggttttgtgtactcagaagcagttgcttcccactatatgagacagatactcgaagctttgcgctactgccatgataacaatataattcatagagacgtgaagccacattgcgtgcttctggcttccaaggagaattccgcacctgtgaagctgggcgggttcggggtagctattcagctcggtgaaagtgggctggtggccggtggccgcgtcgggacaccccacttcatggcgccagaagtagtcaaaagggagccgtatggtaagccagtggacgtgtggggctgtggtgtcattctgtttatactgctcagtgggtgtctcccattctacggcacgaaagagcgcctgtttgaaggaatcatcaaggggaaatacaagatgaacccgaggcaatggagccacatctccgaatcggctaaggatctggtgcgacggatgttgatgctggatccagcggaacgcatcacagtgtacgaggcactgaatcacccatggcttaaggagcgggacagatatgcctataagatccacctcccggagacagtagaacagctccgcaaatttaacgcacgacgcaagttaaagggcgctgtactggccgctgtttcttctcacaagtttaattctttttatggtgacccgccggaagagttacctgatttttccgaagatcccacgtcatcaggactgctcgccgccgagagagccgtctcccaggttttggatagcttggaggagattcacgccctgacggattgcagcgagaaagacctggacttcctgcactctgttttccaagaccagcatctgcacaccctgttggatctgtacgataaaattaacacaaagagcagcccccaaatcagaaacccacccagtgatgctgtgcagcgagctaaagaagtgttggaggaaattagctgctaccccgaaaataatgacgccaaagagcttaagaggatcttgactcaaccacattttatggccctgcttcagacacacgacgtcgtcgctcacgaggtctacagcgatgaagcactccgggtgacaccacccccaacttccccatacctgaatggggacagccccgagtctgctaacggcgatatggatatggaaaacgtgacccgggtcaggctggtacagttccagaagaatacggatgaacctatgggaatcacgctcaagatgaacgaactgaaccactgtattgtcgccaggataatgcacggcgggatgattcatcggcagggcactttgcatgtaggagatgagatccgcgagattaacggaatttccgtcgccaaccagacagttgaacagctccagaaaatgctgcgcgaaatgcgaggctcaattaccttcaaaatcgtcccgtcatatcgcacgcaatccagttcatgcgaagtcatgacccttactaatcatccacacctgttgtag

SEQ ID NO: 44080 - DNA, 2697 bp, Artificial Sequence
  derived and/or modified sequence
atggctgacgatgacgtcctgttcgaggacgtgtacgagctgtgtgaagtgattggtaaagggcctttctcagttgttcggcgctgcataaatcgggagactggtcagcagtttgccgtcaaaatcgttgacgtagccaaattcacatcctcgcctggcttgtccacagaagacctgaagagagaggcgagcatttgccacatgctaaagcatcctcacatcgtcgagctattggagacctactcctccgacggtatgctgtatatggtgtttgaatttatggatggggctgatctatgcttcgaaatcgtcaagagggccgacgccgggttcgtttacagcgaagccgttgcatctcactacatgaggcagatcctggaggcccttcggtattgccacgacaataacatcatacatcgagacgtgaagcctcattgtgtcctactggcatccaaggagaactccgctccagtcaagctagggggattcggggtggcaatacagctgggggagtctgggttagttgctggcggcagggtggggactcctcatttcatggcaccggaagtggtgaaacgagagccgtacggcaaacccgtggatgtttggggatgtggcgtgattctcttcatccttctgtcaggttgtctcccattctatggcactaaggagcggcttttcgagggcatcattaagggaaagtacaaaatgaaccctaggcaatggagccatatatcagagtcagctaaagatctggtcaggcggatgctgatgctggaccccgctgagcgcattaccgtgtacgaggcactcaaccacccatggctgaaagagcgggatagatatgcctataagatacacctgccagaaacagtagagcagctgaggaaatttaacgcgcggcgcaaactgaaaggcgcagtcctggcggctgtgagtagccataagtttaattccttctatggcgaccctccagaagagctccccgacttttctgaggatccgacaagcagcggactgctggctgctgaaagagctgtgagtcaggtcctggattccctggaagaaattcatgccctgacagattgttcagaaaaagacctggacttcctccacagcgtcttccaggaccaacatcttcacacgctgttagatttgtatgataaaattaatacaaagagcagcccccaaattcgaaaccctcccagcgacgcagtgcagcgcgcaaaggaggtcctcgaggagatttcttgttaccctgagaataacgatgcaaaagagctgaaaaggatactgacacaacctcatttcatggccctgcttcagacccacgacgtggtagcccacgaggtttactccgacgaggccttaagagttacacctccccctacatccccttacttaaacggtgactcaccagagtccgctaatggggacatggacatggagaatgtaactcgagtcaggctcgttcagttccagaagaacactgatgaacctatgggtattacgttaaaaatgaacgaacttaatcactgcatcgtggccagaatcatgcatgggggaatgatccaccgccaggggaccctgcacgtaggcgacgaaattagagaaataaacggaatcagtgtggctaaccagaccgtggagcagttgcaaaagatgttgagagagatgcgggggagtatcacttttaagatcgtcccttcctaccgcactcagagtagctcttgcgaagatttgccaagcactactcaacctaaggggaggcaaatctacgtgagggctcagtttgagtatgaccctgcgaaggacgatctcatcccttgcaaggaggcggggattcgatttcgggtgggggatatcatacaaataatatcgaaggatgaccataactggtggcagggcaaactggaaaacagcaagaatggaaccgccggacttatcccatcaccagaactgcaggaatggcgcgtggcttgcatcgctatggagaagactaagcaagaacagcaagcttcctgcacttggttcgggaaaaagaaaaaacagtataaggacaaatatctagccaaacacaatgccgatcttgtgacttacgaagaggtggttaaactccccgccttcaagcggaagacactagtgttgctgggtgcgcatggtgttggcagaaggcacattaagaacactctgattaccaagcaccccgaccggttcgcttatccaattccacatacaacccgtcccccaaagaaagacgaggagaatggcaagaattactacttcgtctcccacgatcagatgatgcaggacattagcaacaatgagtacttggagtatgggtcccatgaagacgctatgtacggaacaaagctggaaaccatccggaagattcacgagcagggactgattgctattttagacgtggagcctcaggcactcaaagtgctgaggactgccgagtttgcaccctttgtggttttcattgccgcacctacaattaccccaggcctgaacgaggacgaatcacttcagaggctgcagaaagagagcgacatcctgcaacgcacctacgctcactactttgatctcacaataatcaacaatgaaattgatgagacgatacgacacctggaggaggccgttgaattggtgtgtaccgcaccccagtgggtgcccgtgtcatgggtgtactag

SEQ ID NO: 44081 - DNA, 1773 bp, Artificial Sequence
  derived and/or modified sequence
atggctgatgatgatgtgctgtttgaagatgtgtatgagctgtgtgaggtgattggcaagggccccttctctgtggtgcggcgctgcatcaaccgggagaccggccagcagtttgctgtgaagatcgtggatgtggccaagttcaccagcagccctggcctgagcacagaggacctgaagcgggaggccagcatctgccacatgctgaagcacccccacatcgtggagctgctggagacctacagcagtgatggcatgctgtacatggtgtttgagttcatggatggagctgacctgtgctttgaaattgtgaagagagcagatgctggctttgtgtacagcgaggccgtggccagccactacatgaggcagatcctggaggccctgcgctactgccacgacaacaacatcatccacagagatgtgaagccccactgtgtgctgctggccagcaaagaaaattctgcccctgtgaagctgggcggctttggagtggccatccagctgggggagagcggcctggtggccggcggccgggtgggcaccccccacttcatggcccctgaggtggtgaagcgggagccctacggcaagcctgtggatgtgtggggctgtggggtcatcctcttcatcctgctgagcggctgcctgcccttctacggcaccaaggagcggctgtttgagggcatcatcaagggcaagtacaagatgaacccccggcagtggagccacatcagcgagagcgccaaggacctggtgcggaggatgctgatgctggaccctgctgagcgcatcaccgtgtatgaggccctgaaccacccctggctgaaggagcgggacagatatgcctacaagatccacctgcctgagaccgtggagcagctgaggaagttcaatgcccggaggaagctgaagggagctgtgctggccgctgtgagcagccacaagttcaacagcttctatggagaccccccagaggagctgcctgacttcagcgaggaccccaccagcagcggcctgctggccgctgagagagctgtgtcccaggtgctggacagcctggaggagatccacgccctgacagactgcagcgagaaggacctggacttcctgcacagcgtcttccaggaccagcacctgcacaccctgctggacctgtatgacaagatcaacaccaagagcagcccccagatcagaaatcctccttctgatgctgtgcagagggccaaggaggtgctggaggagatcagctgctacccagaaaataatgatgccaaggagctgaagaggatcctgacccagccccacttcatggccctgctgcagacccatgatgtggtggcccacgaggtgtacagtgatgaggccctgcgggtgaccccaccacccaccagcccctacctgaatggagacagccctgagagcgccaatggagacatggacatggagaatgtgaccagggtgcggctggtgcagttccagaagaacacagatgagcccatgggcatcaccctgaagatgaatgagctgaaccactgcatcgtggcccgcatcatgcacggcggcatgatccaccggcagggcaccctgcacgtgggagatgagatccgggagatcaatggcatctctgtggccaaccagacagtggagcagctgcagaagatgctgcgggagatgaggggcagcatcaccttcaagatcgtgcccagctaccgcacccagagcagcagctgtgaggtgatgaccctgaccaaccacccccacctgctgtag

SEQ ID NO: 44082 - DNA, 2697 bp, Artificial Sequence
  derived and/or modified sequence
atggctgatgatgatgtgctgtttgaagatgtgtatgagctgtgtgaggtgattggcaagggccccttctctgtggtgcggcgctgcatcaaccgggagaccggccagcagtttgctgtgaagatcgtggatgtggccaagttcaccagcagccctggcctgagcacagaggacctgaagcgggaggccagcatctgccacatgctgaagcacccccacatcgtggagctgctggagacctacagcagtgatggcatgctgtacatggtgtttgagttcatggatggagctgacctgtgctttgaaattgtgaagagagcagatgctggctttgtgtacagcgaggccgtggccagccactacatgaggcagatcctggaggccctgcgctactgccacgacaacaacatcatccacagagatgtgaagccccactgtgtgctgctggccagcaaagaaaattctgcccctgtgaagctgggcggctttggagtggccatccagctgggggagagcggcctggtggccggcggccgggtgggcaccccccacttcatggcccctgaggtggtgaagcgggagccctacggcaagcctgtggatgtgtggggctgtggggtcatcctcttcatcctgctgagcggctgcctgcccttctacggcaccaaggagcggctgtttgagggcatcatcaagggcaagtacaagatgaacccccggcagtggagccacatcagcgagagcgccaaggacctggtgcggaggatgctgatgctggaccctgctgagcgcatcaccgtgtatgaggccctgaaccacccctggctgaaggagcgggacagatatgcctacaagatccacctgcctgagaccgtggagcagctgaggaagttcaatgcccggaggaagctgaagggagctgtgctggccgctgtgagcagccacaagttcaacagcttctatggagaccccccagaggagctgcctgacttcagcgaggaccccaccagcagcggcctgctggccgctgagagagctgtgtcccaggtgctggacagcctggaggagatccacgccctgacagactgcagcgagaaggacctggacttcctgcacagcgtcttccaggaccagcacctgcacaccctgctggacctgtatgacaagatcaacaccaagagcagcccccagatcagaaatcctccttctgatgctgtgcagagggccaaggaggtgctggaggagatcagctgctacccagaaaataatgatgccaaggagctgaagaggatcctgacccagccccacttcatggccctgctgcagacccatgatgtggtggcccacgaggtgtacagtgatgaggccctgcgggtgaccccaccacccaccagcccctacctgaatggagacagccctgagagcgccaatggagacatggacatggagaatgtgaccagggtgcggctggtgcagttccagaagaacacagatgagcccatgggcatcaccctgaagatgaatgagctgaaccactgcatcgtggcccgcatcatgcacggcggcatgatccaccggcagggcaccctgcacgtgggagatgagatccgggagatcaatggcatctctgtggccaaccagacagtggagcagctgcagaagatgctgcgggagatgaggggcagcatcaccttcaagatcgtgcccagctaccgcacccagagcagcagctgtgaggacctgcccagcaccacccagcccaagggccggcagatctacgtgcgggcccagtttgaatatgaccctgccaaggatgacctgatcccctgcaaggaggccggcatccgcttccgggtgggggacatcatccagatcatcagcaaggatgaccacaactggtggcagggcaagctggagaacagcaagaatggaacagctggcctcatccccagccctgagctgcaggagtggagggtggcctgcatcgccatggagaagaccaagcaggagcagcaggccagctgcacctggtttgggaagaagaagaagcagtacaaggacaagtacctggccaagcacaatgctgacctggtgacctatgaggaggtggtgaagctgcctgccttcaagaggaagaccctggtgctgctgggcgcccacggcgtgggccgccgccacatcaagaacaccctcatcaccaagcacccagacagatttgcctaccccatcccccacaccaccaggcctcccaagaaggatgaagaaaatggcaagaactactactttgtgtcccatgaccagatgatgcaggacatcagcaacaatgagtacctggagtatggcagccatgaagatgccatgtatggcaccaagctggagaccatcaggaagatccacgagcagggcctcatcgccatcctggatgtggagccccaggccctgaaggtgctgaggacagctgagtttgccccctttgtggtgttcatcgccgcccccaccatcaccccaggcctgaatgaagatgagagcctgcagaggctgcagaaggagagtgacatcctgcagaggacctacgcccactactttgacctgaccatcatcaacaatgaaattgatgagaccatccgccacctggaggaggccgtggagctggtgtgcacagccccccagtgggtgcctgtgtcctgggtgtactag

SEQ ID NO: 44083 - DNA, 1773 bp, Artificial Sequence
  derived and/or modified sequence
atggccgacgacgacgtgctgttcgaggacgtgtacgagctgtgcgaggtgatcgggaagggaccgttctctgtcgttcgcagatgtattaaccgcgagaccggtcagcagtttgccgtgaagattgtggatgtggcaaaattcacatctagtcctggactgagtacagaggatctgaaaagggaagctagcatttgccatatgcttaagcaccctcatattgtggaactcctggagacctatagcagcgacggtatgctgtacatggtgttcgagttcatggatggcgccgacttatgcttcgagatagtaaagagggcagacgctggtttcgtgtacagtgaggctgttgcaagccattatatgagacagatactcgaagcactcaggtattgccacgacaataacataattcaccgcgatgtgaaacctcattgcgttctcctagcttcgaaagagaattccgctccggtcaagttaggaggcttcggtgtagcgattcagcttggagaaagcggccttgtggctggcgggcgggtcggtacacctcattttatggcaccggaggtggtcaagcgggagccttatggtaagccagtagatgtgtgggggtgcggcgtcattttgttcattctgctatcaggatgtctgcctttttatggtactaaagagcgacttttcgagggaattattaaaggcaagtacaagatgaatcccagacagtggtctcacatatctgagtccgctaaggacttggtgaggaggatgttgatgctagatccagcggagcgcataactgtctatgaggctttaaaccacccttggctgaaggaacgggaccgttacgcttataaaatacacctgccagagacagtggagcagctaaggaagttcaacgctcgacgcaagctcaaaggagccgtgctggctgccgtcagttcgcataagtttaattcattctatggcgatccgcccgaggaattacccgattttagcgaggatccaacgtcaagcgggctgcttgccgcagagagagccgtgagtcaggtgctcgactccctcgaggagatccatgctctcacagactgctcagagaaggatctcgactttctccactctgtgtttcaggaccagcatctccacacactccttgatctctacgacaaaatcaacacaaaatcgtcgccacagattagaaacccccctagtgacgcagtccagcgagctaaagaggtgcttgaagaaatctcttgctatccagagaacaatgacgcaaaggagctgaaacgcattctgactcagccccatttcatggcgctgctccaaactcacgatgtggtcgctcacgaggtgtacagcgatgaggccttgcgagtcactccaccgcctactagcccgtacctcaacggggacagtcccgaatctgccaacggggacatggatatggagaatgtgacccgggtcaggctggtgcagttccaaaagaatacagatgagcctatgggtatcactctcaaaatgaatgaattaaaccattgtatcgtcgcacggataatgcacggtggaatgatacaccgacagggtaccttgcacgtcggagatgagataagggagatcaatggaatcagtgtagccaaccagacagttgaacaattgcagaagatgctgagggagatgcggggatccattacctttaaaatcgttcccagctaccgtacacagtcctcctcatgcgaggtgatgactctcacaaatcacccccatcttttatag

SEQ ID NO: 44084 - DNA, 2697 bp, Artificial Sequence
  derived and/or modified sequence
atggccgacgacgacgtgctgttcgaggacgtgtacgagctgtgcgaggttatcggaaaggggcctttcagtgtggtccgcagatgtataaatcgcgagacagggcaacagttcgctgtgaagatcgtggacgtggccaagttcaccagtagccccgggctttcaactgaagatttaaagagagaggcgtccatctgccatatgctaaagcacccccacatcgtcgaactcctcgagacctactcgagcgacggtatgctgtatatggtgttcgaatttatggatggagccgatctgtgcttcgagatcgtgaagagggcagatgctggatttgtttatagtgaggccgtggcgtcacactatatgcgtcagatcctggaagccctgaggtattgccacgacaataatataatacatagggacgtaaagcctcactgcgtccttttggcatctaaagagaattctgcgccagtgaagctgggcggcttcggcgtcgcgattcaactgggagagtccggtctggtggccggcggacgagttggaactccacactttatggcccctgaggttgttaaacgagagccctatgggaaaccagtggacgtctggggatgtggggtgattctttttattcttctgtccggatgcctccccttttatgggaccaaggaacggttgttcgaaggcatcatcaaaggcaagtacaaaatgaatccgcgtcagtggtctcacatatctgagagcgcaaaagacctggttagacgaatgctgatgctcgatcccgcagagaggattactgtctatgaggccttaaatcatccctggctgaaggagagagacagatatgcctataaaattcatctccctgaaacggtggagcagcttcggaagtttaacgcccggcgtaaattaaagggggcagtacttgcagccgtatcttcacataaatttaacagtttttatggcgacccccctgaagagctgccagacttttcagaggaccccacctctagtgggctgcttgccgcggagagggccgtgagccaggtactggatagtttagaggaaattcatgccctgaccgattgtagcgaaaaggacctcgacttcctccatagcgtgttccaggatcaacacctgcatacacttctagacctgtacgacaagattaatacgaagtcctctccccagatccgcaatcccccaagtgatgccgtacagcgggctaaggaggtgctggaagaaatctcatgctatccggaaaacaatgatgctaaggagctgaaaaggattttaacccagcctcactttatggctcttctccagactcatgacgtcgtcgcacacgaggtgtactcagacgaggcgttacgtgtgacacctccgcccacctccccctatctgaatggggatagtccagagtccgccaatggggacatggacatggagaatgttactagggtgcgtctagtacagttccagaaaaacaccgacgagcctatgggcatcacactgaaaatgaacgaactgaatcactgcattgtcgcccggattatgcatggcgggatgattcaccgccagggcacattgcacgttggtgacgaaattcgggaaatcaatgggatttctgtagctaaccagacggttgaacagttacaaaaaatgttgagggaaatgcgtgggtctatcacttttaagattgtgcctagctataggactcaatcatcatcctgcgaagaccttcccagtactacacagccgaaaggtcgtcagatctacgtgcgagcgcagttcgagtacgatccagccaaagacgatttaattccttgtaaagaagccggaatcagattcagagtgggtgatatcatccagatcatctctaaagacgatcataattggtggcagggcaaattagagaacagtaagaatgggacagctggtctcataccgtcgcccgagctgcaggagtggcgcgtcgcctgtattgccatggagaagacgaagcaagaacagcaagcttcctgcacttggttcggtaaaaaaaagaagcaatataaggacaagtacctggcaaagcacaacgccgacttagtgacctatgaagaggtcgttaaattaccagcctttaagcgcaaaacgttggtgttgttgggagcacacggggtgggtcgacgacatatcaagaacactctgatcaccaaacaccccgatcgctttgcgtaccctattccgcatactacacgacccccgaagaaagacgaagaaaatggaaaaaattattatttcgtgtctcacgaccagatgatgcaggatatctctaataatgagtacctggagtatggaagccatgaggacgccatgtatggtacaaagctcgaaaccatcagaaagatacatgagcaagggctgatcgctatcctggacgtcgagcctcaggccctcaaggtcctccgcactgctgaatttgcgccttttgtcgtcttcatcgccgcccccacgataaccccggggctgaatgaggatgaatctttacagcgcctgcagaaggaatctgatatcctgcagcgcacatacgctcattactttgacctaacgatcatcaataatgagatcgacgagacaataagacatctggaggaggccgttgagctggtatgcacggctcctcagtgggtaccagtgtcttgggtgtattag

SEQ ID NO: 44085 - DNA, 1773 bp, Artificial Sequence
  derived and/or modified sequence
atggccgatgatgatgtgctgtttgaggacgtgtacgagctgtgtgaggtgatcggcaaaggacctttttctgtggtacggagatgcataaatcgggagacaggacagcagtttgcagtgaagatcgttgatgttgcgaagttcacatcaagccctggcctctccacggaagacctgaagcgcgaagcctctatctgtcatatgctgaagcacccccatattgtcgaactgcttgaaacttattcctctgatgggatgttatacatggtatttgagttcatggacggcgcagatttatgctttgaaattgtgaagagagcggatgcagggtttgtctatagcgaagccgtggcgagccactacatgagacagatattagaggcacttaggtactgccacgataataatattattcaccgtgacgttaagccccattgcgtgttgctggcaagcaaggagaacagcgcccctgtcaaactagggggatttggcgtggccatccagctgggagagtccggcctcgtggctggaggtcgagtgggcacaccccacttcatggcgcctgaagtcgtgaagcgggagccctatggcaaaccagtggacgtgtgggggtgcggcgtgatactgtttatattgctttcagggtgcctgcctttctacgggactaaggagaggctgtttgaaggaatcatcaaggggaaatataaaatgaatccgagacaatggagccacatatctgagtctgccaaggatctagtgcggaggatgttaatgctggaccccgctgaacgcatcaccgtatatgaggccctcaatcatccatggctcaaggagagggatcgctacgcttacaagattcacctgcccgaaactgtagaacagttacgtaagttcaacgccaggcgcaaactcaaaggtgccgtgcttgccgcagtttctagtcacaagttcaactccttctacggcgatcctccagaggaactgccagacttttctgaagaccctacttcgtcaggactgctggctgctgagagggccgttagtcaggttctggattctctggaggaaatccatgccctaactgactgctctgaaaaggatcttgatttccttcatagcgtgtttcaggaccagcacctgcacacattattagacttatacgataagatcaacactaaatcctcaccacagatcaggaatccaccatccgacgcagtccagcgtgcaaaggaagtgctggaagaaatcagttgttaccccgaaaataatgatgcaaaggagctgaaacggatcctgacacagccccacttcatggcactactgcaaactcacgacgttgttgcgcatgaggtgtactcagacgaggcactcagggtaactccaccaccgacttctccttatttgaatggagattctccggagtccgcaaatggcgacatggacatggaaaacgtcacacgggttcgcctcgtgcaattccagaaaaataccgatgagcctatgggcattacactgaagatgaatgagctcaatcactgcatcgtggccaggattatgcacgggggaatgatccacagacaggggaccctgcatgtaggcgatgagatcagagagatcaatgggataagcgtggccaatcaaactgtagaacagctgcagaagatgctgagagagatgagggggtcaattaccttcaaaatagtccctagttaccgcacacaatcatcctcttgcgaagtcatgacattgaccaatcaccctcatctgttgtag

SEQ ID NO: 44086 - DNA, 2697 bp, Artificial Sequence
  derived and/or modified sequence
atggcggacgacgacgtgctgtttgaggatgtgtacgagctctgtgaggttatcggcaagggtcccttcagtgtggtcaggcgatgtattaatcgagagacgggccaacaatttgctgttaaaattgtggacgttgccaagttcacttcatctccaggcctgagcacggaagatctgaagagagaggccagcatctgccatatgttaaagcatccacatatagttgagttgctcgagacctactcatcagatgggatgctgtatatggtcttcgagttcatggacggggctgatctctgttttgagatcgtgaagagagctgacgcgggatttgtctactccgaggccgtagcaagccactacatgcgccagatactagaggccttgcgctattgccatgataataacatcatccacagggacgtgaaacctcactgtgtcctgctagcgtcaaaagagaactcagcccctgtgaagctcggcggttttggggtggcgattcagctgggggagtctgggttggtggcaggcggacgggtggggacaccgcacttcatggctcctgaggtggtgaagagagaaccgtatggtaagccagtcgatgtgtggggctgcggtgtgatccttttcatcctgctcagtggctgcctgcctttttacgggacaaaagaacgccttttcgagggaattattaaaggcaagtacaagatgaaccccagacagtggtcgcacatcagtgagtctgcaaaagatctggtccgcaggatgctgatgctagacccagctgaacggatcaccgtgtatgaggcgctcaatcacccctggctaaaggaacgggataggtacgcctacaaaattcatctgcctgagacagtagagcagctgaggaagttcaacgccaggaggaagctgaagggggctgtgttggcagctgtttcctcccataaattcaattccttctacggggacccaccggaagaacttcccgacttcagcgaagatcctacctcctcagggctgctagccgcagaacgagcagtgtctcaagttctagattccttagaggaaatccatgctctgactgactgttctgagaaggatcttgatttcctgcatagcgtttttcaggaccagcatctccacacgctgctggacctatatgataagataaacacgaagtcatcaccacagattagaaacccaccgtcagatgcagtgcagcgtgccaaagaggtgttagaggagatttcatgctacccagagaataatgacgcaaaggaacttaaacgcatcctcacacagcctcactttatggccctgctgcagacccatgatgtggtggctcacgaagtttatagtgatgaggccctcagagtgacaccacctccaacttcaccatatctgaacggggatagtcccgagtccgccaatggcgatatggacatggagaacgtgacgcgggttcgtctggttcagttccagaaaaacaccgacgaacctatggggatcaccttgaaaatgaacgaacttaaccactgcatcgtagctaggattatgcacgggggaatgatacataggcaagggacattgcatgtgggggacgaaatccgggaaattaacggaatcagcgttgcaaatcagactgtcgagcagttgcagaagatgttgcgggagatgagaggctccattacattcaaaatcgtcccaagttacaggacacagtcttcgtcatgtgaagatttaccctcaaccacccagcctaaagggaggcagatctatgtgcgtgcgcagtttgaatacgaccccgctaaagatgacttgataccttgcaaagaagctggcatccgcttccgggtcggggacataatccaaataataagcaaggacgatcataattggtggcagggcaagctcgagaatagcaaaaacggcacggcaggtctgatcccctccccagagttacaggaatggcgggtggcttgcatcgcgatggagaagactaagcaggagcagcaggcaagttgtacttggttcggcaagaagaaaaagcagtataaggataagtacctcgctaagcataacgccgatctcgtgacctatgaagaggtagttaaactgccagcattcaagcgcaagactcttgtgctcctgggggcacatggagtgggtcgcagacacattaaaaatacattgattaccaaacatcccgaccgattcgcatacccaatacctcacacaacccggccacccaaaaaagatgaggaaaacggcaaaaactactactttgtgagccatgaccagatgatgcaggatatttccaacaacgagtacttagagtacgggtcccatgaggatgcaatgtacgggactaagctggaaacaatcaggaagattcacgagcagggcctgatcgccatcctggatgtggagccacaggcactgaaggtccttcgaacagccgagttcgctccgttcgtcgtgttcatcgctgcgccaacaattacaccaggcttgaacgaggatgaatcacttcaaaggcttcagaaggagagtgatatcctgcaaaggacttacgcccactactttgatctcaccataattaataacgagatcgatgagacaatccggcatttagaggaagcagtggagctggtgtgcacagcgcctcagtgggtgcccgtctcttgggtttactag

SEQ ID NO: 44087 - DNA, 2494 bp, Artificial Sequence
  derived and/or modified sequence
gccgccgccacctccctccgcggcgatcctcgctccatggtcctgccgcggccccctctgtagcccgagctgctccgcgacgcgacggagccggcctcggacagagggagcggtcgcggcctcgcggcccgcgcgggctgacgagcggagagcgcgacgccgcgcggtccccgaggatccgcacgccgggcagcgcggcccgagcagcgcgagaagcagcgggcgggcgggcggcgccgggcccgggccgccctcgctcccgcgccccggccccgccgcccgcgccggggcggtcgcctgcagaggaaggcgccgcagtctctgggcctcgcggccccactcgagcgtcctcggcaccgagggctcgcgggtcctgaggggaggaggcgatcccggggctgggcactgagctcttgggcgcccccacccccgttttcgaagccctccacgctgcggccgctatcccctccggaccatggccgacgacgacgtgctgttcgaggatgtgtacgagctgtgcgaggtgatcggaaagggtcccttcagtgttgtacgacgatgtatcaacagagaaactgggcaacaatttgctgtaaaaattgttgatgtagccaagttcacatcaagtccagggttaagtacagaagatctaaagcgggaagccagtatctgtcatatgctgaaacatccacacattgtagagttattggagacatatagctcagatggaatgctttacatggttttcgaatttatggatggagcagatctgtgttttgaaatcgtaaagcgagctgacgctggttttgtgtacagtgaagctgtagccagccattatatgagacagatactggaagctctacgctactgccatgataataacataattcacagggatgtgaagccccactgtgttctccttgcctcaaaagaaaactcggcacctgttaaacttggaggctttggggtagctattcaattaggggagtctggacttgtagctggaggacgtgttggaacacctcattttatggcaccagaagtggtcaaaagagagccttacggaaagcctgtagacgtctgggggtgcggtgtgatcctttttatcctgctcagtggttgtttgcctttttacggaaccaaggaaagattgtttgaaggcattattaaaggaaaatataagatgaatccaaggcagtggagccatatctctgaaagtgccaaagacctagtacgtcgcatgctgatgctggatccagctgaaaggatcactgtttatgaagcactgaatcacccatggcttaaggagcgggatcgttacgcctacaagattcatcttccagaaacagtagagcagctgaggaaattcaatgcaaggaggaaactaaagggtgcagtactagccgctgtgtcaagtcacaaattcaactcattctatggggatccccctgaagagttaccagatttctccgaagaccctacctcctcaggacttctagcagcagaaagagcagtctcacaggtgctggacagcctggaagagattcatgcgcttacagactgcagtgaaaaggacctagattttctacacagtgttttccaggatcagcatcttcacacactactagatctgtatgacaaaattaacacaaagtcttcaccacaaatcaggaatcctccaagcgatgcagtacagagagccaaagaggtattggaagaaatttcatgttaccctgagaataacgacgcaaaggaactaaagcgtattttaacacaacctcatttcatggccttacttcagactcacgacgtagtggcacatgaagtttacagtgatgaagcattgagggtcacacctcctcccacctctccctatttaaacggcgattctccagaaagtgctaacggagacatggatatggagaatgtgaccagagttcggctggtacagtttcaaaagaacacagatgaaccaatgggaatcactttaaaaatgaatgaactaaatcattgtattgttgcaagaattatgcatgggggcatgattcacaggcaaggtacacttcatgttggtgatgaaattcgagaaatcaatggcatcagtgtggctaaccaaacagtggaacaactgcaaaaaatgcttagggaaatgcgggggagtattaccttcaagattgtgccaagttaccgcactcagtcttcgtcctgtgaggtaatgactctaacaaaccacccccatctgctctgagttcttaactaactgtctgctgatggctgtatgtttttgctttctgggaaattgtttctgcctgtgctgttagatcactgcacaccaattttacaacaaagataacggaacagagtaggtcccatccacctactcagccctgcttccatgtggatctcctcagcactttgaactttttgcaggctgaaatctgagcaaaatgtagagaagttacaaatgatgacataaggcttaataaggaaaaaa

SEQ ID NO: 44088 - DNA, 2800 bp, Artificial Sequence
  derived and/or modified sequence
ccgctatcccctccggaccatggccgacgacgacgtgctgttcgaggatgtgtacgagctgtgcgaggtgatcggaaagggtcccttcagtgttgtacgacgatgtatcaacagagaaactgggcaacaatttgctgtaaaaattgttgatgtagccaagttcacatcaagtccagggttaagtacagaagatctaaagcgggaagccagtatctgtcatatgctgaaacatccacacattgtagagttattggagacatatagctcagatggaatgctttacatggttttcgaatttatggatggagcagatctgtgttttgaaatcgtaaagcgagctgacgctggttttgtgtacagtgaagctgtagccagccattatatgagacagatactggaagctctacgctactgccatgataataacataattcacagggatgtgaagccccactgtgttctccttgcctcaaaagaaaactcggcacctgttaaacttggaggctttggggtagctattcaattaggggagtctggacttgtagctggaggacgtgttggaacacctcattttatggcaccagaagtggtcaaaagagagccttacggaaagcctgtagacgtctgggggtgcggtgtgatcctttttatcctgctcagtggttgtttgcctttttacggaaccaaggaaagattgtttgaaggcattattaaaggaaaatataagatgaatccaaggcagtggagccatatctctgaaagtgccaaagacctagtacgtcgcatgctgatgctggatccagctgaaaggatcactgtttatgaagcactgaatcacccatggcttaaggagcgggatcgttacgcctacaagattcatcttccagaaacagtagagcagctgaggaaattcaatgcaaggaggaaactaaagggtgcagtactagccgctgtgtcaagtcacaaattcaactcattctatggggatccccctgaagagttaccagatttctccgaagaccctacctcctcaggacttctagcagcagaaagagcagtctcacaggtgctggacagcctggaagagattcatgcgcttacagactgcagtgaaaaggacctagattttctacacagtgttttccaggatcagcatcttcacacactactagatctgtatgacaaaattaacacaaagtcttcaccacaaatcaggaatcctccaagcgatgcagtacagagagccaaagaggtattggaagaaatttcatgttaccctgagaataacgacgcaaaggaactaaagcgtattttaacacaacctcatttcatggccttacttcagactcacgacgtagtggcacatgaagtttacagtgatgaagcattgagggtcacacctcctcccacctctccctatttaaacggcgattctccagaaagtgctaacggagacatggatatggagaatgtgaccagagttcggctggtacagtttcaaaagaacacagatgaaccaatgggaatcactttaaaaatgaatgaactaaatcattgtattgttgcaagaattatgcatgggggcatgattcacaggcaaggtacacttcatgttggtgatgaaattcgagaaatcaatggcatcagtgtggctaaccaaacagtggaacaactgcaaaaaatgcttagggaaatgcgggggagtattaccttcaagattgtgccaagttaccgcactcagtcttcgtcctgtgaggacttgccatcaactacccaaccaaaaggacgacagatctatgtaagagcacaatttgaatatgatccagccaaggatgacctcatcccctgtaaagaagctggcattcgattcagagttggtgacatcatccagattattagtaaggatgatcataattggtggcagggtaaactggaaaactccaaaaatggaactgcaggtctcattccttctcctgaacttcaggaatggcgagtagcttgcattgccatggagaagaccaaacaggagcagcaggccagctgtacttggtttggcaagaaaaagaagcagtacaaagataaatatttggcaaagcacaatgcagatcttgtcacatatgaagaagtagtaaaactgccagcattcaagaggaaaacactagtcttattaggcgcacatggtgttgggagaagacacataaaaaacactctcatcacaaagcacccagaccggtttgcgtaccctattccacatacaaccagacctccaaagaaagacgaagaaaatggaaagaattattactttgtatctcatgaccaaatgatgcaagacatctctaataacgagtacttggagtacggcagccacgaggatgcgatgtatgggacaaaactggagaccatccggaagatccacgagcaggggctgattgcaatactggacgtggagcctcaggcactgaaggtcctgagaactgcagagtttgctccttttgttgttttcattgctgcaccaactattactccaggtttaaatgaggatgaatctcttcagcgtctgcagaaggagtctgacatcttacagagaacatatgcacactacttcgatctcacaattatcaacaatgaaattgatgagacaatcagacatctggaggaagctgttgagctcgtgtgcacagccccacagtgggtccctgtctcctgggtctattaggcctctccccagatatctgagcataactgggagcacctcatttgtggaaaagcctctttgttatcggccttgtgtcagcaggtc

SEQ ID NO: 44089 - DNA, 1773 bp, Artificial Sequence
  derived and/or modified sequence
atggccgacgacgacgtgctgttcgaggacgtgtacgagctgtgcgaggtgatcggcaagggccccttcagcgtggtgagaagatgcatcaacagagagaccggccagcagttcgccgtgaagatcgtggacgtggccaagttcaccagcagccccggcctgagcaccgaggacctgaagagagaggccagcatctgccacatgctgaagcacccccacatcgtggagctgctggagacctacagcagcgacggcatgctgtacatggtgttcgagttcatggacggcgccgacctgtgcttcgagatcgtgaagagagccgacgccggcttcgtgtacagcgaggccgtggccagccactacatgagacagatcctggaggccctgagatactgccacgacaacaacatcatccacagagacgtgaagccccactgcgtgctgctggccagcaaggagaacagcgcccccgtgaagctgggcggcttcggcgtggccatccagctgggcgagagcggcctggtggccggcggcagagtgggcaccccccacttcatggcccccgaggtggtgaagagagagccctacggcaagcccgtggacgtgtggggctgcggcgtgatcctgttcatcctgctgagcggctgcctgcccttctacggcaccaaggagagactgttcgagggcatcatcaagggcaagtacaagatgaaccccagacagtggagccacatcagcgagagcgccaaggacctggtgagaagaatgctgatgctggaccccgccgagagaatcaccgtgtacgaggccctgaaccacccctggctgaaggagagagacagatacgcctacaagatccacctgcccgagaccgtggagcagctgagaaagttcaacgccagaagaaagctgaagggcgccgtgctggccgccgtgagcagccacaagttcaacagcttctacggcgacccccccgaggagctgcccgacttcagcgaggaccccaccagcagcggcctgctggccgccgagagagccgtgagccaggtgctggacagcctggaggagatccacgccctgaccgactgcagcgagaaggacctggacttcctgcacagcgtgttccaggaccagcacctgcacaccctgctggacctgtacgacaagatcaacaccaagagcagcccccagatcagaaacccccccagcgacgccgtgcagagagccaaggaggtgctggaggagatcagctgctaccccgagaacaacgacgccaaggagctgaagagaatcctgacccagccccacttcatggccctgctgcagacccacgacgtggtggcccacgaggtgtacagcgacgaggccctgagagtgacccccccccccaccagcccctacctgaacggcgacagccccgagagcgccaacggcgacatggacatggagaacgtgaccagagtgagactggtgcagttccagaagaacaccgacgagcccatgggcatcaccctgaagatgaacgagctgaaccactgcatcgtggccagaatcatgcacggcggcatgatccacagacagggcaccctgcacgtgggcgacgagatcagagagatcaacggcatcagcgtggccaaccagaccgtggagcagctgcagaagatgctgagagagatgagaggcagcatcaccttcaagatcgtgcccagctacagaacccagagcagcagctgcgaggtgatgaccctgaccaaccacccccacctgctgtag

SEQ ID NO: 44090 - DNA, 2697 bp, Artificial Sequence
  derived and/or modified sequence
atggccgacgacgacgtgctgttcgaggacgtgtacgagctgtgcgaggtgatcggcaagggccccttcagcgtggtgagaagatgcatcaacagagagaccggccagcagttcgccgtgaagatcgtggacgtggccaagttcaccagcagccccggcctgagcaccgaggacctgaagagagaggccagcatctgccacatgctgaagcacccccacatcgtggagctgctggagacctacagcagcgacggcatgctgtacatggtgttcgagttcatggacggcgccgacctgtgcttcgagatcgtgaagagagccgacgccggcttcgtgtacagcgaggccgtggccagccactacatgagacagatcctggaggccctgagatactgccacgacaacaacatcatccacagagacgtgaagccccactgcgtgctgctggccagcaaggagaacagcgcccccgtgaagctgggcggcttcggcgtggccatccagctgggcgagagcggcctggtggccggcggcagagtgggcaccccccacttcatggcccccgaggtggtgaagagagagccctacggcaagcccgtggacgtgtggggctgcggcgtgatcctgttcatcctgctgagcggctgcctgcccttctacggcaccaaggagagactgttcgagggcatcatcaagggcaagtacaagatgaaccccagacagtggagccacatcagcgagagcgccaaggacctggtgagaagaatgctgatgctggaccccgccgagagaatcaccgtgtacgaggccctgaaccacccctggctgaaggagagagacagatacgcctacaagatccacctgcccgagaccgtggagcagctgagaaagttcaacgccagaagaaagctgaagggcgccgtgctggccgccgtgagcagccacaagttcaacagcttctacggcgacccccccgaggagctgcccgacttcagcgaggaccccaccagcagcggcctgctggccgccgagagagccgtgagccaggtgctggacagcctggaggagatccacgccctgaccgactgcagcgagaaggacctggacttcctgcacagcgtgttccaggaccagcacctgcacaccctgctggacctgtacgacaagatcaacaccaagagcagcccccagatcagaaacccccccagcgacgccgtgcagagagccaaggaggtgctggaggagatcagctgctaccccgagaacaacgacgccaaggagctgaagagaatcctgacccagccccacttcatggccctgctgcagacccacgacgtggtggcccacgaggtgtacagcgacgaggccctgagagtgacccccccccccaccagcccctacctgaacggcgacagccccgagagcgccaacggcgacatggacatggagaacgtgaccagagtgagactggtgcagttccagaagaacaccgacgagcccatgggcatcaccctgaagatgaacgagctgaaccactgcatcgtggccagaatcatgcacggcggcatgatccacagacagggcaccctgcacgtgggcgacgagatcagagagatcaacggcatcagcgtggccaaccagaccgtggagcagctgcagaagatgctgagagagatgagaggcagcatcaccttcaagatcgtgcccagctacagaacccagagcagcagctgcgaggacctgcccagcaccacccagcccaagggcagacagatctacgtgagagcccagttcgagtacgaccccgccaaggacgacctgatcccctgcaaggaggccggcatcagattcagagtgggcgacatcatccagatcatcagcaaggacgaccacaactggtggcagggcaagctggagaacagcaagaacggcaccgccggcctgatccccagccccgagctgcaggagtggagagtggcctgcatcgccatggagaagaccaagcaggagcagcaggccagctgcacctggttcggcaagaagaagaagcagtacaaggacaagtacctggccaagcacaacgccgacctggtgacctacgaggaggtggtgaagctgcccgccttcaagagaaagaccctggtgctgctgggcgcccacggcgtgggcagaagacacatcaagaacaccctgatcaccaagcaccccgacagattcgcctaccccatcccccacaccaccagaccccccaagaaggacgaggagaacggcaagaactactacttcgtgagccacgaccagatgatgcaggacatcagcaacaacgagtacctggagtacggcagccacgaggacgccatgtacggcaccaagctggagaccatcagaaagatccacgagcagggcctgatcgccatcctggacgtggagccccaggccctgaaggtgctgagaaccgccgagttcgcccccttcgtggtgttcatcgccgcccccaccatcacccccggcctgaacgaggacgagagcctgcagagactgcagaaggagagcgacatcctgcagagaacctacgcccactacttcgacctgaccatcatcaacaacgagatcgacgagaccatcagacacctggaggaggccgtggagctggtgtgcaccgccccccagtgggtgcccgtgagctgggtgtactag

SEQ ID NO: 44091 - protein, 518 aa, Artificial Sequence
  derived and/or modified sequence
LYDKINTKSSPQIRNPPSDAVQRAKEVLEEISCYPENNDAKELKRILTQPHFMALLQTHDVVAHEVYSDEALRVTPPPTSPYLNGDSPESANGDMDMENVTRVRLVQFQKNTDEPMGITLKMNELNHCIVARIMHGGMIHRQGTLHVGDEIREINGISVANQTVEQLQKMLREMRGSITFKIVPSYRTQSSSCEDLPSTTQPKGRQIYVRAQFEYDPAKDDLIPCKEAGIRFRVGDIIQIISKDDHNWWQGKLENSKNGTAGLIPSPELQEWRVACIAMEKTKQEQQASCTWFGKKKKQYKDKYLAKHNAVFDQLDLVTYEEVVKLPAFKRKTLVLLGAHGVGRRHIKNTLITKHPDRFAYPIPHTTRPPKKDEENGKNYYFVSHDQMMQDISNNEYLEYGSHEDAMYGTKLETIRKIHEQGLIAILDVEPQALKVLRTAEFAPFVVFIAAPTITPGLNEDESLQRLQKESDILQRTYAHYFDLTIINNEIDETIRHLEEAVELVCTAPQWVPVSWVY

SEQ ID NO: 44092 - protein, 897 aa, Artificial Sequence
  derived and/or modified sequence
MADDDVLFEDVYELCEVIGKGPFSVVRRCINRETGQQFAVKIVDVAKFTSSPGLSTEDLKREASICHMLKHPHIVELLETYSSDGMLYMVFEFMDGADLCFEIVKRADAGFVYSEAVASHYMRQILEALRYCHDNNIIHRDVKPHCVLLASKENSAPVKLGGFGVAIQLGESGLVAGGRVGTPHFMAPEVVKREPYGKPVDVWGCGVILFILLSGCLPFYGTKERLFEGIIKGKYKMNPRQWSHISESAKDLVRRMLMLDPAERITVYEALNHPWLKERDRYAYKIHLPETVEQLRKFNARRKLKGAVLAAVSSHKFNSFYGDPPEELPDFSEDPTSSGAVSQVLDSLEEIHALTDCSEKDLDFLHSVFQDQHLHTLLDLYDKINTKSSPQIRNPPSDAVQRAKEVLEEISCYPENNDAKELKRILTQPHFMALLQTHDVVAHEVYSDEALRVTPPPTSPYLNGDSPESANGDMDMENVTRVRLVQFQKNTDEPMGITLKMNELNHCIVARIMHGGMIHRQGTLHVGDEIREINGISVANQTVEQLQKMLREMRGSITFKIVPSYRTQSSSCEDLPSTTQPKGRQIYVRAQFEYDPAKDDLIPCKEAGIRFRVGDIIQIISKDDHNWWQGKLENSKNGTAGLIPSPELQEWRVACIAMEKTKQEQQASCTWFGKKKKQYKDKYLAKHNAVFDQLDLVTYEEVVKLPAFKRKTLVLLGAHGVGRRHIKNTLITKHPDRFAYPIPHTTRPPKKDEENGKNYYFVSHDQMMQDISNNEYLEYGSHEDAMYGTKLETIRKIHEQGLIAILDVEPQALKVLRTAEFAPFVVFIAAPTITPGLNEDESLQRLQKESDILQRTYAHYFDLTIINNEIDETIRHLEEAVELVCTAPQWVPVSWVY

SEQ ID NO: 44093 - DNA, 1557 bp, Artificial Sequence
  derived and/or modified sequence
ttatacgataaaataaacacgaaatcttccccccagatcaggaatccccccagtgacgctgtgcagcgggccaaggaagtccttgaggagatatcatgctatcctgagaacaacgatgcaaaagagttgaaacgcatcctaacacagccacatttcatggcgctgctccagacacatgacgttgtcgctcatgaggtctattccgacgaggccctgagggtgacgccacctcccacgtctccctatctgaatggagattctccagaaagcgcaaacggggatatggatatggagaatgtaactagggtcagacttgtacagtttcagaaaaataccgacgagccaatgggaattacactgaagatgaatgagctgaatcactgcatcgtagccaggataatgcacggagggatgatccaccgacagggcaccctgcacgtgggagacgagatccgggagattaatggtatctcggttgcgaaccaaaccgtcgaacagctccaaaaaatgctgcgggagatgcggggttcgatcacctttaagatcgtcccaagctaccggacacaatcatcatcctgcgaagatctgccgagtacaacacagccaaaggggcgacagatttatgtgcgcgctcagttcgagtatgaccccgcaaaagatgatctcatcccttgcaaagaagcaggtattcggtttagggtgggggacatcatccaaattatatcaaaggacgatcataattggtggcagggaaagcttgaaaatagtaagaacggcacagctggactgattccatcccccgaactgcaggaatggagagttgcctgtatcgccatggagaagactaaacaggaacagcaggcctcatgtacatggtttggcaaaaagaaaaaacagtacaaggataaatatcttgccaaacacaacgccgtcttcgaccagctcgatctggttacttacgaagaggtagtgaaactgccagctttcaagaggaagacactggtgttgctgggcgcccacggcgtgggtcgacgccacatcaaaaatacactgattaccaagcaccccgacagattcgcctacccaattccccatacaacccgtccaccaaagaaagatgaggagaatggaaaaaactattattttgtcagccatgaccagatgatgcaggatatctctaacaacgagtacctagagtatggctcacacgaagacgcgatgtacgggactaagctagagacaatcaggaagatccacgaacagggtttgatcgctatcctggacgttgagccacaagccctgaaagtcctccggactgcagaattcgcccctttcgtagtctttatcgccgcacctaccattactcccggtctgaatgaagatgaatccttacaaaggctgcaaaaagagtcggacattttacagaggacgtacgcgcactacttcgatcttactatcattaacaatgagattgacgagacaattagacacttagaagaagcggtagagttggtctgcaccgcgcctcagtgggtgcccgtgagttgggtctattag

SEQ ID NO: 44094 - DNA, 2694 bp, Artificial Sequence
  derived and/or modified sequence
atggctgatgacgatgtactcttcgaggatgtttacgagctctgtgaagtgattggtaaaggtccgttcagtgtcgtgcgacgatgtatcaacagggaaacaggtcagcagttcgctgtaaagatcgtggatgtggccaaatttacaagtagtcctggcctgagtaccgaggacctgaaaagggaagcctcaatctgccatatgcttaaacacccccatattgtagaactcctggagacctacagttctgacgggatgctgtacatggtatttgagttcatggacggggcagatctgtgcttcgagatagtaaagcgggccgatgccgggtttgtctacagtgaagccgtggcctcccattacatgcggcagattctcgaagccctcagatactgccacgataacaatattatccatcgcgacgtaaagccccactgcgttctgttggccagcaaagagaacagtgctcctgtgaaattgggaggatttggggtggcgatccagctcggtgaatcagggttggtggctggggggagggttggaacgccccattttatggcccccgaggtggttaaacgagagccctacggcaagccggtcgacgtgtgggggtgcggtgttatcctgttcattcttcttagcgggtgtctgcctttctacgggacaaaggagcggctgttcgaggggattataaaggggaaatataaaatgaacccccgacagtggtcccatattagtgaatctgccaaagacctggtcaggagaatgctgatgctcgaccctgcggagcgaataaccgtgtatgaggccctgaaccatccttggctgaaggaacgggatagatatgcctacaaaatccatctgccagagaccgttgagcagttgagaaagttcaatgcaagaagaaaattgaaaggggccgtgctagccgccgtcagctctcacaaatttaacagcttttatggtgatcctcctgaggaacttccggacttcagcgaggacccgaccagctctggcgccgtgagtcaggttctcgattccctcgaggagatccatgccctgacagattgctcagagaaagatcttgactttttgcacagtgtgttccaggaccagcacttacatacactcctggatctgtacgataagattaataccaagtcttctcctcaaatcaggaacccgccatccgacgccgtccagcgcgccaaagaagtcctggaggagatttcctgctatcccgaaaataatgatgcaaaagaactgaaacggattctgacacagccgcacttcatggcccttttgcagactcatgacgtcgtagcacacgaggtgtactcggatgaagcgctgagggtcacgccgccccccacatcgccttatctgaacggggactcccctgaaagcgccaatggcgacatggacatggaaaatgtaaccagggtgcgcctggtgcaatttcaaaagaatacagatgagcctatgggcatcaccttaaaaatgaatgaactcaatcattgcattgtggccaggatcatgcacggcggaatgattcaccgccagggaacactgcacgtgggtgacgaaattagagagatcaacggcatcagtgtcgcaaaccagacagttgagcagctgcagaagatgctgcgcgagatgagggggtccatcaccttcaaaatcgtgccaagctatcgcacgcagtcctcctcctgcgaagatctgcctagcaccacccagccaaaggggcgccagatttacgtccgtgcacagtttgaatacgatccggccaaggacgatctaatcccgtgcaaagaggcaggcattaggttccgcgtgggggacatcattcagatcatttccaaagatgatcacaattggtggcaggggaaactggagaatagcaagaacgggacggccggcctcattccatcacctgaattgcaagagtggagagtcgcatgcatagcgatggaaaagaccaaacaagagcagcaagccagttgtacgtggttcgggaagaaaaaaaagcaatataaggataagtacctcgccaagcataatgccgtgttcgatcagctggaccttgtgacgtatgaagaggttgtcaagttaccagcatttaaacggaaaaccctagtcctccttggtgcccacggagtggggagacgacatattaagaacactctgatcaccaagcaccctgatcgttttgcttaccccatcccacacacaacaaggcctccgaaaaaagacgaagaaaacggaaaaaactactattttgtgtcacacgaccagatgatgcaggacatatccaacaatgagtatctcgagtacggctctcacgaggacgccatgtacggaacaaaacttgagactataagaaagatccacgagcagggtttgattgccatattggatgtggagccgcaggccctcaaggtgctaagaacagccgagttcgccccttttgtcgttttcatcgcggccccaactataacgccgggactcaatgaggacgagtctcttcagagactgcagaaagaaagtgacatcctgcagagaacatacgctcactatttcgatctcacaatcattaacaacgaaatcgacgagaccatccgacacctggaagaggccgtcgagctcgtttgcaccgcaccgcagtgggtcccagtgagctgggtgtactag

SEQ ID NO: 44095 - DNA, 1557 bp, Artificial Sequence
  derived and/or modified sequence
ctctatgacaagatcaacaccaagagcagcccccagatccggaaccccccatctgatgctgtgcagagggccaaggaggtgctggaggagatcagctgctacccagagaacaatgatgccaaggagctgaagaggatcctgacccagccccacttcatggccctgctgcagacccatgatgtggtggcccacgaggtgtacagtgatgaggccctgcgggtgaccccaccacccaccagcccctacctgaatggagacagccctgagagcgccaacggggacatggacatggagaatgtgaccagggtgcggctggtgcagttccagaagaacacagatgagcccatgggcatcaccctgaagatgaatgagctgaaccactgcatcgtggcccgcatcatgcatggaggcatgatccaccggcagggcaccctgcacgtgggagatgagatccgggagatcaatggcatctctgtggccaaccagacagtggagcagctgcagaagatgctgcgggagatgaggggcagcatcaccttcaagatcgtgcccagctaccgcacccagagcagcagctgtgaggacctgcccagcaccacccagcccaagggccggcagatctacgtgcgggcccagtttgaatatgaccctgccaaggatgacctgatcccctgcaaggaggccggcatccgcttccgggtgggggacatcatccagatcatcagcaaggatgaccacaactggtggcagggcaagctggagaacagcaagaatggaacagctggcctcatccccagccctgagctgcaggagtggagggtggcctgcatcgccatggagaagaccaagcaggagcagcaggccagctgcacctggtttgggaagaagaagaagcagtacaaggacaagtacctggccaagcacaatgctgtgtttgaccagctggacctggtgacctatgaggaggtggtgaagctgcctgccttcaagaggaagaccctggtgctgctgggcgcccacggcgtgggccgccgccacatcaagaacaccctcatcaccaagcacccagacagatttgcctaccccatcccccacaccaccaggcctcccaagaaggatgaagaaaatggcaagaactactactttgtgtcccatgaccagatgatgcaggacatcagcaacaatgagtacctggagtatggcagccatgaagatgccatgtatggcaccaagctggagaccatcaggaagatccacgagcagggcctcatcgccatcctggatgtggagccccaggccctgaaggtgctgaggacagctgagtttgccccctttgtggtgttcatcgccgcccccaccatcaccccaggcctgaatgaagatgagagcctgcagaggctgcagaaggagagtgacatcctgcagaggacctacgcccactactttgacctgaccatcatcaacaatgaaattgatgagaccatccgccacctggaggaggccgtggagctggtgtgcacagccccccagtgggtgcctgtgtcctgggtgtactag

SEQ ID NO: 44096 - DNA, 2694 bp, Artificial Sequence
  derived and/or modified sequence
atggctgatgatgatgtgctgtttgaagatgtgtatgagctgtgtgaggtgattggcaagggccccttctctgtggtgcggcgctgcatcaaccgggagaccggccagcagtttgctgtgaagatcgtggatgtggccaagttcaccagcagccctggcctgagcacagaggacctgaagcgggaggccagcatctgccacatgctgaagcacccccacatcgtggagctgctggagacctacagcagtgatggcatgctgtacatggtgtttgagttcatggatggagctgacctgtgctttgaaattgtgaagagagcagatgctggctttgtgtacagcgaggccgtggccagccactacatgaggcagatcctggaggccctgcgctactgccacgacaacaacatcatccacagagatgtgaagccccactgtgtgctgctggccagcaaagaaaattctgcccctgtgaagctgggcggctttggagtggccatccagctgggggagagcggcctggtggccggcggccgggtgggcaccccccacttcatggcccctgaggtggtgaagcgggagccctacggcaagcctgtggatgtgtggggctgtggggtcatcctcttcatcctgctgagcggctgcctgcccttctacggcaccaaggagcggctgtttgagggcatcatcaagggcaagtacaagatgaacccccggcagtggagccacatcagcgagagcgccaaggacctggtgcggaggatgctgatgctggaccctgctgagcgcatcaccgtgtatgaggccctgaaccacccctggctgaaggagcgggacagatatgcctacaagatccacctgcctgagaccgtggagcagctgaggaagttcaatgcccggaggaagctgaagggagctgtgctggccgctgtgagcagccacaagttcaacagcttctatggagaccccccagaggagctgcctgacttcagcgaggaccccaccagcagcggggctgtgtcccaggtgctggacagcctggaggagatccacgccctgacagactgcagcgagaaggacctggacttcctgcacagcgtcttccaggaccagcacctgcacaccctgctggacctgtatgacaagatcaacaccaagagcagcccccagatcagaaatcctccttctgatgctgtgcagagggccaaggaggtgctggaggagatcagctgctacccagaaaataatgatgccaaggagctgaagaggatcctgacccagccccacttcatggccctgctgcagacccatgatgtggtggcccacgaggtgtacagtgatgaggccctgcgggtgaccccaccacccaccagcccctacctgaatggagacagccctgagagcgccaatggagacatggacatggagaatgtgaccagggtgcggctggtgcagttccagaagaacacagatgagcccatgggcatcaccctgaagatgaatgagctgaaccactgcatcgtggcccgcatcatgcacggcggcatgatccaccggcagggcaccctgcacgtgggagatgagatccgggagatcaatggcatctctgtggccaaccagacagtggagcagctgcagaagatgctgcgggagatgaggggcagcatcaccttcaagatcgtgcccagctaccgcacccagagcagcagctgtgaggacctgcccagcaccacccagcccaagggccggcagatctacgtgcgggcccagtttgaatatgaccctgccaaggatgacctgatcccctgcaaggaggccggcatccgcttccgggtgggggacatcatccagatcatcagcaaggatgaccacaactggtggcagggcaagctggagaacagcaagaatggaacagctggcctcatccccagccctgagctgcaggagtggagggtggcctgcatcgccatggagaagaccaagcaggagcagcaggccagctgcacctggtttgggaagaagaagaagcagtacaaggacaagtacctggccaagcacaatgctgtgtttgaccagctggacctggtgacctatgaggaggtggtgaagctgcctgccttcaagaggaagaccctggtgctgctgggcgcccatggagtgggcagaagacacatcaagaacaccctcatcaccaagcacccagacagatttgcctaccccatcccccacaccacccggccccccaagaaggatgaggagaatggcaagaactactactttgtgtcccatgaccagatgatgcaggacatcagcaacaatgagtacctggagtatggcagccatgaagatgccatgtatggcaccaagctggagaccatcaggaagatccacgagcagggcctgattgccatcctggatgtggagccccaggccctgaaggtgctgaggacagctgagtttgccccctttgtggtgttcatcgccgcccccaccatcaccccaggcctgaatgaagatgagagcctgcagaggctgcagaaggagagtgacatcctgcagaggacctacgcccactactttgacctgaccatcatcaacaatgaaattgatgagaccatccgccacctggaggaggccgtggagctggtgtgcacagccccccagtgggtgcctgtgtcctgggtgtactag

SEQ ID NO: 44097 - DNA, 1557 bp, Artificial Sequence
  derived and/or modified sequence
ctgtacgacaagatcaacaccaagagcagcccccagatccggaacccaccatcagacgcagtccagagagccaaagaggtcttggaggagatctcgtgttatcctgagaataatgatgccaaggaactcaagagaatcttaactcagcctcattttatggcactgctgcaaacacacgacgtggtggcacacgaggtttactctgacgaagctctgcgcgtgacaccacctcccacctctccctacctcaacggcgatagtcccgagagtgcaaatggggatatggacatggaaaacgtgacaagggtgcgcctcgttcagtttcagaaaaacaccgacgagcccatgggcatcactctgaagatgaacgagttaaatcattgtattgtcgctcggatcatgcacggggggatgattcacaggcagggcacgctgcacgtgggagatgagatcagggagattaacggcatcagcgtggccaaccagacagttgaacagctgcagaaaatgctccgcgagatgagaggctccatcaccttcaagatagtgcctagttatagaactcagtcttcctcatgtgaagacctcccgtcaactacccagcctaaaggaagacagatctacgtgcgagcccaatttgagtacgatcctgctaaggatgacctgattccctgtaaagaggcaggcatccggttccgagtcggtgacatcatccagattatatccaaagatgaccacaactggtggcaggggaaactcgagaacagcaaaaacgggaccgccggcctcatccccagcccggaattgcaggaatggcgtgtcgcctgcatagccatggagaagacaaaacaggaacagcaggcctcgtgcacatggttcggaaagaagaaaaagcagtacaaagataaatatcttgctaagcacaatgccgtgttcgatcagttggatctggtgacctacgaggaggtcgtaaaacttcctgcctttaagcggaagacactcgtcctgctgggagcccacggcgtgggaaggcgtcacatcaaaaacaccctgataaccaaacaccctgaccgctttgcttatcctataccacatacaacccggcctcctaagaaggacgaggagaacggcaaaaattattattttgtcagccacgatcagatgatgcaggacatctctaataatgagtacttagaatacggcagtcatgaggacgcaatgtacggcactaagttagagacaatcaggaagattcacgagcaaggccttatagctatcctggatgttgaaccacaggcactgaaagtactgcggaccgctgaattcgccccttttgtcgttttcattgcagccccgactatcacccccggcttgaacgaggatgaaagcttgcagagactgcaaaaggagagtgatatcctgcagcgtacctacgcacactactttgatttaaccatcattaacaatgaaattgacgagaccatccgccacctggaggaggctgttgagctggtgtgtaccgcaccacagtgggtgcctgtaagctgggtttattag

SEQ ID NO: 44098 - DNA, 2694 bp, Artificial Sequence
  derived and/or modified sequence
atggccgacgacgacgtgctgttcgaggacgtgtacgagctgtgcgaagttatcggaaaggggcctttttcagtcgtgaggcgttgtatcaatagagaaactggacagcaatttgccgtgaaaattgtagatgtggccaaatttactagcagtcctggcctctctactgaggatctcaaaagagaagcctctatttgtcacatgttgaaacaccctcacattgtcgagcttttggaaacatattcatctgatggtatgctgtacatggtctttgagtttatggatggagccgacttgtgtttcgaaattgttaagcgagctgacgctgggttcgtttattccgaggctgtggcctcacactatatgagacaaatacttgaggcgctccgatactgtcacgacaataatattattcatcgagatgtgaagcctcactgtgtccttctagccagcaaagagaactcggcacctgttaaactcggtggcttcggagtggccattcagttaggcgaatcgggcctggtggccggtggccgagtgggtaccccgcattttatggccccagaggttgtgaaaagggagccctacgggaaacctgtggatgtatgggggtgcggagtgattctcttcatcttactttcaggctgcctgcctttttacgggaccaaggagcgcctctttgagggaattatcaaagggaagtacaaaatgaatcctcgccaatggagtcacatcagtgagtctgccaaagatctggtgcgtcgcatgctgatgttggaccccgcagaacggatcaccgtatatgaagcactgaaccatccttggctgaaggaaagagaccgctacgcatataagattcatctgccagagaccgtggagcagcttaggaaattcaacgctcgccggaaattgaagggagctgtgctggccgcagtgtcatcacataaattcaactctttttacggcgacccaccggaggagctacccgactttagcgaggatcccacctccagtggcgccgtgtctcaggtattggactccctggaagaaatacatgccttaaccgattgttccgagaaggatctggattttctgcattctgtcttccaagaccagcatctgcacactcttctggacctgtacgacaaaataaatactaagtccagtcctcagattcgtaatcctccatctgacgctgttcagcgcgccaaagaagtcttggaggaaattagttgttaccccgaaaacaacgacgccaaagagcttaagcggatcctcacacaaccccacttcatggctctgctccagactcacgatgtggtggcccatgaggtgtattcagacgaggcgcttcgggtaacccctcccccaacttccccttatcttaatggggacagccctgagtctgctaacggagatatggatatggagaatgtgactcgggtgcggctcgtacagttccaaaagaatacagatgagcccatggggatcacattaaaaatgaatgagctgaatcattgcatcgtggcacgcattatgcacggaggcatgatccaccgccagggaacacttcacgtgggagatgaaattcgtgagattaacggaatcagtgttgctaatcaaaccgtggaacaactgcaaaagatgcttcgggaaatgcggggatccatcacctttaaaatagttccatcttatagaacccagtcaagctcctgtgaagaccttccgagtaccacgcagcccaagggccgccagatctacgtgcgtgcccaatttgagtacgacccagccaaggacgatctgattccatgcaaagaggcaggaattcgatttcgagtcggggatattatccagatcatcagtaaggatgaccacaactggtggcaagggaagctggagaatagcaaaaacggtacagccggcctgatcccttctcccgaactgcaggagtggcgagtcgcttgcatcgcaatggagaaaacaaaacaggaacagcaggcttcatgcacctggttcggaaagaaaaaaaaacagtataaggataagtatctggccaagcacaacgccgtgttcgaccaactcgatctagtgacatatgaagaggttgtgaagctccccgcctttaaaagaaagaccctggttttgctgggggcgcacggtgtgggccgacgacacataaagaatacactgatcactaaacatccggaccgattcgcctaccctatcccccacacaaccagaccccctaaaaaggacgaggaaaatggcaagaattactacttcgtcagccacgaccagatgatgcaggacatcagcaacaatgaatatttggaatatggctctcacgaagacgctatgtacggcactaagttagagaccatccgcaagatccacgagcagggactgatcgcgatattagatgtcgaaccgcaggctctaaaagtgctgcgaaccgccgaatttgctccattcgttgtcttcatcgcggcgccaaccatcaccccgggcttaaatgaagacgagtctctgcagcgccttcagaaggaatccgacatacttcagaggacttacgcacactattttgacttgactattattaacaacgagattgacgagactattcgccacctggaggaggctgtagagcttgtatgcacagccccccaatgggtccctgtgagctgggtatactag

SEQ ID NO: 44099 - DNA, 1557 bp, Artificial Sequence
  derived and/or modified sequence
ttatatgacaagatcaacactaagagcagtccccaaatacggaatccaccaagcgatgccgtgcagcgtgccaaagaggtgctcgaggagatctcttgctacccggagaacaacgacgccaaggagctgaagagaattctgacgcagccccactttatggcactcctacagactcacgatgttgtcgcacacgaagtctattcagatgaagcgctgcgggtaacgcccccacccactagtccatatctgaacggtgattctcccgagtcagccaacggggacatggatatggaaaatgtgacaagagtcagactggtacaattccagaaaaataccgatgagccgatgggcataactttaaagatgaatgaactgaaccattgtattgtggccagaattatgcatggagggatgattcacagacagggaactttgcatgtgggcgacgaaatcagggaaattaacggtatctccgtggctaatcaaacggtggaacagcttcagaagatgctccgggaaatgagaggcagcatcacatttaagattgtcccttcttatcgaacccagagtagttcctgcgaggatctgccgagtacaactcagccaaaagggcgtcagatctacgttcgagcacagtttgaatacgatcccgcaaaagacgacctgattccgtgcaaggaagccggaatccgctttcgggtcggcgacattattcagataataagtaaggatgatcacaactggtggcagggcaagctcgagaattccaaaaatggcacggccggtttaataccttctcctgaactgcaggagtggagagtggcatgtatcgccatggagaaaaccaaacaggagcagcaggcatcctgcacgtggtttgggaagaagaaaaagcaatataaggataaatatctggctaaacataacgcggttttcgatcaactcgatcttgtcacttatgaggaggtggtgaagctaccagcatttaaacggaagacattggtgctgctgggagcgcatggcgtgggtagaagacacatcaagaacaccttgatcacaaagcacccagacagatttgcttaccctatcccccacacaactcgccctcctaagaaagatgaagagaacggtaagaactactatttcgtctcccacgatcagatgatgcaagatatctctaataacgaatacctggaatatggaagtcatgaggatgcaatgtatggtacaaagctcgagacaattcgcaagatacacgaacagggtctgatcgccattctcgacgtggagcctcaggccttgaaagtccttcggaccgcagaattcgcgccattcgtggtgttcattgcggcacctactatcacccctggtctgaacgaggatgagtccctacagcgccttcagaaagagagtgacatcctgcagagaacctacgcccattatttcgacttgaccataatcaacaacgaaattgatgagaccatccgccatctggaggaagccgtggaactggtttgtacggcgcctcagtgggtacctgtgagctgggtctattag

SEQ ID NO: 44100 - DNA, 2694 bp, Artificial Sequence
  derived and/or modified sequence
atggccgacgacgacgttctcttcgaagacgtgtacgagttatgtgaggttatcgggaagggccctttcagtgtggtgcgcagatgcattaaccgggagactggacagcaatttgctgttaagatagtggacgttgccaagtttacttccagtccgggactctccacagaagatcttaaaagggaagcttccatttgtcacatgctcaaacatccccacattgtcgaacttctggaaacatacagttcggatggaatgttgtatatggttttcgagtttatggatggagctgacctgtgcttcgagatagtgaagagggccgatgcgggtttcgtttacagcgaggctgtagcatctcattatatgagacagatcctcgaggctttgagatattgccatgacaacaacattatccatagggacgtcaaaccacactgcgtcttactagccagcaaggagaactctgctccggtaaagttgggaggattcggtgtggccattcagctcggagagtcgggattagtcgccggtgggagagtggggacgcctcacttcatggcccctgaagtggtaaaaagagagccctacgggaaaccggttgacgtttggggctgcggcgtcattctcttcatccttctgtcagggtgtctgcccttttatggaacaaaggaacgactgttcgagggcatcatcaagggtaaatataagatgaaccctcgacagtggagtcacattagcgaatccgccaaggaccttgtccggcgaatgcttatgcttgatcctgccgagcgaatcacggtttacgaagcgttgaaccacccctggctcaaagaaagagatcggtacgcctacaagattcacctacccgagacggtggagcaactgcggaaatttaatgcaagaagaaagcttaagggggcagtgctggccgcagtcagtagtcacaaatttaattctttttacggagacccgccagaagaactgccagattttagcgaagacccaactagctcgggggcagtttctcaggtcctggacagtcttgaagagatacacgcactgactgactgtagtgaaaaggatttggatttcttgcatagcgtgtttcaggatcaacatctgcataccttactggacctgtatgacaaaattaacactaagtcttctccccagataaggaaccccccatccgacgcagtccagagagccaaagaggtgcttgaggaaattagctgttacccagaaaataatgacgcgaaggagttaaagagaatcttaactcaaccacatttcatggcactcctacaaacccacgacgtcgtcgcgcatgaagtgtacagtgacgaggcgctgcgggtcaccccaccaccgacaagtccctatctgaacggtgacagtccagagtccgccaatggggatatggacatggagaacgtcactcgagtgcggttggtgcagttccaaaaaaatacggatgagcccatggggattaccctgaagatgaacgagctgaaccactgcatcgtcgcaagaatcatgcacgggggaatgattcaccgacagggtactttacacgtaggcgacgagatccgggaaattaacggcatctccgtcgccaatcagacggttgagcagttgcagaagatgctgagggagatgcgcggttctattacatttaaaattgtgcccagctatcgcacccagagctctagctgcgaggacctcccgagtaccactcagcccaagggtaggcagatttacgtacgggcacagttcgagtacgacccagccaaggatgacctgataccttgcaaggaagccggtatccggtttcgtgttggtgacatcatccaaatcatctcaaaagacgatcacaactggtggcaggggaaattagagaattcaaaaaacggaaccgctggcctgatccctagccctgagctgcaggagtggagagtcgcctgcattgctatggagaaaacgaagcaagagcaacaagcttcttgtacctggtttggaaaaaagaaaaaacaatacaaggacaaatatctcgccaagcacaatgcagtgttcgaccagttagatcttgtcacatacgaggaggttgtgaagttgccggcatttaaacgaaaaacactggtgttgctcggtgcccatggcgtgggcaggaggcatatcaagaatactctgatcacaaagcatccagatcgttttgcctatcctataccacacaccactagaccacctaagaaggacgaagagaatggaaaaaactactattttgtctcccacgaccagatgatgcaggacatcagtaataatgagtacctggagtatgggtcacacgaggacgcaatgtacgggaccaagttggagacaatccgcaaaattcatgagcagggcctgatcgcaatcctggacgtcgagccgcaggcactcaaagtgctgagaacggcagaatttgcaccctttgttgtgtttattgccgcacctaccattacaccgggtttaaacgaggacgaatctcttcagagactgcagaaagagagcgacatattgcaacgaacgtacgcccactacttcgaccttaccatcatcaacaacgagattgacgaaacaatccgtcaccttgaagaagcagtcgaactggtctgcacagctccacagtgggtccccgtgagctgggtttactag

SEQ ID NO: 44101 - DNA, 2809 bp, Artificial Sequence
  derived and/or modified sequence
gccagaaagcattctttcattttactctgtattcatgctattgaaagttgcttctgtcagaggaaacaaacactgtgattgaggaaatattgatgaattttaaatgacaaggaaattgccacattgacagaattttggtccatctatttaaagatgattttttgaaaagatatgcataagactcatattctgacaagtttcacagaacaattcagaggttattaccaagaggatcccactgaaatcatcagcctgcctttttaaaagaaaaatattgtttagtgaaataataaatatgaagctctgatttttagcaaagaattgtgagtgtttactggattttcttctttgctttttagctgtatgacaaaattaacacaaagtcttcaccacaaatcaggaatcctccaagcgatgcagtacagagagccaaagaggtattggaagaaatttcatgttaccctgagaataacgacgcaaaggaactaaagcgtattttaacacaacctcatttcatggccttacttcagactcacgacgtagtggcacatgaagtttacagtgatgaagcattgagggtcacacctcctcccacctctccctatttaaacggcgattctccagaaagtgctaacggagacatggatatggagaatgtgaccagagttcggctggtacagtttcaaaagaacacagatgaaccaatgggaatcactttaaaaatgaatgaactaaatcattgtattgttgcaagaattatgcatgggggcatgattcacaggcaaggtacacttcatgttggtgatgaaattcgagaaatcaatggcatcagtgtggctaaccaaacagtggaacaactgcaaaaaatgcttagggaaatgcgggggagtattaccttcaagattgtgccaagttaccgcactcagtcttcgtcctgtgaggacttgccatcaactacccaaccaaaaggacgacagatctatgtaagagcacaatttgaatatgatccagccaaggatgacctcatcccctgtaaagaagctggcattcgattcagagttggtgacatcatccagattattagtaaggatgatcataattggtggcagggtaaactggaaaactccaaaaatggaactgcaggtctcattccttctcctgaacttcaggaatggcgagtagcttgcattgccatggagaagaccaaacaggagcagcaggccagctgtacttggtttggcaagaaaaagaagcagtacaaagataaatatttggcaaagcacaatgcagtgtttgatcaattagatcttgtcacatatgaagaagtagtaaaactgccagcattcaagaggaaaacactagtcttattaggcgcacatggtgttgggagaagacacataaaaaacactctcatcacaaagcacccagaccggtttgcgtaccctattccacatacaaccagacctccaaagaaagacgaagaaaatggaaagaattattactttgtatctcatgaccaaatgatgcaagacatctctaataacgagtacttggagtacggcagccacgaggatgcgatgtatgggacaaaactggagaccatccggaagatccacgagcaggggctgattgcaatactggacgtggagcctcaggcactgaaggtcctgagaactgcagagtttgctccttttgttgttttcattgctgcaccaactattactccaggtttaaatgaggatgaatctcttcagcgtctgcagaaggagtctgacatcttacagagaacatatgcacactacttcgatctcacaattatcaacaatgaaattgatgagacaatcagacatctggaggaagctgttgagctcgtgtgcacagccccacagtgggtccctgtctcctgggtctattaggcctctccccagatatctgagcataactgggagcacctcatttgtggaaaagcctctttgttatcggccttgtgtcagcaggtcatggtccctagagactacctagttgtagtgtgacctacatttataattattgtcatgtccgaatagataggaggagaaaaacaattacacactaatttaaagagacagtatcttttttaatcagttctcctaaactttaataaaatgtatctttaaatgtatgtattattcaatcctttggaatgttatatttttggaaatcatagctttttatttccaaggcccctaaaaactgcacaaaatagatgctgctttctataatctattttaataataataaacaatgattctgttaccttgactgggggtggaacactacattctttttagagtctgattttatggattggaatattgggatatctttctttcctttatttatttgaaataattagtgtagtgattacaaaacagtcataaatttttaaaggccttttttctctctttttttttttttagaatagtatttttttttaagtcctttatgtaacatccagataatgtgatactgtctctttgaagcaccctgtaaaccttttagagatttgaagttgggtcttgactcttaatgcatgtggacagtcgcgagcgtttatgctgtcggtgtgtctgtgttggacaaaacaatctgtaatctacagcaaagtacattctacattccgttcatggggcacacccaggggaataagaataaaatgctattatgactaagttgtaaacctatgcacatcccttgcattttgggcaactttataaaaaaaaagaaactgatttttattaataataatcatgtagtgaaatgtgtttgt

SEQ ID NO: 44102 - DNA, 8204 bp, Artificial Sequence
  derived and/or modified sequence
tgcggccgctatcccctccggaccatggccgacgacgacgtgctgttcgaggatgtgtacgagctgtgcgaggtgatcggaaagggtcccttcagtgttgtacgacgatgtatcaacagagaaactgggcaacaatttgctgtaaaaattgttgatgtagccaagttcacatcaagtccagggttaagtacagaagatctaaagcgggaagccagtatctgtcatatgctgaaacatccacacattgtagagttattggagacatatagctcagatggaatgctttacatggttttcgaatttatggatggagcagatctgtgttttgaaatcgtaaagcgagctgacgctggttttgtgtacagtgaagctgtagccagccattatatgagacagatactggaagctctacgctactgccatgataataacataattcacagggatgtgaagccccactgtgttctccttgcctcaaaagaaaactcggcacctgttaaacttggaggctttggggtagctattcaattaggggagtctggacttgtagctggaggacgtgttggaacacctcattttatggcaccagaagtggtcaaaagagagccttacggaaagcctgtagacgtctgggggtgcggtgtgatcctttttatcctgctcagtggttgtttgcctttttacggaaccaaggaaagattgtttgaaggcattattaaaggaaaatataagatgaatccaaggcagtggagccatatctctgaaagtgccaaagacctagtacgtcgcatgctgatgctggatccagctgaaaggatcactgtttatgaagcactgaatcacccatggcttaaggagcgggatcgttacgcctacaagattcatcttccagaaacagtagagcagctgaggaaattcaatgcaaggaggaaactaaagggtgcagtactagccgctgtgtcaagtcacaaattcaactcattctatggggatccccctgaagagttaccagatttctccgaagaccctacctcctcaggagcagtctcacaggtgctggacagcctggaagagattcatgcgcttacagactgcagtgaaaaggacctagattttctacacagtgttttccaggatcagcatcttcacacactactagatctgtatgacaaaattaacacaaagtcttcaccacaaatcaggaatcctccaagcgatgcagtacagagagccaaagaggtattggaagaaatttcatgttaccctgagaataacgacgcaaaggaactaaagcgtattttaacacaacctcatttcatggccttacttcagactcacgacgtagtggcacatgaagtttacagtgatgaagcattgagggtcacacctcctcccacctctccctatttaaacggcgattctccagaaagtgctaacggagacatggatatggagaatgtgaccagagttcggctggtacagtttcaaaagaacacagatgaaccaatgggaatcactttaaaaatgaatgaactaaatcattgtattgttgcaagaattatgcatgggggcatgattcacaggcaaggtacacttcatgttggtgatgaaattcgagaaatcaatggcatcagtgtggctaaccaaacagtggaacaactgcaaaaaatgcttagggaaatgcgggggagtattaccttcaagattgtgccaagttaccgcactcagtcttcgtcctgtgaggacttgccatcaactacccaaccaaaaggacgacagatctatgtaagagcacaatttgaatatgatccagccaaggatgacctcatcccctgtaaagaagctggcattcgattcagagttggtgacatcatccagattattagtaaggatgatcataattggtggcagggtaaactggaaaactccaaaaatggaactgcaggtctcattccttctcctgaacttcaggaatggcgagtagcttgcattgccatggagaagaccaaacaggagcagcaggccagctgtacttggtttggcaagaaaaagaagcagtacaaagataaatatttggcaaagcacaatgcagtgtttgatcaattagatcttgtcacatatgaagaagtagtaaaactgccagcattcaagaggaaaacactagtcttattaggcgcacatggtgttgggagaagacacataaaaaacactctcatcacaaagcacccagaccggtttgcgtaccctattccacatacaaccagacctccaaagaaagacgaagaaaatggaaagaattattactttgtatctcatgaccaaatgatgcaagacatctctaataacgagtacttggagtacggcagccacgaggatgcgatgtatgggacaaaactggagaccatccggaagatccacgagcaggggctgattgcaatactggacgtggagcctcaggcactgaaggtcctgagaactgcagagtttgctccttttgttgttttcattgctgcaccaactattactccaggtttaaatgaggatgaatctcttcagcgtctgcagaaggagtctgacatcttacagagaacatatgcacactacttcgatctcacaattatcaacaatgaaattgatgagacaatcagacatctggaggaagctgttgagctcgtgtgcacagccccacagtgggtccctgtctcctgggtctattaggcctctccccagatatctgagcataactgggagcacctcatttgtggaaaagcctctttgttatcggccttgtgtcagcaggtcatggtccctagagactacctagttgtagtgtgacctacatttataattattgtcatgtccgaatagataggaggagaaaaacaattacacactaatttaaagagacagtatcttttttaatcagttctcctaaactttaataaaatgtatctttaaatgtatgtattattcaatcctttggaatgttatatttttggaaatcatagctttttatttccaaggcccctaaaaactgcacaaaatagatgctgctttctataatctattttaataataataaacaatgattctgttaccttgactgggggtggaacactacattctttttagagtctgattttatggattggaatattgggatatctttctttcctttatttatttgaaataattagtgtagtgattacaaaacagtcataaatttttaaaggccttttttctctctttttttttttttagaatagtatttttttttaagtcctttatgtaacatccagataatgtgatactgtctctttgaagcaccctgtaaaccttttagagatttgaagttgggtcttgactcttaatgcatgtggacagtcgcgagcgtttatgctgtcggtgtgtctgtgttggacaaaacaatctgtaatctacagcaaagtacattctacattccgttcatggggcacacccaggggaataagaataaaatgctattatgactaagttgtaaacctatgcacatcccttgcattttgggcaactttataaaaaaaaagaaactgatttttattaataataatcatgtagtgaaatgtgtttgtaattttgtctcaatttaatttgttgtaaggtggggtggggggaattgctggtttcaccatttcagatctgtgttgtctaagagtattaacgttttaattaagcaaagaaatgatttttaatctgtatgtaattgttttaaagcacccattttaagagaaaatactgtgcaatgaagaaaccagtttaggcatttgctataaactgaaatattccaaaagaatcatctataacagccctgtaaattcctttaaaatgataactaacaggacagtttgaccaattttttttaaatatacttccttttatgtgttcaataattaaatgcctttgggtccttcatttcattatagatttgttcaggcttccaagctgataatctttacaattgtataatttgttagatgctcattgaacctttgaaggcccaggagtgagtatcagttggcagggtgacaaagtagcctgccagagcacagctggaccacgtctgactcgcacagagccatgcgcccaagggccacgggtgtactggaggccacctgtggtctctccttcctcttgctgtatcccttggcacaggggaatcatctgtccttgttgctttagagacattaaccatctcataactcttccatgaagtcacattcttccaatacaggagattcgggctggggttctcagactctttgccagaggtcagtagaatgtttttcattagcatgtgagggtgtgaagtgcttatattaacctgtgatccttgaaaacataccatcattttttgcttcttgtaggttagatggccttgtcactttgtgccttggcaggatgtgcagggtgtgttctgagctgaacagctcctcttaaaggaccaaacagagaaggcattagtatacttcttttacattgtcaacaccatacccgcctccgccccccaccgcctattattaaatggtggcgatttttttttttctgatgttgttctttgccagtgaccagatgagtctgcaacttactaacaaggtattgagtgaactacttctgtatgggccccacagtggggtgaccaagccaccaaaccagagataagctcaacagtggtctcacactagatagagagagaaaccttcaaagagttgggtagggctgtgttagaactgattcgaatctgatagatgccaaggccagacagtcgttcctggtatggtactgaccacaatttcgggctcttagtgtgaaggtgcgcactctacctcttttctggtgaagcacaaagacaactacaactaacacatgggaaacagaaacttccctccctctagtggaaacccccacgcccccacttgccctttgagcccacatctccagagatgctgatgatgcctgtcttaagccatctgccatatttataaaggtggattaagcagaggaggagaaaagcaatgccaacttaaatgtctgtggccccacaattcacaagcactgtagcactcatcctcagtggctttatacgtcctctgagaagcacacaggcaggcatcattcttgccatcattccgatggtgaaatccctgcatgcagaactcattgacttctcaaagatgttacctgttccattccactaatacatgtcttctctaaagcagtgtctttatgacctagctgcatatacttacatttctgaattcagagtaatttcagtacattgctgctgctgctgctgctgctgctgctgctgctgctgctgctgctgctgctactgctacattacaattgtccactaagcaatcagagaaaattgctaaaagcttctttactgcttccattccatcagcagaacctttttttttctttctttcttttaaagaccagaatgaatgtttagagtactaaatcttattagtggtcaattgaagtattggagagccacattttgaaggttctctcccccacccaactccattccccacagcaagaaagggagtgtttttatatgttgaattctttgttaaaaagatgaaatgtcctgattttccagtcacaagacagtaattactttgcacatacagcatatcccattttaatgctaaaaagggaaatgtcactcaatttaattcatctggaagtttcccagtgtcaagataacattgtagcctttttaaatgcaattaaatgtatctcttgtcaggtgagatgatttaaaatctttgctcagagaggaaaacaaatggttgacctacttcttgctatttgcattcagaaggcatcgtcccagcccatcctattggtggcagaatatctaaagatgtcgcaaagtcccccactgcagtagaaatgcaggaggtgttcctgttccccgtccaattccttcttaggctgctagagacagccagtgggccaagccttcccctgtgctccaggcaggcctgggctgcagctactgttacctttttacagcctttgatctgatcgctgcagagttcttttgtttttaaatcacttgtatttgtctcttcattaaggcttcaagtttatttcttgaaaaagtttagtcaattgaaccaccctccaggaagattcccagcgtggaaactgcccctgaaaaacaaggcagcccaaagccagctctcttttgtcccccactgatgtcatgtcctttttttttttcatttcaggccagtttcttaacttggggcaaagagaatgtgttgctaaagctaccaagaaaactgcttgattaacaaattcttaatagaaatgcctcccacactgtctctttgaaaagagaaggcaccttggaatcggcattccaaaaccaagctccttgtcatcctcatccctcctccttcttgcttcctattatcaaactcgtgtgtgtttcttgttttctcagaactgaacacagcctcctaattccatcctcttgactagggcttacaatactgagagcgattacaggctgtaataagttaaaggtccctgagcgtggctttcttgttctgcgcctctaattaattcttctattaaaagatgctttccttctcactgcagcttacagaaaggctacaagctttaatcacagatcatttcatttgccagagcctttccttttctaactcctttagaaataagatttccctctctgtttggaatctctggatacaggactctcctccaagctcatggcttgattggctttgcctgtgcacacacacatcagtttgccttaaacttggagctatggggagtcccagattttccagcttagtgggtgaagtttagctgtcacctacatccaggaagtgggggaaaagggaaaaaaagaggatattcaccaccatgttcccatccggtctttcccctgccttgctttgtgcagcaggtgggcagacagagcccacagaaacagaagtagaaagagggccgcaccatctctggggccagcactcctaagtcttagctctttgtgggaatagaaaatcctgagctcccaccacctctcgtctgaccctccatcaactccctcgaacctgtgcaaatggactgagcaaaagaaaatggaaagagatgtttgtcaccacacaggagacctcctttctggccccaagcacaactccatctctgcgtatgctcagaaactcagaatttagctgctacttatgtgttagctccattctctctggtgtgtgactgagagaacacgccagtgttcttactgacagaggcttaggggtgaccctctctggacccagaggaagtacaacctctgtagcgagaattgtccttgggaacagaaacaggcattcctccacagtgagtggctccccctattttttttttatttggaagagaccaagaattgggggaattgatttccagtcttagctgtttcccggaatgtcatctgtgcaggcaggtaggcggctgccgggtgcagcaggcagcgtgactgatgtgaaggccgcccaatcctcacgtgctaagacccgagtatcgtgtttaattgcagtgtaggcacgtcgccattcaaactcagttctggggtggttttgcataaagttttgccaacgtgttcttttttctgtatgtattattgcctttttataaaaggtgttgaagtattgtctcagtgataaaaagagagagatgttaatggttgttgtatatttcaccgtatccaattgtaagtatttgcagggtacagcagagccttagcttgcaagagcgtttgtgcaggaggtgtccctcaacacccaggagctgaagggattggaaaggtttggattctttgtaaatgtcctgcttttctttctctctgtgtgtatctatttacatgccttagcacacgccctcccatcctgatccctttgccctgtcgccggaacaaccagaatgctggtgcgctgccggcacagtacaagttgatgaaaccctaatcagttatcttgtgtgacaggggaagaagagaaactccatagtattccttgtagaatatacatacctgtaggatgctgtgtaatgggaaaccatagaattgggcttttgtcatttcaaagttggagaaatgtatgaataaaatgtataaaacatgaaaa

SEQ ID NO: 44103 - DNA, 1557 bp, Artificial Sequence
  derived and/or modified sequence
ctgtacgacaagatcaacaccaagagcagcccccagatcagaaacccccccagcgacgccgtgcagagagccaaggaggtgctggaggagatcagctgctaccccgagaacaacgacgccaaggagctgaagagaatcctgacccagccccacttcatggccctgctgcagacccacgacgtggtggcccacgaggtgtacagcgacgaggccctgagagtgacccccccccccaccagcccctacctgaacggcgacagccccgagagcgccaacggcgacatggacatggagaacgtgaccagagtgagactggtgcagttccagaagaacaccgacgagcccatgggcatcaccctgaagatgaacgagctgaaccactgcatcgtggccagaatcatgcacggcggcatgatccacagacagggcaccctgcacgtgggcgacgagatcagagagatcaacggcatcagcgtggccaaccagaccgtggagcagctgcagaagatgctgagagagatgagaggcagcatcaccttcaagatcgtgcccagctacagaacccagagcagcagctgcgaggacctgcccagcaccacccagcccaagggcagacagatctacgtgagagcccagttcgagtacgaccccgccaaggacgacctgatcccctgcaaggaggccggcatcagattcagagtgggcgacatcatccagatcatcagcaaggacgaccacaactggtggcagggcaagctggagaacagcaagaacggcaccgccggcctgatccccagccccgagctgcaggagtggagagtggcctgcatcgccatggagaagaccaagcaggagcagcaggccagctgcacctggttcggcaagaagaagaagcagtacaaggacaagtacctggccaagcacaacgccgtgttcgaccagctggacctggtgacctacgaggaggtggtgaagctgcccgccttcaagagaaagaccctggtgctgctgggcgcccacggcgtgggcagaagacacatcaagaacaccctgatcaccaagcaccccgacagattcgcctaccccatcccccacaccaccagaccccccaagaaggacgaggagaacggcaagaactactacttcgtgagccacgaccagatgatgcaggacatcagcaacaacgagtacctggagtacggcagccacgaggacgccatgtacggcaccaagctggagaccatcagaaagatccacgagcagggcctgatcgccatcctggacgtggagccccaggccctgaaggtgctgagaaccgccgagttcgcccccttcgtggtgttcatcgccgcccccaccatcacccccggcctgaacgaggacgagagcctgcagagactgcagaaggagagcgacatcctgcagagaacctacgcccactacttcgacctgaccatcatcaacaacgagatcgacgagaccatcagacacctggaggaggccgtggagctggtgtgcaccgccccccagtgggtgcccgtgagctgggtgtactag

SEQ ID NO: 44104 - DNA, 2694 bp, Artificial Sequence
  derived and/or modified sequence
atggccgacgacgacgtgctgttcgaggacgtgtacgagctgtgcgaggtgatcggcaagggccccttcagcgtggtgagaagatgcatcaacagagagaccggccagcagttcgccgtgaagatcgtggacgtggccaagttcaccagcagccccggcctgagcaccgaggacctgaagagagaggccagcatctgccacatgctgaagcacccccacatcgtggagctgctggagacctacagcagcgacggcatgctgtacatggtgttcgagttcatggacggcgccgacctgtgcttcgagatcgtgaagagagccgacgccggcttcgtgtacagcgaggccgtggccagccactacatgagacagatcctggaggccctgagatactgccacgacaacaacatcatccacagagacgtgaagccccactgcgtgctgctggccagcaaggagaacagcgcccccgtgaagctgggcggcttcggcgtggccatccagctgggcgagagcggcctggtggccggcggcagagtgggcaccccccacttcatggcccccgaggtggtgaagagagagccctacggcaagcccgtggacgtgtggggctgcggcgtgatcctgttcatcctgctgagcggctgcctgcccttctacggcaccaaggagagactgttcgagggcatcatcaagggcaagtacaagatgaaccccagacagtggagccacatcagcgagagcgccaaggacctggtgagaagaatgctgatgctggaccccgccgagagaatcaccgtgtacgaggccctgaaccacccctggctgaaggagagagacagatacgcctacaagatccacctgcccgagaccgtggagcagctgagaaagttcaacgccagaagaaagctgaagggcgccgtgctggccgccgtgagcagccacaagttcaacagcttctacggcgacccccccgaggagctgcccgacttcagcgaggaccccaccagcagcggcgccgtgagccaggtgctggacagcctggaggagatccacgccctgaccgactgcagcgagaaggacctggacttcctgcacagcgtgttccaggaccagcacctgcacaccctgctggacctgtacgacaagatcaacaccaagagcagcccccagatcagaaacccccccagcgacgccgtgcagagagccaaggaggtgctggaggagatcagctgctaccccgagaacaacgacgccaaggagctgaagagaatcctgacccagccccacttcatggccctgctgcagacccacgacgtggtggcccacgaggtgtacagcgacgaggccctgagagtgacccccccccccaccagcccctacctgaacggcgacagccccgagagcgccaacggcgacatggacatggagaacgtgaccagagtgagactggtgcagttccagaagaacaccgacgagcccatgggcatcaccctgaagatgaacgagctgaaccactgcatcgtggccagaatcatgcacggcggcatgatccacagacagggcaccctgcacgtgggcgacgagatcagagagatcaacggcatcagcgtggccaaccagaccgtggagcagctgcagaagatgctgagagagatgagaggcagcatcaccttcaagatcgtgcccagctacagaacccagagcagcagctgcgaggacctgcccagcaccacccagcccaagggcagacagatctacgtgagagcccagttcgagtacgaccccgccaaggacgacctgatcccctgcaaggaggccggcatcagattcagagtgggcgacatcatccagatcatcagcaaggacgaccacaactggtggcagggcaagctggagaacagcaagaacggcaccgccggcctgatccccagccccgagctgcaggagtggagagtggcctgcatcgccatggagaagaccaagcaggagcagcaggccagctgcacctggttcggcaagaagaagaagcagtacaaggacaagtacctggccaagcacaacgccgtgttcgaccagctggacctggtgacctacgaggaggtggtgaagctgcccgccttcaagagaaagaccctggtgctgctgggcgcccacggcgtgggcagaagacacatcaagaacaccctgatcaccaagcaccccgacagattcgcctaccccatcccccacaccaccagaccccccaagaaggacgaggagaacggcaagaactactacttcgtgagccacgaccagatgatgcaggacatcagcaacaacgagtacctggagtacggcagccacgaggacgccatgtacggcaccaagctggagaccatcagaaagatccacgagcagggcctgatcgccatcctggacgtggagccccaggccctgaaggtgctgagaaccgccgagttcgcccccttcgtggtgttcatcgccgcccccaccatcacccccggcctgaacgaggacgagagcctgcagagactgcagaaggagagcgacatcctgcagagaacctacgcccactacttcgacctgaccatcatcaacaacgagatcgacgagaccatcagacacctggaggaggccgtggagctggtgtgcaccgccccccagtgggtgcccgtgagctgggtgtactag

SEQ ID NO: 44105 - protein, 465 aa, Artificial Sequence
  derived and/or modified sequence
MKFQGPLACLLLALCLGSGEAGPLQSGEESTGTNIGEALGHGLGDALSEGVGKAIGKEAGGAAGSKVSEALGQGTREAVGTGVRQVPGFGVADALGNRVGEAAHALGNTGHEIGRQAEDVIRHGADAVRGSWQGVPGHNGAWETSGGHGIFGSQGGLGGQGQGNPGGLGTPWVHGYPGNSAGSFGMNPQGAPWGQGGNGGPPNFGTNTQGAVAQPGYGSVRASNQNEGCTNPPPSGSGGGSSNSGGSSTGSSSGNHGGSGGGNGHKPGCEKPGNEARGSGESGIQGFRGQGVSSNMREISKEGNRLLGGSGDNYRGQGSSWGSGGGDAVGGVNTVNSETSPGMFNFDTFWKNFKSKLGFINWDAINKNQVPPPSTRALLYFSRLWEDFKQNTPFLNWKAIIEGADASSLQKRAGRDDQNYNYNQHAYPTAYGGKYSVKTPAKGGVSPSSSASRVQPGLLQWVKFW

SEQ ID NO: 44106 - DNA, 1398 bp, Artificial Sequence
  derived and/or modified sequence
atgaagtttcaggggcctctggcctgcctactcctggccctctgcctgggcagcggggaagctgggcctctgcaatcaggtgaagagtcaactgggactaacatcggcgaagctctcggacacggcctgggtgacgccctgagcgagggggttggcaaggccatcggcaaagaagcgggaggcgcagctggctccaaggtaagcgaagcactggggcaggggacaagggaggccgtagggacaggagtccgacaagtgccagggttcggcgtggccgacgctttgggaaatcgggtgggtgaggccgctcacgccctaggcaacactgggcacgagataggcaggcaagccgaggatgttattcggcatggcgctgacgccgtgagaggctcctggcagggcgtgccaggccacaatggagcctgggaaaccagcgggggacacgggatttttggaagtcaggggggattgggcggacagggccaggggaacccaggcggtttgggtactccgtgggttcacggatatcccggaaattcggctggcagctttggcatgaatcctcaaggagccccttggggacaggggggaaatggcggtcctccaaattttgggaccaacacacagggcgctgtggcccagccgggatacgggagtgtacgtgcaagcaaccaaaacgaaggctgtactaaccccccaccttccggaagcgggggaggttcttcaaactccggcggatcgtcaactgggtccagttccggcaaccacggaggttccgggggagggaacgggcacaaacctgggtgtgagaaaccaggcaacgaggcacgtggaagcggggagtccggtatccaggggttcaggggacagggggtgagttcaaatatgagagaaatatcgaaagagggtaaccggctgctaggcggatctggcgataactaccgcggacaaggcagctcatggggttctggcggaggcgacgccgtgggaggcgtcaacacagtaaacagcgaaacctccccagggatgttcaactttgacaccttttggaagaactttaagtccaaactaggctttattaactgggatgccatcaacaaaaatcaagtccctccaccctcaactcgagcactgctctacttctcacgcctgtgggaagatttcaagcagaacaccccctttttaaattggaaagcaatcatagaaggggctgatgcgtcttcactgcaaaagcgggcaggacgggacgatcaaaactacaattacaaccagcacgcctaccctacagcatatggaggcaaatactctgtgaaaactcctgccaagggaggggtatcaccttctagttccgcttcccgcgtgcaaccgggactacttcagtgggtcaagttttggtag

SEQ ID NO: 44107 - DNA, 1496 bp, Artificial Sequence
  derived and/or modified sequence
ggcagagatgaagttccaggggcccctggcctgcctcctgctggccctctgcctgggcagtggggaggctggccccctgcagagcggagaggaaagcactgggacaaatattggggaggcccttggacatggcctgggagacgccctgagcgaaggggtgggaaaggccattggcaaagaggccggaggggcagctggctctaaagtcagtgaggcccttggccaagggaccagagaagcagttggcactggagtcaggcaggttccaggctttggcgtagcagatgctttgggcaacagggtcggggaagcagcccatgctctgggaaacactgggcacgagattggcagacaggcagaagatgtcattcgacacggagcagatgctgtccgcggctcctggcagggggtgcctggccacaatggtgcttgggaaacttctggaggccatggcatctttggctctcaaggtggccttggaggccagggccagggcaatcctggaggtctggggactccgtgggtccacggataccccggaaactcagcaggcagctttggaatgaatcctcagggagctccctggggtcaaggaggcaatggagggccaccaaactttgggaccaacactcagggagctgtggcccagcctggctatggttcagtgagagccagcaaccagaatgaagggtgcacgaatcccccaccatctggctcaggtggaggctccagcaactctgggggatccagcaccggctcctcctccggcaaccacggtgggagcggcggaggaaatggacataaacccgggtgtgaaaagccagggaatgaagcccgcgggagcggggaatctgggattcagggcttcagaggacagggagtttccagcaacatgagggaaataagcaaagagggcaatcgcctccttggaggctctggagacaattatagggggcaagggtcgagctggggcagtggaggaggtgacgctgttggtggagtcaatactgtgaactctgagacgtctcctgggatgtttaactttgacactttctggaagaattttaaatccaagctgggtttcatcaactgggatgccataaacaagaaccaggtcccgccccccagcacccgagccctcctctacttcagccgactctgggaggatttcaaacagaacactcctttcctcaactggaaagcaattattgagggtgcggacgcgtcatcactgcagaaacgtgcaggcagagacgatcagaactacaattacaaccagcatgcgtatcccactgcctatggtgggaagtactcagtcaagacccctgcaaaggggggagtctcaccttcttcctcggcttcccgggtgcaacctggcctgctgcagtgggtgaagttttggtaggcaatttcttgcaaccaccaccgaggccccgaaaagcactggtcgtcagggagctcctccccttggcccccagcctgtgccagccctggcc

SEQ ID NO: 44108 - DNA, 1398 bp, Artificial Sequence
  derived and/or modified sequence
atgaagttccaaggacctctggcttgtctgttattggcactctgcttgggctccggcgaggccggaccccttcaaagtggggaagagtctacagggacaaatatcggagaagccctcgggcacgggttgggggacgctctgtccgagggggtgggcaaagcaatcggcaaggaagcgggcggggcggcaggaagcaaggtatcggaagccctcggccagggaactagagaggctgtcggcactggtgtcaggcaggttccaggatttggcgtggccgacgcactcgggaacagagttggagaggcggcccacgctctcggtaacactggccacgagatcgggagacaagctgaagacgtgattaggcatggtgccgatgcagtgcgcggttcatggcaaggcgttccaggccacaacggcgcttgggagacatctggcgggcatggaattttcggatcccagggtgggctaggaggacagggacagggaaatcctggtggactgggtactccctgggtgcatggctatcccggcaattcagctgggtccttcggaatgaatccccagggggcaccgtggggacagggagggaacggcggccctccaaactttggaactaatacacagggcgccgtggcccagcctggctatggcagcgttcgtgcctcaaatcaaaatgagggctgcaccaatcccccaccgtccgggtcaggcggggggagctctaattctggtggctcgagcactggatccagctctggaaaccatggcggcagtggagggggtaacggacataagcctgggtgcgaaaagcctgggaatgaggcccgcgggtcaggagagagcggaatccaggggttccgcggtcagggagtgtcatccaatatgcgcgaaatttctaaggagggcaaccggctgctgggtggttccggagataattataggggtcaaggatcttcctggggcagtggtgggggcgacgcagttggtggggttaacacggtcaatagcgagacctccccgggcatgttcaacttcgataccttttggaaaaattttaagtccaaactgggctttattaattgggacgctataaacaaaaatcaggtgccacccccgagcacccgggcacttctgtacttttctaggctgtgggaagacttcaagcagaacacgccattcttgaattggaaagctatcatcgaaggtgctgacgcgtccagtctgcagaagagggctgggcgtgacgaccagaactataactacaaccaacatgcttatccaacagcatacggcgggaaatattcagtcaagacgcccgctaaaggtggggtttctccatccagttcagcatcgcgagtacaaccggggttattgcaatgggtaaaattttggtag

SEQ ID NO: 44109 - DNA, 1398 bp, Artificial Sequence
  derived and/or modified sequence
atgaagtttcagggacctctggcctgccttttgctggctctttgcctcggctctggcgaagccggtcccctccagtccggggaggagagtaccggcactaatattggtgaagctttaggtcatgggctgggcgacgctttatcagagggcgtgggaaaagccatcgggaaagaagctgggggtgccgcaggatcgaaagtgagcgaagccctaggccaaggaactcgtgaggcagtgggaaccggagtgcggcaagtcccaggtttcggtgtggcagacgctttgggcaatagagtgggcgaggcggctcacgctcttgggaacaccgggcacgaaatcgggcggcaggcagaggatgtcatcaggcacggggcggatgcggtgagagggagttggcagggagtgccagggcacaatggagcctgggaaacctcgggggggcacggaatttttggaagtcaagggggcctaggtggacagggacagggcaacccgggaggacttggtacaccctgggtacatggttaccccggcaacagtgccggatcattcggtatgaatccacagggtgccccttggggtcagggaggcaatggtggccctccaaattttggcaccaacacccagggcgcagtggcacaaccgggatatggctccgtccgcgcctccaatcaaaatgaggggtgtactaatccccccccatccggctctggcggcggctcttccaactcaggcggttcaagtaccggcagtagctctggaaaccacggtggcagcggtggaggaaacggtcacaagccgggctgcgaaaagccaggaaatgaggccagggggtctggagagtctggaatccaaggcttccgcggacaaggcgtttcttcaaacatgagggaaattagtaaagagggtaacagactgctgggcggttccggagataattaccgcggacaaggcagttcttgggggtccggagggggtgatgctgtagggggagtgaatacggtgaacagtgaaacaagccctgggatgtttaattttgatactttttggaaaaattttaagtctaaactcggattcattaactgggacgcgattaacaagaatcaggtcccccctccaagcacaagggcactgctgtatttctccaggctatgggaagactttaagcaaaacacaccctttctgaattggaaagctattattgagggcgccgatgctagttctctgcagaaacgggcaggccgcgacgatcagaactacaactacaaccagcacgcataccctacagcctacgggggaaaatacagtgtaaagactccagctaagggaggagtgtccccatcgtcgagtgcttctcgggtccaaccgggattattgcaatgggtgaagttttggtag

SEQ ID NO: 44110 - DNA, 1398 bp, Artificial Sequence
  derived and/or modified sequence
atgaagttccagggccccctggcctgcctgctgctggccctgtgcctgggcagcggcgaggccggccccctgcagagcggcgaggagagcaccggcaccaacatcggcgaggccctgggccacggcctgggcgacgccctgagcgagggcgtgggcaaggccatcggcaaggaggccggcggcgccgccggcagcaaggtgagcgaggccctgggccagggcaccagagaggccgtgggcaccggcgtgagacaggtgcccggcttcggcgtggccgacgccctgggcaacagagtgggcgaggccgcccacgccctgggcaacaccggccacgagatcggcagacaggccgaggacgtgatcagacacggcgccgacgccgtgagaggcagctggcagggcgtgcccggccacaacggcgcctgggagaccagcggcggccacggcatcttcggcagccagggcggcctgggcggccagggccagggcaaccccggcggcctgggcaccccctgggtgcacggctaccccggcaacagcgccggcagcttcggcatgaacccccagggcgccccctggggccagggcggcaacggcggcccccccaacttcggcaccaacacccagggcgccgtggcccagcccggctacggcagcgtgagagccagcaaccagaacgagggctgcaccaaccccccccccagcggcagcggcggcggcagcagcaacagcggcggcagcagcaccggcagcagcagcggcaaccacggcggcagcggcggcggcaacggccacaagcccggctgcgagaagcccggcaacgaggccagaggcagcggcgagagcggcatccagggcttcagaggccagggcgtgagcagcaacatgagagagatcagcaaggagggcaacagactgctgggcggcagcggcgacaactacagaggccagggcagcagctggggcagcggcggcggcgacgccgtgggcggcgtgaacaccgtgaacagcgagaccagccccggcatgttcaacttcgacaccttctggaagaacttcaagagcaagctgggcttcatcaactgggacgccatcaacaagaaccaggtgcccccccccagcaccagagccctgctgtacttcagcagactgtgggaggacttcaagcagaacacccccttcctgaactggaaggccatcatcgagggcgccgacgccagcagcctgcagaagagagccggcagagacgaccagaactacaactacaaccagcacgcctaccccaccgcctacggcggcaagtacagcgtgaagacccccgccaagggcggcgtgagccccagcagcagcgccagcagagtgcagcccggcctgctgcagtgggtgaagttctggtag

SEQ ID NO: 44111 - DNA, 1398 bp, Artificial Sequence
  derived and/or modified sequence
atgaaattccaaggccccttagcgtgcttgttgttggccctttgcttaggttccggggaagcggggcctctacagtccggcgaagagtctacaggcacaaacataggggaagctctgggacatggtttgggcgatgctctgagcgaaggcgttggcaaggccatcggaaaggaagccggtggtgctgccggatccaaagtgagcgaagctctcggacaagggacacgggaagctgtgggaaccggcgtgagacaagtacccggctttggggttgctgatgcgctcgggaaccgcgtgggcgaagctgcccacgccctcgggaatactggccatgagatcggccgtcaggccgaggatgtcattagacacggggccgacgcagtccgcggttcttggcagggagtgcccgggcacaacggtgcctgggagacctccggaggccacgggatttttggctcacaggggggattgggtggacagggacaaggaaaccctggggggctcgggacaccttgggtacatggatatcccggaaatagtgccggttcgttcggaatgaacccacagggtgccccatggggacaggggggcaacggtgggcctccaaatttcggaacaaacacccagggagcggtggcccagcctggctacggctctgtgcgagcatccaatcagaatgagggatgcacgaacccaccaccaagcggatccggaggtggttcgtcaaattccggaggctcctccacagggagcagctccgggaaccacggaggctccggcggcgggaacgggcataagcctggctgtgagaaaccgggtaacgaagcgcggggatccggcgaatcagggatccaggggtttagaggacagggtgtgtctagtaatatgagagagatttctaaagaaggcaatcgactcttgggggggagcggggacaattaccgaggccaggggagttcttggggcagcggtggaggcgacgctgtgggaggggtgaacactgttaactccgaaacatctcccgggatgttcaatttcgataccttctggaaaaactttaagtctaaattagggtttatcaactgggatgcaattaacaaaaaccaggtgcctcccccttccacccgcgcgcttctgtatttctcgcggctgtgggaggatttcaaacagaacacaccctttttaaattggaaggcaatcatagagggggccgatgccagttctctacagaaacgtgcgggccgcgatgatcaaaactacaattacaatcagcacgcctacccaaccgcatacggggggaaatactccgtaaaaactcccgccaagggtggagtatcccctagtagcagtgctagtcgagtgcagcctgggttattgcagtgggtgaaattttggtag

SEQ ID NO: 44112 - DNA, 1398 bp, Artificial Sequence
  derived and/or modified sequence
atgaagttccagggccccctggcctgcctgctgctggccctgtgcctgggcagcggggaggccggccccctgcagagcggggaggagagcacaggcaccaacattggagaggccctgggccacggcctgggagatgccctgtctgagggcgtgggcaaggccatcggcaaggaggccggcggcgctgctggcagcaaggtgtctgaggccctgggccagggcacccgggaggccgtgggcactggagtgcggcaggtgcccggctttggagtggctgatgccctgggcaacagagtgggggaggccgcccacgccctgggcaacacaggccatgaaattggccggcaggccgaggatgtgatcagacatggagcagatgctgtgcggggctcctggcagggcgtgcccggccacaatggagcctgggagaccagcggcggccacggcatcttcggcagccagggcggcctgggcggccagggccagggcaaccctgggggcctgggcaccccctgggtgcacggctacccaggcaacagcgctggcagctttggcatgaacccccagggcgccccctggggccagggcggcaatggaggcccccccaactttggcaccaacacccagggcgctgtggcccagcccggctacggctctgtgcgggccagcaaccagaatgaaggctgcaccaaccccccaccttctggcagcggcggcggcagcagcaacagcggcggcagcagcacaggcagcagcagcggcaaccacggcggcagcggcggcggcaatggccacaagccaggctgtgagaagccaggaaatgaggcccggggcagcggggagagcggcatccagggcttccggggccagggcgtgagcagcaacatgagggagatcagcaaggagggcaaccggctgctgggcggcagcggggacaactaccggggccagggcagctcctggggcagcggcggcggagatgctgtgggcggcgtgaacacagtgaacagcgagaccagccctggcatgttcaactttgacaccttctggaagaacttcaagagcaagctgggcttcatcaactgggatgccatcaacaagaaccaggtgcccccacccagcacccgggccctgctgtacttcagccggctgtgggaggacttcaagcagaacacccccttcctgaactggaaggccatcattgaaggagcagatgccagcagcctgcagaagagagctggaagagatgaccagaactacaactacaaccagcacgcctaccccacagcctatggaggcaagtacagcgtgaagaccccagccaagggcggcgtgagccccagcagcagcgccagccgggtgcagcccggcctgctgcagtgggtgaagttctggtag

SEQ ID NO: 44113 - DNA, 1398 bp, Artificial Sequence
  derived and/or modified sequence
atgaagttccagggccccctggcctgcctgctgctggccctgtgcctcggatccggagaggcaggaccactgcagtctggtgaagagtctacagggacaaatatcggggaagccctgggtcatggattgggcgatgcattgtccgaaggggtagggaaggcaattggcaaagaagctggcggtgcggcaggctctaaagtgagcgaggcactggggcaaggcaccagggaagccgtggggacgggcgtgcggcaggtcccaggattcggcgtggccgacgccttgggcaacagggtaggagaggccgcccatgccctcggcaacacgggtcacgagatcggaagacaggctgaggatgtgattagacatggggcggatgctgtccgaggaagctggcagggcgtgccggggcacaatggggcatgggagacatcgggaggacatggcatttttggcagccaaggcggcctgggtggacagggtcagggaaacccaggaggactaggtaccccgtgggtgcacggttacccgggcaacagcgcaggtagcttcggaatgaaccctcagggagccccatggggccagggtgggaacggtggacctccaaactttggtaccaacactcaaggtgcggtggcccaacccggctacgggagtgtccgagcctccaatcagaacgaaggctgcacaaatcccccaccctccggttctgggggcgggtcttctaattccggcgggagcagcacagggagcagctctgggaaccatggggggagtggaggtggcaacggccacaagcctggctgcgagaaaccaggcaacgaggctcggggtagtggagagagtgggattcaggggttccgcggacagggggtgtcatcaaatatgcgagagatttccaaagagggcaacagattgctgggcggatcaggagataactatagaggccagggaagttcttggggctccggcggcggcgacgctgtgggcggggtgaacacggtgaactcagaaacctcccccgggatgtttaattttgacactttttggaagaattttaaaagtaagctaggttttataaactgggacgcaattaataaaaaccaggtgcctccgcctagcacacgcgctctgctgtatttcagccggctgtgggaggatttcaagcagaacacaccctttctgaattggaaagccatcattgaaggcgctgatgccagttccctgcaaaagagagccgggcgcgacgaccagaactacaattataatcagcatgcgtaccccactgcctatggaggcaaatattctgtcaaaaccccggcaaagggcggtgtgagcccatcttccagcgccagccgagtacagcccggacttttacaatgggttaaattttggtag

SEQ ID NO: 44114 - RNA, 1398 nt, Artificial Sequence
  derived and/or modified sequence
augaaguuccaaggaccucuggcuugucuguuauuggcacucugcuugggcuccggcgaggccggaccccuucaaaguggggaagagucuacagggacaaauaucggagaagcccucgggcacggguugggggacgcucuguccgagggggugggcaaagcaaucggcaaggaagcgggcggggcggcaggaagcaagguaucggaagcccucggccagggaacuagagaggcugucggcacuggugucaggcagguuccaggauuuggcguggccgacgcacucgggaacagaguuggagaggcggcccacgcucucgguaacacuggccacgagaucgggagacaagcugaagacgugauuaggcauggugccgaugcagugcgcgguucauggcaaggcguuccaggccacaacggcgcuugggagacaucuggcgggcauggaauuuucggaucccagggugggcuaggaggacagggacagggaaauccugguggacuggguacucccugggugcauggcuaucccggcaauucagcuggguccuucggaaugaauccccagggggcaccguggggacagggagggaacggcggcccuccaaacuuuggaacuaauacacagggcgccguggcccagccuggcuauggcagcguucgugccucaaaucaaaaugagggcugcaccaaucccccaccguccgggucaggcggggggagcucuaauucugguggcucgagcacuggauccagcucuggaaaccauggcggcaguggaggggguaacggacauaagccugggugcgaaaagccugggaaugaggcccgcgggucaggagagagcggaauccagggguuccgcggucagggagugucauccaauaugcgcgaaauuucuaaggagggcaaccggcugcugggugguuccggagauaauuauaggggucaaggaucuuccuggggcaguggugggggcgacgcaguuggugggguuaacacggucaauagcgagaccuccccgggcauguucaacuucgauaccuuuuggaaaaauuuuaaguccaaacugggcuuuauuaauugggacgcuauaaacaaaaaucaggugccacccccgagcacccgggcacuucuguacuuuucuaggcugugggaagacuucaagcagaacacgccauucuugaauuggaaagcuaucaucgaaggugcugacgcguccagucugcagaagagggcugggcgugacgaccagaacuauaacuacaaccaacaugcuuauccaacagcauacggcgggaaauauucagucaagacgcccgcuaaaggugggguuucuccauccaguucagcaucgcgaguacaaccgggguuauugcaauggguaaaauuuugguag

SEQ ID NO: 44115 - RNA, 1398 nt, Artificial Sequence
  derived and/or modified sequence
augaaguuucagggaccucuggccugccuuuugcuggcucuuugccucggcucuggcgaagccgguccccuccaguccggggaggagaguaccggcacuaauauuggugaagcuuuaggucaugggcugggcgacgcuuuaucagagggcgugggaaaagccaucgggaaagaagcugggggugccgcaggaucgaaagugagcgaagcccuaggccaaggaacucgugaggcagugggaaccggagugcggcaagucccagguuucgguguggcagacgcuuugggcaauagagugggcgaggcggcucacgcucuugggaacaccgggcacgaaaucgggcggcaggcagaggaugucaucaggcacggggcggaugcggugagagggaguuggcagggagugccagggcacaauggagccugggaaaccucgggggggcacggaauuuuuggaagucaagggggccuagguggacagggacagggcaacccgggaggacuugguacacccuggguacaugguuaccccggcaacagugccggaucauucgguaugaauccacagggugccccuuggggucagggaggcaaugguggcccuccaaauuuuggcaccaacacccagggcgcaguggcacaaccgggauauggcuccguccgcgccuccaaucaaaaugagggguguacuaauccccccccauccggcucuggcggcggcucuuccaacucaggcgguucaaguaccggcaguagcucuggaaaccacgguggcagcgguggaggaaacggucacaagccgggcugcgaaaagccaggaaaugaggccagggggucuggagagucuggaauccaaggcuuccgcggacaaggcguuucuucaaacaugagggaaauuaguaaagaggguaacagacugcugggcgguuccggagauaauuaccgcggacaaggcaguucuuggggguccggagggggugaugcuguagggggagugaauacggugaacagugaaacaagcccugggauguuuaauuuugauacuuuuuggaaaaauuuuaagucuaaacucggauucauuaacugggacgcgauuaacaagaaucagguccccccuccaagcacaagggcacugcuguauuucuccaggcuaugggaagacuuuaagcaaaacacacccuuucugaauuggaaagcuauuauugagggcgccgaugcuaguucucugcagaaacgggcaggccgcgacgaucagaacuacaacuacaaccagcacgcauacccuacagccuacgggggaaaauacaguguaaagacuccagcuaagggaggaguguccccaucgucgagugcuucucggguccaaccgggauuauugcaaugggugaaguuuugguag

SEQ ID NO: 44116 - protein, 390 aa, Artificial Sequence
  derived and/or modified sequence
MKFQGPLACLLLALCLGSGEAGPLQSGEESTGTNIGEALGHGLGDALSEGVGKAIGKEAGGAAGSKVSEALGQGTREAVGTGVRQVPGFGVADALGNRVGEAAHALGNTGHEIGRQAEDVIRHGADAVRGSWQGVPGHNGAWETSGGHGIFGSQGGLGGQGQGNPGGLGTPWVHGYPGNSAGSFGMNPQGAPWGQGGNGGPPNFGTNTQGAVAQPGYGSVRASNQNEGCTNPPPSGSGGGSSNSGGGSGSQSGSSGSGSNGDNNNGSSSGGSSSGSSSGGSSGGSSGGSSGNSGGSRGDSGSESSWGSSTGSSSGNHGGSGGGNGHKPGCEKPGNEARGSGESGIQGFRGQGVSSNMRNSETSPGMFNFDTFWKNFKSKLGFINWDAINK

SEQ ID NO: 44117 - protein, 398 aa, Artificial Sequence
  derived and/or modified sequence
MKFQGPLACLLLALCLGSGEAGPLQSGEESTGTNIGEALGHGLGDALSEGVGKAIGKEAGGAAGSKVSEALGQGTREAVGTGVRQVPGFGVADALGNRVGEAAHALGNTGHEIGRQAEDVIRHGADAVRGSWQGVPGHNGAWETSGGHGIFGSQGGLGGQGQGNPGGLGTPWVHGYPGNSAGSFGMNPQGAPWGQGGNGGPPNFGTNTQGAVAQPGYGSVRASNQNEGCTNPPPSGSGGGSSNSGGGSGSQSGSSGSGSNGDNNNGSSSGGSSSGSSSGGSSGGSSGGSSGNSGGSRGDSGSESSWGSSTGSSSGNHGGSGGGNGHKPGCEKPGNEARGSGESGIQGFRGQGVSSNMRNSETSPGMFNFDTFWKNFKSKLGFINWDAINKDQRSSRIP

SEQ ID NO: 44118 - protein, 386 aa, Artificial Sequence
  derived and/or modified sequence
MKFQGPLACLLLALCLGSGEAGPLQSGEESTGTNIGEALGHGLGDALSEGVGKAIGKEAGGAAGSKVSEALGQGTREAVGTGVRQVPGFGVADALGNRVGEAAHALGNTGHEIGRQAEDVIRHGADAVRGSWQGVPGHNGAWETSGGHGIFGSQGGLGGQGQGNPGGLGTPWVHGYPGNSAGSFGMNPQGAPWGQGGNGGPPNFGTNTQGAVAQPGYGSVRASNQNEGCTNPPPSGSGGGSSNSGGGSGSQSGSSGSGSNGDNNNGSSSGGSSSGSSSGGSSGGSSGGSSGNSGGSRGDSGSESSWGSSTGSSSGNHGGSGGGNGHKPGCEKPGNEARGSGESGIQNSETSPGMFNFDTFWKNFKSKLGFINWDAINKDQRSSRIP

SEQ ID NO: 44119 - protein, 189 aa, Artificial Sequence
  derived and/or modified sequence
MLGITSCSDQQAKEGEGLEGSSTGSSSGNHGGSGGGNGHKPGCEKPGNEARGSGESGIQNSETSPGMFNFDTFWKNFKSKLGFINWDAINKNQVPPPSTRALLYFSRLWEDFKQNTPFLNWKAIIEGADASSLQKRAGRDDQNYNYNQHAYPTAYGGKYSVKTPAKGGVSPSSSASRVQPGLLQWVKFW

SEQ ID NO: 44120 - DNA, 1431 bp, Artificial Sequence
  derived and/or modified sequence
atgaaatttcaggggcctctggcttgcctgctactggctctgtgcctgggctccggagaagcaggtccacttcagagtggtgaggaatctaccggaaccaatatcggtgaggccctgggtcacgggctgggggatgccttgagtgagggtgttggtaaagcgatcggaaaagaagccggaggagccgctggcagtaaggtcagcgaagcacttggtcaagggacccgtgaggccgttggtacgggagtgcggcaggtacccggttttggggtcgcagacgctttgggaaatcgcgtcggtgaagccgctcatgccttgggtaacactggccacgagattggtaggcaggccgaagacgttattcgccacggcgctgacgcagtcagaggctcttggcagggtgttcccggtcacaatggggcttgggagacctctggaggccacggaatattcgggtcccaggggggactgggcggtcaagggcagggtaatccgggtggattgggtaccccttgggtccatgggtaccccggtaacagcgcaggtagttttggcatgaatccacagggcgcaccatggggccaaggcggtaacggcggtcctcccaatttcgggaccaatactcagggggcagtggcccagcctgggtatgggagtgtccgcgcatccaaccagaatgagggttgcacgaacccccctccatcgggatccggcggaggcagtagcaattcgggaggcggatccggctctcaaagtggcagttctgggagtggtagcaatggcgacaataacaacggatcatcctcagggggatctagctcgggttctagttcgggcggttccagcggaggttcctcaggcggtagtagtggaaattcagggggtagtaggggcgactccgggtcggagagttcttggggctcctccacgggatccagctcaggaaatcatggaggaagtgggggaggaaatggacacaaacccggatgcgagaagcctggcaacgaggcacggggaagcggcgaaagcggtattcagaactctgaaacttcaccagggatgttcaacttcgatacattttggaagaattttaagtcaaaactggggtttatcaattgggatgccattaacaagaatcaggtgcctcctccgtcaacaagagccctgttgtattttagtcggttgtgggaggactttaagcaaaacacaccttttctgaattggaaagccatcattgaaggagccgatgcctcaagtcttcagaaacgggctggcagagacgatcagaattacaattataaccagcacgcttaccctacagcgtatgggggaaaatactctgtcaagacccctgcaaaaggcggtgtgtccccatcatcgagcgcatcccgggtccaaccaggcttattgcagtgggtgaaattctggtag

SEQ ID NO: 44121 - DNA, 570 bp, Artificial Sequence
  derived and/or modified sequence
atgctgggaatcacctcgtgcagtgatcagcaggccaaggaaggggaggggctggagggcagctcaaccggctccagctccggcaatcacggcggttccgggggtggcaacggtcacaagccaggatgtgagaagcccggaaacgaggcacgcggaagcggagagtcaggaattcagaatagtgaaaccagcccaggcatgtttaacttcgacactttttggaagaacttcaaaagcaagcttggtttcatcaattgggacgcaataaacaagaaccaggtgcccccaccatccaccagggctctcttgtactttagccgcctctgggaggacttcaagcagaatacccccttccttaactggaaggctattatcgaaggagcagacgcaagctcattacagaagagagcgggacgggatgatcagaactataactataatcagcacgcctatcccaccgcctatgggggaaagtatagcgtgaaaacccctgccaaagggggagtttctccctccagctccgcaagccgggtgcagccagggctcttgcagtgggtgaagttctggtag

SEQ ID NO: 44122 - DNA, 867 bp, Artificial Sequence
  derived and/or modified sequence
attgcgtagttccgaataccctcggccacacctggccttctccatgctcggaataacttcctgcagcgaccaacaggctaaagagggggaaggtctggagggatccagcaccggctcctcctccggcaaccacggtgggagcggcggaggaaatggacataaacccgggtgtgaaaagccagggaatgaagcccgcgggagcggggaatctgggattcagaactctgagacgtctcctgggatgtttaactttgacactttctggaagaattttaaatccaagctgggtttcatcaactgggatgccataaacaagaaccaggtcccgccccccagcacccgagccctcctctacttcagccgactctgggaggatttcaaacagaacactcctttcctcaactggaaagcaattattgagggtgcggacgcgtcatcactgcagaaacgtgcaggcagagacgatcagaactacaattacaaccagcatgcgtatcccactgcctatggtgggaagtactcagtcaagacccctgcaaaggggggagtctcaccttcttcctcggcttcccgggtgcaacctggcctgctgcagtgggtgaagttttggtaggcaatttcttgcaaccaccaccgaggccccgaaaagcactggtcgtcagggagctcctccccttggcccccagcctgtgccagccctggcccggctgccacacctctgtttcctaggctggggacccagcttgtctctccttgtttcttcccactgcactgtggtgcttcagtggccaccagcctcgtcacatacaccagcatctttctgtacctcctccctttggtgacctgaagtcactgtgacagttctcc

SEQ ID NO: 44123 - DNA, 1431 bp, Artificial Sequence
  derived and/or modified sequence
atgaaatttcaaggaccacttgcctgtcttctactggctttgtgccttggtagcggtgaggctggccccttgcagtctggggaagagtctaccggaactaatatcggggaagcactagggcatggactaggggatgccctcagcgaaggagttggcaaggccattggtaaggaggcaggcggtgccgccggcagcaaggtatccgaggctctgggccagggaacccgtgaggcggtaggcacgggcgtcaggcaggtaccggggttcggcgtggccgatgcgcttggcaaccgggtcggagaagccgcccacgctctgggaaataccggacatgagatcggtcggcaggctgaagatgtcattcgccacggggccgacgcagttaggggctcatggcagggggtgcctggtcataatggcgcctgggaaacatccggaggccacggaattttcgggtcccaaggcgggctcggaggacagggccaaggcaaccccggtgggctcgggacgccatgggtgcacggataccccggcaattctgccggctcttttggaatgaatccccagggggcgccctgggggcaggggggcaacggcggcccgcccaacttcggaacgaacactcaaggagcggtggcgcaacctggctatggttctgtccgcgctagtaatcagaacgagggatgcacaaacccacctcctagtggttccggaggcggctcatctaattccggcggtgggagcggctcccaaagcggttccagcgggtccgggagtaatggggacaataataatggctcgagctcaggtggaagcagctctggtagttcctcaggtggttcctctggcggctcaagtggaggctcaagtggaaatagcgggggatcaaggggagatagtggctccgaaagctcgtggggctcaagtacgggttccagtagcggtaaccatggcggctcaggcggcgggaacgggcacaaacccgggtgcgagaaaccgggcaatgaggccaggggtagcggcgaatccgggatccaaaattccgagacatcacccggcatgtttaacttcgatactttctggaagaatttcaagtcaaaacttggatttattaactgggacgctattaacaagaaccaggtccctcccccctctactcgcgccctcttgtatttcagtagactctgggaagatttcaaacaaaatactcccttcctgaattggaaagcaatcatcgaaggcgccgatgcatcctcgttgcaaaagagagcgggacgcgatgatcagaactacaactataaccaacatgcttaccccacggcttacggagggaaatactcagtgaaaacgccagcgaaggggggtgtttcccccagtagtagcgctagccgggtgcaaccaggattattacaatgggtaaaattttggtag

SEQ ID NO: 44124 - DNA, 570 bp, Artificial Sequence
  derived and/or modified sequence
atgctcggcatcacatcttgttccgatcagcaggctaaagagggcgaaggactcgagggcagctctaccgggagcagcagcggtaaccacggtggctccggcggaggtaacggccataagccagggtgcgagaagcctgggaacgaggcccggggatcaggtgagtctggtatccagaattcagagacaagccctggaatgtttaacttcgataccttttggaagaacttcaaatccaaactcggtttcataaactgggacgcgattaataaaaaccaggtccccccaccatccacacgcgcacttctgtactttagccgcctctgggaggacttcaagcaaaatacccccttcctgaactggaaagccatcattgaaggcgcagacgcaagttcgctgcagaagagagcaggacgggacgaccagaattataattacaaccaacacgcataccctaccgcatatggcggcaaatattcagtgaagactccagctaagggcggggtatccccctcatcctccgccagcagagtacaacccggtctcttgcagtgggtgaaattctggtag

SEQ ID NO: 44125 - DNA, 1431 bp, Artificial Sequence
  derived and/or modified sequence
atgaagttccagggaccgctggcttgtcttcttctggcactgtgtttaggatctggcgaagcagggcccctgcaaagcggggaggaatcaaccggaacaaacataggtgaagctctgggacacggcctgggagacgcgttgagtgagggagtggggaaggcaatcggcaaggaggcaggaggagccgctggtagcaaggtatccgaggcacttggccaggggacccgagaggccgtggggactggcgtgcggcaggtgcccggattcggcgtggccgacgccttaggtaacagagttggtgaggctgcccacgcactcggtaatacagggcacgaaatcgggagacaggcggaagacgtgattagacacggcgcagatgccgtgcggggaagctggcaaggtgtgcctggccataacggtgcctgggaaacttccggagggcacggaatcttcgggtcacagggggggctgggagggcagggacagggcaatccgggcgggcttgggacaccatgggtacacggctaccctggcaacagcgctgggagcttcggaatgaatcctcagggggctccttgggggcaggggggaaatggaggcccccccaactttgggacgaacacgcaaggggcagtcgcacaacccggctacggctccgtcagagctagcaatcaaaacgaggggtgtacaaaccccccgccatcagggtcaggtggaggatcgtcaaactccgggggtggcagcggctctcagagcggttcgtcgggaagcggatcaaatggcgataacaataatggcagtagtagcggcggtagttccagtggctcaagtagcggtggctcatccgggggctcttcaggagggtcatccggcaactctggcggcagtagaggagacagcggatcagagagttcttggggtagctcaacaggaagctctagtggcaaccacggaggctcaggaggcggcaatggacataagcccggctgcgaaaaacccggtaacgaggctaggggtagcggcgaatccgggatccagaacagtgaaacatcacctggcatgttcaactttgacactttctggaagaattttaagtcaaaactcgggtttattaattgggatgctataaataaaaatcaagttcccccaccttcaacacgcgctctgttgtacttctctagactgtgggaggactttaagcagaatactccttttttaaactggaaagccatcatagagggtgccgatgcgtcttcgctgcagaagcgagccggccgggacgaccagaattataactacaatcaacatgcataccctacagcatacggcgggaaatacagtgtcaaaacacctgcaaaggggggcgtttccccttctagttcagcaagtcgagttcagcctggcctcctccagtgggtaaagttttggtag

SEQ ID NO: 44126 - DNA, 570 bp, Artificial Sequence
  derived and/or modified sequence
atgttaggtatcacctcatgttccgaccagcaggcgaaagaaggcgaaggattagaaggctcctctaccggttcgtcatccgggaaccatggcgggtccggcggcggcaatgggcataaaccgggctgtgagaaaccggggaatgaggccaggggatcaggagaaagtggcattcagaactcggaaactagccctggcatgttcaacttcgacaccttctggaaaaattttaagtcaaagctggggttcatcaattgggatgctatcaataaaaaccaagtcccacctccctccactagagcacttctgtactttagccgcctctgggaggacttcaagcaaaatacccccttcctgaactggaaagccatcattgaaggcgcagacgcaagttcgctgcagaagagagcaggacgggacgaccagaattataattacaaccaacacgcataccctaccgcatatggcggcaaatattcagtgaagactccagctaagggcggggtatccccctcatcctccgccagcagagtacaacccggtctcttgcagtgggtgaaattctggtag

SEQ ID NO: 44127 - DNA, 1431 bp, Artificial Sequence
  derived and/or modified sequence
atgaagttccagggccccctggcctgcctgctgctggccctgtgcctgggcagcggcgaggccggccccctgcagagcggcgaggagagcaccggcaccaacatcggcgaggccctgggccacggcctgggcgacgccctgagcgagggcgtgggcaaggccatcggcaaggaggccggcggcgccgccggcagcaaggtgagcgaggccctgggccagggcaccagagaggccgtgggcaccggcgtgagacaggtgcccggcttcggcgtggccgacgccctgggcaacagagtgggcgaggccgcccacgccctgggcaacaccggccacgagatcggcagacaggccgaggacgtgatcagacacggcgccgacgccgtgagaggcagctggcagggcgtgcccggccacaacggcgcctgggagaccagcggcggccacggcatcttcggcagccagggcggcctgggcggccagggccagggcaaccccggcggcctgggcaccccctgggtgcacggctaccccggcaacagcgccggcagcttcggcatgaacccccagggcgccccctggggccagggcggcaacggcggcccccccaacttcggcaccaacacccagggcgccgtggcccagcccggctacggcagcgtgagagccagcaaccagaacgagggctgcaccaaccccccccccagcggcagcggcggcggcagcagcaacagcggcggcggcagcggcagccagagcggcagcagcggcagcggcagcaacggcgacaacaacaacggcagcagcagcggcggcagcagcagcggcagcagcagcggcggcagcagcggcggcagcagcggcggcagcagcggcaacagcggcggcagcagaggcgacagcggcagcgagagcagctggggcagcagcaccggcagcagcagcggcaaccacggcggcagcggcggcggcaacggccacaagcccggctgcgagaagcccggcaacgaggccagaggcagcggcgagagcggcatccagaacagcgagaccagccccggcatgttcaacttcgacaccttctggaagaacttcaagagcaagctgggcttcatcaactgggacgccatcaacaagaaccaggtgcccccccccagcaccagagccctgctgtacttcagcagactgtgggaggacttcaagcagaacacccccttcctgaactggaaggccatcatcgagggcgccgacgccagcagcctgcagaagagagccggcagagacgaccagaactacaactacaaccagcacgcctaccccaccgcctacggcggcaagtacagcgtgaagacccccgccaagggcggcgtgagccccagcagcagcgccagcagagtgcagcccggcctgctgcagtgggtgaagttctggtag

SEQ ID NO: 44128 - DNA, 570 bp, Artificial Sequence
  derived and/or modified sequence
atgctgggcatcaccagctgcagcgaccagcaggccaaggagggcgagggcctggagggcagcagcaccggcagcagcagcggcaaccacggcggcagcggcggcggcaacggccacaagcccggctgcgagaagcccggcaacgaggccagaggcagcggcgagagcggcatccagaacagcgagaccagccccggcatgttcaacttcgacaccttctggaagaacttcaagagcaagctgggcttcatcaactgggacgccatcaacaagaaccaggtgcccccccccagcaccagagccctgctgtacttcagcagactgtgggaggacttcaagcagaacacccccttcctgaactggaaggccatcatcgagggcgccgacgccagcagcctgcagaagagagccggcagagacgaccagaactacaactacaaccagcacgcctaccccaccgcctacggcggcaagtacagcgtgaagacccccgccaagggcggcgtgagccccagcagcagcgccagcagagtgcagcccggcctgctgcagtgggtgaagttctggtag

SEQ ID NO: 44129 - DNA, 1927 bp, Artificial Sequence
  derived and/or modified sequence
tctgagaagcccaggcagttgaggacaggagagagaaggctgcagacccagagggagggaggacagggagtcggaaggaggaggacagaggagggcacagagacgcagagcaagggcggcaaggaggagaccctggtgggaggaagacactctggagagagagggggctgggcagagatgaagttccaggggcccctggcctgcctcctgctggccctctgcctgggcagtggggaggctggccccctgcagagcggagaggaaagcactgggacaaatattggggaggcccttggacatggcctgggagacgccctgagcgaaggggtgggaaaggccattggcaaagaggccggaggggcagctggctctaaagtcagtgaggcccttggccaagggaccagagaagcagttggcactggagtcaggcaggttccaggctttggcgtagcagatgctttgggcaacagggtcggggaagcagcccatgctctgggaaacactgggcacgagattggcagacaggcagaagatgtcattcgacacggagcagatgctgtccgcggctcctggcagggggtgcctggccacaatggtgcttgggaaacttctggaggccatggcatctttggctctcaaggtggccttggaggccagggccagggcaatcctggaggtctggggactccgtgggtccacggataccccggaaactcagcaggcagctttggaatgaatcctcagggagctccctggggtcaaggaggcaatggagggccaccaaactttgggaccaacactcagggagctgtggcccagcctggctatggttcagtgagagccagcaaccagaatgaagggtgcacgaatcccccaccatctggctcaggtggaggctccagcaactctgggggaggcagcggctcacagtcgggcagcagtggcagtggcagcaatggtgacaacaacaatggcagcagcagtggtggcagcagcagtggcagcagcagtggcggcagcagtggcggcagcagtggtggcagcagtggcaacagtggtggcagcagaggtgacagcggcagtgagtcctcctggggatccagcaccggctcctcctccggcaaccacggtgggagcggcggaggaaatggacataaacccgggtgtgaaaagccagggaatgaagcccgcgggagcggggaatctgggattcagaactctgagacgtctcctgggatgtttaactttgacactttctggaagaattttaaatccaagctgggtttcatcaactgggatgccataaacaagaaccaggtcccgccccccagcacccgagccctcctctacttcagccgactctgggaggatttcaaacagaacactcctttcctcaactggaaagcaattattgagggtgcggacgcgtcatcactgcagaaacgtgcaggcagagacgatcagaactacaattacaaccagcatgcgtatcccactgcctatggtgggaagtactcagtcaagacccctgcaaaggggggagtctcaccttcttcctcggcttcccgggtgcaacctggcctgctgcagtgggtgaagttttggtaggcaatttcttgcaaccaccaccgaggccccgaaaagcactggtcgtcagggagctcctccccttggcccccagcctgtgccagccctggcccggctgccacacctctgtttcctaggctggggacccagcttgtctctccttgtttcttcccactgcactgtggtgcttcagtggccaccagcctcgtcacatacaccagcatctttctgtacctcctccctttggtgacctgaagtcactgtgacagttctccaggaaggaggagcttcctacttttgagtttctctgtggaaataaaacatgaatcttgtttcccta

SEQ ID NO: 44130 - DNA, 1431 bp, Artificial Sequence
  derived and/or modified sequence
atgaagttccagggacccctggcatgcctgctgctcgccctgtgtctgggatcaggcgaggccggccccctacagtcaggtgaagagtctaccgggacgaacataggcgaggcgttggggcacggactgggggatgccttatccgaaggagtgggaaaggctattggtaaggaggccggcggagcagctggctctaaggtgagcgaggccttaggacagggaactcgggaggcggtcggaaccggcgtgcgccaggtccccggctttggcgttgccgatgcactgggcaaccgagtcggagaggctgcacacgccctggggaacacaggtcacgaaatcggacgccaggctgaggatgttatccgtcatggggctgacgccgtaagaggatcctggcagggggtgccagggcacaatggcgcctgggagacctccggggggcacggcatctttggttcacaggggggcctgggggggcagggccagggtaatcctggcggtctgggcactccttgggtacatggctacccaggtaattctgccgggagtttcggaatgaatcctcagggagctccatggggccagggtggtaacggaggcccacccaatttcggaaccaacacacagggtgcggtggcccagccaggatacggctcggtgcgcgcgtccaatcaaaatgaaggatgtaccaatccccctccctctggctcagggggggggtcatcgaactcaggggggggaagcggaagccagtccggttcatcagggagtggcagtaatggggataacaacaatggctccagctcaggcggcagctcgagtggctcctctagcggcggcagttctggtgggtcgtccggcggatcttcaggcaactccgggggctctagaggggatagcgggagcgaatccagttgggggtcttccactgggagctcctccgggaaccacggcggctccggaggcggaaacggacacaaacccggctgcgagaaaccaggaaatgaggcccgaggaagtggagaatccggaattcaaaattcagaaactagtcccggaatgttcaacttcgacactttttggaagaacttcaagtcgaaattgggatttattaactgggacgcaattaacaaaaatcaagtccctccgccctccacgcgggctctgttgtactttagtcgcctgtgggaggacttcaagcaaaatacgcccttcctgaactggaaggcgatcattgagggggcagatgcctcatcactgcaaaagcgagccgggcgcgacgatcaaaattacaattacaaccagcatgcctacccgacagcatacggagggaagtactccgtgaagacgcctgccaaagggggagtgtcacctagctccagtgcatctcgcgtgcagccgggcctgctgcagtgggtgaagttctggtag

SEQ ID NO: 44131 - DNA, 570 bp, Artificial Sequence
  derived and/or modified sequence
atgcttggcatcaccagttgtagcgaccagcaagccaaggagggagaaggcttagaagggagttccaccggctcttcgtcaggcaatcacggaggcagcggcggaggaaatggccacaagccaggctgcgagaagccagggaatgaagcccgtggctccggggaatctggcatccagaattcagagacatctccaggcatgtttaacttcgatacattttggaagaactttaagagcaaacttggctttataaactgggacgccataaacaaaaaccaggtccctccgcctagtactcgcgccttgttgtatttctccaggctttgggaggacttcaaacagaacacaccgttccttaattggaaggcaatcatcgagggagccgacgcttcaagtctgcagaaaagagctgggcgcgacgatcaaaactacaactataatcagcatgcctaccccacagcttatggtgggaaatattctgttaaaactccagccaagggaggggtctctccatcatcatcggcctcgagagtacaacccggtctgctgcagtgggtgaaattctggtag

SEQ ID NO: 44132 - DNA, 1431 bp, Artificial Sequence
  derived and/or modified sequence
atgaagttccagggccccctggcctgcctgctgctggccctgtgcctgggcagcggggaggccggccccctgcagagcggggaggagagcacaggcaccaacattggagaggccctgggccacggcctgggagatgccctgtctgagggcgtgggcaaggccatcggcaaggaggccggcggcgctgctggcagcaaggtgtctgaggccctgggccagggcacccgggaggccgtgggcactggagtgcggcaggtgcccggctttggagtggctgatgccctgggcaacagagtgggggaggccgcccacgccctgggcaacacaggccatgaaattggccggcaggccgaggatgtgatcagacatggagcagatgctgtgcggggctcctggcagggcgtgcccggccacaatggagcctgggagaccagcggcggccacggcatcttcggcagccagggcggcctgggcggccagggccagggcaaccctgggggcctgggcaccccctgggtgcacggctacccaggcaacagcgctggcagctttggcatgaacccccagggcgccccctggggccagggcggcaatggaggcccccccaactttggcaccaacacccagggcgctgtggcccagcccggctacggctctgtgcgggccagcaaccagaatgaaggctgcaccaaccccccaccttctggcagcggcggcggcagcagcaacagcggcggcggcagcggcagccagagcggcagcagcggcagcggcagcaatggagacaacaacaacggcagcagcagcggcggcagcagcagcggcagcagcagcggcggcagcagcggcggcagcagcggcggcagcagcggcaacagcggcggcagcagaggagacagcggcagcgagagctcctggggcagcagcacaggcagcagcagcggcaaccacggcggcagcggcggcggcaatggccacaagccaggctgtgagaagccaggaaatgaggcccggggcagcggggagagcggcatccagaacagcgagaccagccctggcatgttcaactttgacaccttctggaagaacttcaagagcaagctgggcttcatcaactgggatgccatcaacaagaaccaggtgcccccacccagcacccgggccctgctgtacttcagccggctgtgggaggacttcaagcagaacacccccttcctgaactggaaggccatcatcgagggcgcagatgccagcagcctgcagaagagagctggaagagatgaccagaactacaactacaaccagcacgcctaccccacagcctacggcggcaagtacagcgtgaagaccccagccaagggcggcgtgagccccagcagcagcgccagccgggtgcagcccggcctgctgcagtgggtgaagttctggtag

SEQ ID NO: 44133 - DNA, 570 bp, Artificial Sequence
  derived and/or modified sequence
atgctgggcatcaccagctgcagcgaccagcaggccaaggagggggagggcctggagggcagcagcacaggcagcagcagcggcaaccacggcggcagcggcggcggcaatggccacaagccaggctgtgagaagccaggaaatgaggcccggggcagcggggagagcggcatccagaacagcgagaccagccctggcatgttcaactttgacaccttctggaagaacttcaagagcaagctgggcttcatcaactgggatgccatcaacaagaaccaggtgcccccacccagcacccgggccctgctgtacttcagccggctgtgggaggacttcaagcagaacacccccttcctgaactggaaggccatcattgaaggagcagatgccagcagcctgcagaagagagctggaagagatgaccagaactacaactacaaccagcacgcctaccccacagcctatggaggcaagtacagcgtgaagaccccagccaagggcggcgtgagccccagcagcagcgccagccgggtgcagcccggcctgctgcagtgggtgaagttctggtag

SEQ ID NO: 44134 - DNA, 1431 bp, Artificial Sequence
  derived and/or modified sequence
atgaagttccagggccccctggcctgcctgctgctggccctgtgcctcgggtctggtgaggccggcccactgcaaagtggagaagagagtacaggaactaatatcggagaggcgctgggacatgggctcggcgacgccctgagtgagggtgtcggtaaagcaatcggaaaagaagccggaggcgccgccggtagcaaagtttcagaagcgcttggacaggggacccgggaggctgtgggcaccggcgttcgccaggtgccagggtttggggtcgccgatgcgctgggaaacagggttggcgaagctgcacacgccctagggaacaccggccacgagatcgggcggcaggcggaggacgtgatccgacacggcgctgatgctgttcggggcagctggcagggtgtaccaggccacaacggcgcctgggagacctcggggggacacgggattttcgggtcacagggaggattgggcggtcagggccagggtaaccccggtgggctcggaactccctgggtgcacggctaccccgggaacagcgctggctctttcggcatgaatccccagggcgccccttggggccaggggggcaacggaggtccacctaacttcggaaccaacacgcagggtgccgtggctcagcccggatatgggtccgtccgcgcaagcaatcagaacgagggctgtactaatccaccaccttctggcagcggggggggttcttccaatagcggaggaggttccggctcacagtcaggaagttctggaagtggatctaacggcgataacaataatggatcatcttccggaggaagctctagcggaagctcctctggaggatcctccggtggctcgtctggaggatcctccggaaatagcgggggaagcaggggcgactccggctcagaatcatcctgggggagctctaccggatcttccagcggaaaccacgggggctctgggggaggtaacggacacaagcccgggtgtgagaagccaggaaatgaggccaggggttcaggggaatcaggtattcagaatagcgagacctcgccagggatgtttaactttgataccttttggaagaattttaagtctaagctgggcttcataaactgggacgcaataaataagaatcaggtcccaccaccctccacaagagctctactttactttagtaggctgtgggaggactttaaacagaacacaccttttcttaattggaaggccattatcgagggggcagacgctagctctttacagaagcgggcaggcagggatgatcaaaactacaactacaaccagcacgcctatcccactgcgtatgggggcaaatatagtgttaaaactcctgctaaggggggtgtttcacccagttccagtgcaagcagagtccagccgggtcttctacagtgggtcaaattttggtag

SEQ ID NO: 44135 - DNA, 570 bp, Artificial Sequence
  derived and/or modified sequence
atgctgggcatcaccagctgcagcgaccagcaggccaaggagggcgaaggcctggaaggaagtagtaccggctctagcagcggtaatcatggcgggagcggaggcggcaacggacacaagcctgggtgtgaaaaacctggcaatgaggcgcgcgggtcaggcgaatccggcatccaaaattcggaaacttccccaggcatgtttaactttgataccttttggaaaaactttaagagcaagctgggcttcatcaactgggacgccataaataagaatcaagtgccgccaccatccacccgggccctactctattttagcagactgtgggaggactttaagcaaaacacccccttccttaactggaaagctattattgagggcgccgatgcaagcagcctgcagaagagagccggtcgtgatgaccaaaactataattacaaccagcatgcttaccccactgcttatggaggaaagtactctgtgaaaacccctgcaaaaggaggagtaagtcccagcagctctgcgtccagggtacaacccgggctgttgcagtgggtgaagttttggtag

SEQ ID NO: 44136 - DNA, 399 bp, Artificial Sequence
  derived and/or modified sequence
atgagccagccctggctgtacagccagtgcatcatcagcggcaagcctagtgaagaggccgccggcgaaaacggatccataagcgccgctcttagaccactgctcctcgtggcagatgtgcccgtgttggggtatctgtgcccatcaagcgtgagtagtggggtctgcgaggctaaacttctcggatggggattgggaggcgtgtcagcagccccagaagccaaaaccaaggccgaggccgaagcagaagctgaggcaaccctcgtgaggcggaagctccaggtggaaaaactggtggacagggatctcgacctgactgtgattctcatggttccgatgccaagcgccaggcggcctccggcgctcgcaaccactgggtcttgcagtcctcctgggtag

SEQ ID NO: 44137 - RNA, 1431 nt, Artificial Sequence
  derived and/or modified sequence
augaaauuucaaggaccacuugccugucuucuacuggcuuugugccuugguagcggugaggcuggccccuugcagucuggggaagagucuaccggaacuaauaucggggaagcacuagggcauggacuaggggaugcccucagcgaaggaguuggcaaggccauugguaaggaggcaggcggugccgccggcagcaagguauccgaggcucugggccagggaacccgugaggcgguaggcacgggcgucaggcagguaccgggguucggcguggccgaugcgcuuggcaaccgggucggagaagccgcccacgcucugggaaauaccggacaugagaucggucggcaggcugaagaugucauucgccacggggccgacgcaguuaggggcucauggcagggggugccuggucauaauggcgccugggaaacauccggaggccacggaauuuucgggucccaaggcgggcucggaggacagggccaaggcaaccccggugggcucgggacgccaugggugcacggauaccccggcaauucugccggcucuuuuggaaugaauccccagggggcgcccugggggcaggggggcaacggcggcccgcccaacuucggaacgaacacucaaggagcgguggcgcaaccuggcuaugguucuguccgcgcuaguaaucagaacgagggaugcacaaacccaccuccuagugguuccggaggcggcucaucuaauuccggcggugggagcggcucccaaagcgguuccagcggguccgggaguaauggggacaauaauaauggcucgagcucagguggaagcagcucugguaguuccucaggugguuccucuggcggcucaaguggaggcucaaguggaaauagcgggggaucaaggggagauaguggcuccgaaagcucguggggcucaaguacggguuccaguagcgguaaccauggcggcucaggcggcgggaacgggcacaaacccgggugcgagaaaccgggcaaugaggccagggguagcggcgaauccgggauccaaaauuccgagacaucacccggcauguuuaacuucgauacuuucuggaagaauuucaagucaaaacuuggauuuauuaacugggacgcuauuaacaagaaccaggucccuccccccucuacucgcgcccucuuguauuucaguagacucugggaagauuucaaacaaaauacucccuuccugaauuggaaagcaaucaucgaaggcgccgaugcauccucguugcaaaagagagcgggacgcgaugaucagaacuacaacuauaaccaacaugcuuaccccacggcuuacggagggaaauacucagugaaaacgccagcgaagggggguguuucccccaguaguagcgcuagccgggugcaaccaggauuauuacaauggguaaaauuuugguag

SEQ ID NO: 44138 - RNA, 570 nt, Artificial Sequence
  derived and/or modified sequence
augcucggcaucacaucuuguuccgaucagcaggcuaaagagggcgaaggacucgagggcagcucuaccgggagcagcagcgguaaccacgguggcuccggcggagguaacggccauaagccagggugcgagaagccugggaacgaggcccggggaucaggugagucugguauccagaauucagagacaagcccuggaauguuuaacuucgauaccuuuuggaagaacuucaaauccaaacucgguuucauaaacugggacgcgauuaauaaaaaccagguccccccaccauccacacgcgcacuucuguacuuuagccgccucugggaggacuucaagcaaaauacccccuuccugaacuggaaagccaucauugaaggcgcagacgcaaguucgcugcagaagagagcaggacgggacgaccagaauuauaauuacaaccaacacgcauacccuaccgcauauggcggcaaauauucagugaagacuccagcuaagggcgggguaucccccucauccuccgccagcagaguacaacccggucucuugcagugggugaaauucugguag

SEQ ID NO: 44139 - RNA, 1431 nt, Artificial Sequence
  derived and/or modified sequence
augaaguuccagggaccgcuggcuugucuucuucuggcacuguguuuaggaucuggcgaagcagggccccugcaaagcggggaggaaucaaccggaacaaacauaggugaagcucugggacacggccugggagacgcguugagugagggaguggggaaggcaaucggcaaggaggcaggaggagccgcugguagcaagguauccgaggcacuuggccaggggacccgagaggccguggggacuggcgugcggcaggugcccggauucggcguggccgacgccuuagguaacagaguuggugaggcugcccacgcacucgguaauacagggcacgaaaucgggagacaggcggaagacgugauuagacacggcgcagaugccgugcggggaagcuggcaaggugugccuggccauaacggugccugggaaacuuccggagggcacggaaucuucgggucacagggggggcugggagggcagggacagggcaauccgggcgggcuugggacaccauggguacacggcuacccuggcaacagcgcugggagcuucggaaugaauccucagggggcuccuugggggcaggggggaaauggaggcccccccaacuuugggacgaacacgcaaggggcagucgcacaacccggcuacggcuccgucagagcuagcaaucaaaacgagggguguacaaaccccccgccaucagggucagguggaggaucgucaaacuccggggguggcagcggcucucagagcgguucgucgggaagcggaucaaauggcgauaacaauaauggcaguaguagcggcgguaguuccaguggcucaaguagcgguggcucauccgggggcucuucaggagggucauccggcaacucuggcggcaguagaggagacagcggaucagagaguucuugggguagcucaacaggaagcucuaguggcaaccacggaggcucaggaggcggcaauggacauaagcccggcugcgaaaaacccgguaacgaggcuagggguagcggcgaauccgggauccagaacagugaaacaucaccuggcauguucaacuuugacacuuucuggaagaauuuuaagucaaaacucggguuuauuaauugggaugcuauaaauaaaaaucaaguucccccaccuucaacacgcgcucuguuguacuucucuagacugugggaggacuuuaagcagaauacuccuuuuuuaaacuggaaagccaucauagagggugccgaugcgucuucgcugcagaagcgagccggccgggacgaccagaauuauaacuacaaucaacaugcauacccuacagcauacggcgggaaauacagugucaaaacaccugcaaaggggggcguuuccccuucuaguucagcaagucgaguucagccuggccuccuccaguggguaaaguuuugguag

SEQ ID NO: 44140 - RNA, 570 nt, Artificial Sequence
  derived and/or modified sequence
auguuagguaucaccucauguuccgaccagcaggcgaaagaaggcgaaggauuagaaggcuccucuaccgguucgucauccgggaaccauggcggguccggcggcggcaaugggcauaaaccgggcugugagaaaccggggaaugaggccaggggaucaggagaaaguggcauucagaacucggaaacuagcccuggcauguucaacuucgacaccuucuggaaaaauuuuaagucaaagcugggguucaucaauugggaugcuaucaauaaaaaccaagucccaccucccuccacuagagcacuucuguacuuuagccgccucugggaggacuucaagcaaaauacccccuuccugaacuggaaagccaucauugaaggcgcagacgcaaguucgcugcagaagagagcaggacgggacgaccagaauuauaauuacaaccaacacgcauacccuaccgcauauggcggcaaauauucagugaagacuccagcuaagggcgggguaucccccucauccuccgccagcagaguacaacccggucucuugcagugggugaaauucugguag

SEQ ID NO: 44141 - protein, 211 aa, Artificial Sequence
  derived and/or modified sequence
MSLSSLCPVFSAAASSLQVHLLKDQLAAEAAARLEAQARVHQLLLQNKDMLQHISLLVKQVQELELKLSGQNAMGSQDSLLEITFRSGALPVLCDPTTPKPEDLHSPPLGAGLADFAHPAGSPLGRRDCLVKLECFRFLPPEDTPPPAQGEALLGGLELIKFRESGIASEYESNTDESEERDSWSQEELPRLLNVLQRQELGDGLDDEIAV

SEQ ID NO: 44142 - DNA, 636 bp, Artificial Sequence
  derived and/or modified sequence
atgagcctcagcagtctctgtcccgtattttccgccgcggcatcttctctgcaggttcacctgttaaaagaccaattggcagccgaggccgcggcacgactcgaggctcaggcaagggtccaccagcttctactgcagaacaaagatatgttgcagcacatcagtctgctcgtgaagcaggtccaagagctagagctcaagctgtcaggccaaaatgccatgggctcccaggattccctactggaaattacctttagatcaggagctctccctgtcttatgcgacccaacgacccctaagcctgaggacctccattcaccccccctcggggctggcctcgcggacttcgctcatcctgcaggctcacccctgggacgccgggattgcttggtgaagctggaatgttttaggttcttaccccctgaggacacccctccacccgctcaaggagaggctctgctggggggcctggagctgatcaagttcagagaaagcgggatcgcgagtgagtacgaatctaacaccgatgagtccgaggagcgggattcctggtcccaagaggagctccctagactattaaacgtgcttcagcgacaagagctgggtgacggactggacgacgaaatcgcagtgtag

SEQ ID NO: 44143 - DNA, 636 bp, Artificial Sequence
  derived and/or modified sequence
atgagcctgagcagcctgtgccctgtgttttctgctgctgccagcagcctgcaggtgcacctgctgaaggaccagctggccgctgaggccgccgcccggctggaggcccaggcccgggtgcaccagctgctgctgcagaacaaggacatgctgcagcacatcagcctgctggtgaagcaggtgcaggagctggagctgaagctgagcggccagaatgccatgggcagccaggacagcctgctggagatcaccttccgcagcggggccctgcctgtgctgtgtgaccccaccacccccaagccagaggacctgcacagcccccccctgggcgccggcctggccgactttgcccaccctgctggcagccccctgggccggcgggactgcctggtgaagctggagtgcttccgcttcctgcccccagaggacaccccacctccagcccagggcgaggccctgctgggcggcctggagctgatcaagttccgggagagcggcatcgcctctgaatatgagagcaacacagatgagagcgaggagcgggacagctggagccaggaggagctgccccggctgctgaatgtgctgcagaggcaggagctgggagatggcctggatgatgaaattgctgtgtag

SEQ ID NO: 44144 - DNA, 636 bp, Artificial Sequence
  derived and/or modified sequence
atgagcctgagcagcctgtgccccgtgttcagcgccgccgccagcagcctccaggtccatctgctgaaggatcaacttgctgctgaagcggcagctcggctggaggcccaagcacgagttcaccagctcttgcttcaaaataaggatatgcttcagcatatatccctgctggttaaacaggttcaggagctcgaactaaagttgagcggccagaacgccatgggatcccaagatagcctcctcgaaatcacattccggtcgggggcgttgcccgtgctgtgcgatccaacgaccccgaagcctgaggatctgcattcaccccctctgggtgcaggcctggctgatttcgcacaccctgcagggtctcccctggggcggcgcgattgcttagttaagctggaatgcttcagattcctgcccccagaggacacacctccacctgcccagggagaggcccttctggggggcttggaactgattaagttccgggaatccggtatcgcaagcgaatacgaaagcaacactgacgagtcagaggagcgggactcttggtctcaggaggagcttccgaggcttttgaatgtgcttcagcgccaagaactgggagacgggttggatgatgagatcgccgtctag

SEQ ID NO: 44145 - DNA, 5559 bp, Artificial Sequence
  derived and/or modified sequence
ctatgaccaaatgtatggggctttttcccacacaccaagcaagcaagcagttctgcagagggcacacagtgtcctctaactcagtttgattctgatactatctacctggaaacagcatcagatcccacagtttgagggctcaatcccacaagactttcccccatttcagacaccaatcacaagtaatagtttgtcacctacacctctgaccaagtggctataaattggtgttcccactaccctctccttggactcaactgatttgctagagcaactgacagaactcaggaaaacacctacatttactggtttattttaaaggatattataagggataccaatgaacaccagatggaagagatgcatagggcagggtctgtgggaagggtggcagagctcccatgccctcccaacgtgcaccaccctccaggaacctctaaatgttcagctgcccggcagctccccacacccagtccttttgagtttttaatggaggctttattatgtaggcatgattgattacatcattggccactggtgattagtttaacttttagcccctcatctcctggaggttggggcgtgggactgaaaaatcctatcctctaatcataccttggtctgtcctgtgagcagcccccatcccgaagcttccaggggttccccaaccactaatcatctaataagcatacaaaaaacactcttaccactctggagatctcaagggtttggggagctatatgtcaggaaacagggatgaagaccaaacatgtatttcactgtatcacacctgttctcacccctccccagatcttctctcaattaatatgagacaaaaaaatgagtctgacttcttgaccaaaatatcagttctgtccttagcagctttatggaggacagatttagtttaaattccttaggcattatgcccctgtggctccactcaatcagaaatagggtcaacggcaaggtcagggcctccaatctgggcaagagggaggcagccacggtatccacaagtgtaattctctgagtgctggttgctgggaggggcacaccctgggccagcaagtcacttggccaagggtggccaactgtgaggtagcactgccctttactccctaaaaaaatgtgaatctctttggagcaaactcctcttcagaaatttgagcacttgttttctgagcaagggaatcagctaatgcttttgactccccatccatcttcctgcatcctcgtcccacctctcctgcccccactcacctggctctgtctttacccacaccatggttttggtacaagaacacccttttccccataagctacattggtccaggccataaaaattcattagttccctttcttcaggggccttctgaaatgctccctggagaactctttattcacttctttgcacaagaatcacatatgtgtgaacactggtattggccttctaactcagtttcttcaaaccagggtcctggtctggttgcccctgtctcctcccactgagttttatctccacataagtattgctcaccaagaacagagctgttgacaccactgggcctcaagcatgctgaatgcattgctgccaactgctctgccttaagaaggttggaaactgatgagggtgccacaaattgttcacctcagcccttctgggctggttggaggaggccctctcatgaatcagtcagcaaatgtttgacccctaccaggtggtcctggtaatatgtggtatgaatcatggtcctagatgtctgccatagcaaataaaaaaggaagacagggaaagaagctgtcgcctacagagtggcttgatgacagctgcctcactaatttaaaaagccatgtgtagtgcttcctatttctcactatgtttgggtgagtgggagagggagaaagattatatgggcttcgttgtgacactgttcttagccagtgggtcaatagatgagttttggttttgttttttagaagacaggatgagaagagagtgcccccttccacctccaacatggcatgccatgctaggtgctgaaggagttctctaagcagggatggagcaccgtgcgtgtgtgtgtgtatatgtgcacgtgtgtgtgtacgtgtgtgtgtgtggcaggtctagagggtcgatggctctttcctgcctcttgcccttggtatgggtaccttagtgatgcatcatggccctcccttaggacacacagcttcgcagtgccagtgaacccactccttttggctcctcctctggaatgataagcccagatgcccatgctgcccgtgaagggcttcttcttgaactgaatgtggagggcatctctggtcccggccatctgccagtgactctcatgtgcattcatgtccctctcttctctctgtcctgtcttctctgccgctgcctcttctctgcaggtacacttgctgaaggaccagttggctgctgaggctgcggcgcggctggaggcccaggctcgcgtgcatcagcttttgctgcagaacaaggacatgctccagcacatctccctgctggtcaagcaggtgcaagagctggaactgaagctgtcaggacagaacgccatgggctcccaggacagcttgctggagatcaccttccgctccggagccctgcccgtgctctgtgaccccacgacccctaagccagaggacctgcattcgccgccgctgggcgcgggcttggctgactttgcccaccctgcgggcagccccttaggtaggcgcgactgcttggtgaagctggagtgctttcgctttcttccgcccgaggacaccccgcccccagcgcagggcgaggcgctcctgggcggtctggagctcatcaagttccgagagtcaggcatcgcctcggagtacgagtccaacacggacgagagcgaggagcgcgactcgtggtcccaggaggagctgccgcgcctgctgaatgtcctgcagaggcaggaactgggcgacggcctggatgatgagatcgccgtgtaggtgccgagggcgaggagatggaggcggcggcgtggctggaggggccgtgtctggctgctgcccgggtaggggatgcccagtgaatgtgcactgccgaggagaatgccagccagggcccgggagagtgtgaggtttcaggaaagtattgagattctgctttggagggtaaagtggggaagaaatcggattcccagaggtgaatcagctcctctcctacttgtgactagagggtggtggaggtaaggccttccagagcccatggcttcaggagagggtctctctccaggactgccaggctgctggaggacctgcccctacctgctgcatcgtcaggctcccacgctttgtccgtgatgcccccctaccccctcactctccccgtctccatggtcccgaccaggaagggaagccatcggtaccttctcaggtactttgtttctggatatcacgatgctgcgagttgcctaaccctccccctacctttatgagaggaattccttctccaggcccttgctgagattgtagagattgagtgctctggaccgcaaaagccaggctagtccttgtagggtgagcatggaattggaatgtgtcacagtggataagcttttagaggaactgaatccaaacattttctccagccggacattgaatgttgctacaaagggagccttgaagctttaacatggttcaggcccttggtgtgagagcccagggggaggacagcttgtctgctgctccaaatcacttagatctgattcctgttttgaaagtcctgccctgccttcctcctgcctgtagcccagcccatctaaatggaagctgggaattgcccctcacctcccctgtgtcctgtccagctgaagcttttgcagcactttacctctctgaaagccccagaggaccagagcccccagccttacctctcaacctgtcccctccactgggcagtggtggtcagtttttactgcaaaaaaaaaaaaagaaaaaagagaaagaaaaaaaagaatgaatgcaagctgatagctgagactgtgagactgtttttgtccactcttctgaatcactgccacttgggtcagggaccacagccattgccacccttggcccatctctctgcgtgcgtgccttgagcacacatataaaaagtgccatgtgcaattgtcttatcttttatgatctaggctttgcctagggatcactactccttaacgggctggctggggcaatgaggaaaagctcctttgctcctgtaaggccataagtggctgttaacagattttcaaatgcctgaagagattgctgagacctgctagagtcatatgttcggggaattaagtctttatcctagacaacaaggtacagatgcaaactgcagtgttattggagggtcaatcggcaaggatatgattatcccaaaatggagttcatcgaccctagctttcctttagattatatataaataaaagtgcagtcctcttctaatggccacagttggttttcttgtagcccagaaagtccaaattaaaggaaataaattcagttttatgttagccttccttggtgcatcagggtgtcagtggaaataggatcaggtggtgtgtgtgtgtgtgttttgtgtgtgtgtgtacacatgtgtttatatatacatgtgtgagggaaagtgtgtacatatatgtaggattgtaaccagacggaaaagaacgaggatctccagggtgtttgaatcagcaacagatttgtgttttctaacatgcatttagttggagaggcatggttctgtttgttttgttttgatctaatttgccattggaaataggtacagttacacagagaaggaagaaccaggaaagtgagatccatgaaactaaatgagcagctgtcagaatccagtgtggctgagcctacctagcttatgaaatctaacccagggttccctgagtccaagaccacttagattattaagattttgaacgtccagaggagtgaaaagtctgttttctgacgtaagccggagctgaggataaagccagaggccagtggattaggtgtatggaatgtggatggagagggcttgtgtgggatgtggccagggagtgggtgaggaaggccgcttctaaatggcctgtaaaaacttgagattggatagacgaaaggaaatggagaaattaaagaattggagaaactagttatctgtgttgctgactttgggacccatccaagactcctgcccttggggtgttccatggtggtttcttcctgcctgggcgccaccctttccccagttcaggccctccctggaggactagtttgtgtattggtatcctccccagtggacccaaaccagcgcatacttggtgtgtggagatgggagacaaaggacagatctaggagccttgaaggatcaccagccaccgaccctccatcagggccaactgggcaggaaagggaacattgcagacctgatttcccgacgatgtcaccctgtcctccctccttgcttcttgctctgctaactcaactctgccttcctctttttcattcttctactctgcc

SEQ ID NO: 44146 - DNA, 636 bp, Artificial Sequence
  derived and/or modified sequence
atgtccctgtcaagtctgtgccccgtctttagcgcagccgcttcatcactgcaggtgcacttgctgaaagatcaactggccgctgaagcggctgcgcgactggaggcacaggcaagggtacatcaattattgttacagaacaaagatatgctgcagcatatctctctactggtcaaacaggttcaggaattagaactcaagctctcagggcagaacgcgatggggagccaggattccctgcttgagattacatttcgcagcggtgctctgcccgtcctgtgtgacccaactacccctaagcccgaagacctgcacagtccacctctcggcgctggacttgccgacttcgcccaccctgcaggctcacctttgggcaggagagattgtctcgtgaaactggaatgttttaggtttctacctccagaggataccccaccaccagcccaaggagaggccttgctggggggtctggaactcatcaaatttcgggaatctggcatcgcatctgagtacgaaagcaataccgacgagtccgaagaaagggactcttggtcccaagaagaactgcctagacttctgaacgtcctgcagaggcaggaactcggcgatggactcgatgacgaaatagctgtttag

SEQ ID NO: 44147 - DNA, 636 bp, Artificial Sequence
  derived and/or modified sequence
atgagcctgagcagcctgtgccccgtgttcagcgccgccgccagcagcctgcaggtgcacctgctgaaggaccagctggccgccgaggccgccgccagactggaggcccaggccagagtgcaccagctgctgctgcagaacaaggacatgctgcagcacatcagcctgctggtgaagcaggtgcaggagctggagctgaagctgagcggccagaacgccatgggcagccaggacagcctgctggagatcaccttcagaagcggcgccctgcccgtgctgtgcgaccccaccacccccaagcccgaggacctgcacagcccccccctgggcgccggcctggccgacttcgcccaccccgccggcagccccctgggcagaagagactgcctggtgaagctggagtgcttcagattcctgccccccgaggacacccccccccccgcccagggcgaggccctgctgggcggcctggagctgatcaagttcagagagagcggcatcgccagcgagtacgagagcaacaccgacgagagcgaggagagagacagctggagccaggaggagctgcccagactgctgaacgtgctgcagagacaggagctgggcgacggcctggacgacgagatcgccgtgtag

SEQ ID NO: 44148 - protein, 347 aa, Artificial Sequence
  derived and/or modified sequence
MSALGAVIALLLWGQLFAVDSGNDVTDIADDGCPKPPEIAHGYVEHSVRYQCKNYYKLRTEGDGVYTLNNEKQWINKAVGDKLPECEAVCGKPKNPANPVQRILGGHLDAKGSFPWQAKMVSHHNLTTGATLINEQWLLTTAKNLFLNHSENATAKDIAPTLTLYVGKKQLVEIEKVVLHPNYSQVDIGLIKLKQKVSVNERVMPICLPSKDYAEVGRVGYVSGWGRNANFKFTDHLKYVMLPVADQDQCIRHYEGSTVPEKKTPKSPVGVQPILNEHTFCAGMSKYQEDTCYGDAGSAFAVHDLEEDTWYATGILSFDKSCAVAEYGVYVKVTSIQDWVQKTIAEN

SEQ ID NO: 44149 - DNA, 1044 bp, Artificial Sequence
  derived and/or modified sequence
atgtcggcactgggcgcggtgattgccctactgctttggggacaattgttcgctgtggactcgggcaacgacgtcaccgatatcgccgatgacggctgcccaaaaccccccgagatcgctcacggctatgtggaacactccgtcaggtaccaatgcaagaattattacaaactcagaactgagggtgacggagtgtacactctaaacaatgaaaagcagtggattaataaggccgttggcgacaagctcccagaatgcgaggccgtgtgtggcaagccgaagaacccagctaatccagttcagaggattctcgggggtcatctcgatgccaaaggatcctttccctggcaggcaaagatggtgagtcaccacaatcttacgacaggtgctacgttgatcaacgagcagtggctcctcactaccgcgaagaatttgtttctgaaccactctgaaaatgccactgccaaagatattgccccgacactgactctctatgtgggtaaaaagcagttggtcgaaatcgaaaaggtagttctccatccaaactattcgcaagttgacattggtctaattaagctgaagcagaaggtgtctgtcaatgagagagtgatgcctatctgtctgccttccaaagactatgctgaggtgggaagggtcgggtacgtgtcaggttggggacggaatgccaactttaagttcacagatcaccttaaatacgtcatgctaccggtcgcagatcaggatcaatgcattaggcactatgaagggtcaacagtgcctgagaagaaaacgcccaagagcccagttggagttcagccaatccttaacgaacatacattttgtgccggcatgagcaagtatcaggaagatacctgctatggagacgccggatcagcatttgcagtgcacgacctggaggaagacacctggtatgccaccgggatactttcattcgataaatcctgtgcggtggcagagtatggcgtatatgttaaggtgaccagcatacaagattgggtgcagaaaacgatcgccgagaactag

SEQ ID NO: 44150 - DNA, 846 bp, Artificial Sequence
  derived and/or modified sequence
atgtctaggatctcccaaatgaccgccgctcgaagcccaccccgactccatatggctatgtggtccacaaggttcgccacctccgttaggacaaatcccgtccagagaatcttaggagggcatctggacgcaaagggcagcttcccctggcaggccaagatggtcagccaccataacctgaccaccggagcgaccctgatcaacgagcagtggttactgaccaccgccaagaatctgtttttaaaccactccgaaaacgcaacagcaaaagacatagcccctaccctgaccctgtacgtcggtaaaaagcagttagttgagatcgaaaaagttgtgcttcaccccaactattcccaggtcgacattggcctgataaagctaaagcaaaaggtgtccgtgaatgagagagtgatgcctatttgtctgcccagtaaggactacgcagaagtcggccgggtcggctacgtcagcgggtggggccgaaatgccaactttaagtttacagatcacctgaaatacgtgatgctccctgtagccgaccaagaccaatgtatccgccactacgagggatcgactgtgccggagaagaaaactcccaagtcgcccgtcggagtgcagcctattctgaacgaacatacattctgtgccggtatgtctaagtaccaggaggacacatgctacggagacgctggatccgcattcgccgttcacgacctggaagaagacacctggtacgccactggaattttatcattcgacaaatcttgtgccgtcgccgagtacggcgtgtacgtcaaggtgaccagtatccaggattgggtacagaagaccatcgccgagaactag

SEQ ID NO: 44151 - DNA, 1252 bp, Artificial Sequence
  derived and/or modified sequence
agatgccccacagcactgctcttccagaggcaagaccaaccaagatgagtgccctgggagctgtcattgccctcctgctctggggacagctttttgcagtggactcaggcaatgatgtcacggatatcgcagatgacggctgcccgaagccccccgagattgcacatggctatgtggagcactcggttcgctaccagtgtaagaactactacaaactgcgcacagaaggagatggagtgtacaccttaaacaatgagaagcagtggataaataaggctgttggagataaacttcctgaatgtgaagcagtatgtgggaagcccaagaatccggcaaacccagtgcagcggatcctgggtggacacctggatgccaaaggcagctttccctggcaggctaagatggtttcccaccataatctcaccacaggtgccacgctgatcaatgaacaatggctgctgaccacggctaaaaatctcttcctgaaccattcagaaaatgcaacagcgaaagacattgcccctactttaacactctatgtggggaaaaagcagcttgtagagattgagaaggttgttctacaccctaactactcccaggtagatattgggctcatcaaactcaaacagaaggtgtctgttaatgagagagtgatgcccatctgcctaccttcaaaggattatgcagaagtagggcgtgtgggttatgtttctggctgggggcgaaatgccaattttaaatttactgaccatctgaagtatgtcatgctgcctgtggctgaccaagaccaatgcataaggcattatgaaggcagcacagtccccgaaaagaagacaccgaagagccctgtaggggtgcagcccatactgaatgaacacaccttctgtgctggcatgtctaagtaccaagaagacacctgctatggcgatgcgggcagtgcctttgccgttcacgacctggaggaggacacctggtatgcgactgggatcttaagctttgataagagctgtgctgtggctgagtatggtgtgtatgtgaaggtgacttccatccaggactgggttcagaagaccatagctgagaactaatgcaaggctggccggaagcccttgcctgaaagcaagatttcagcctggaagagggcaaagtggacgggagtggacaggagtggatgcgataagatgtggtttgaagctgatgggtgccagccctgcattgctgagtcaatcaataaagagctttcttttgaccc

SEQ ID NO: 44152 - DNA, 1107 bp, Artificial Sequence
  derived and/or modified sequence
gctcttccagaggcaagaccaaccaagatgagtgccctgggagctgtcattgccctcctgctctggggacagctttttgcagtggactcaggcaatgatgtcacggatatcgcagatgacggctgcccgaagccccccgagattgcacatggctatgtggagcactcggttcgctaccagtgtaagaactaacccagtgcagcggatcctgggtggacacctggatgccaaaggcagctttccctggcaggctaagatggtttcccaccataatctcaccacaggtgccacgctgatcaatgaacaatggctgctgaccacggctaaaaatctcttcctgaaccattcagaaaatgcaacagcgaaagacattgcccctactttaacactctatgtggggaaaaagcagcttgtagagattgagaaggttgttctacaccctaactactcccaggtagatattgggctcatcaaactcaaacagaaggtgtctgttaatgagagagtgatgcccatctgcctaccttcaaaggattatgcagaagtagggcgtgtgggttatgtttctggctgggggcgaaatgccaattttaaatttactgaccatctgaagtatgtcatgctgcctgtggctgaccaagaccaatgcataaggcattatgaaggcagcacagtccccgaaaagaagacaccgaagagccctgtaggggtgcagcccatactgaatgaacacaccttctgtgctggcatgtctaagtaccaagaagacacctgctatggcgatgcgggcagtgcctttgccgttcacgacctggaggaggacacctggtatgcgactgggatcttaagctttgataagagctgtgctgtggctgagtatggtgtgtatgtgaaggtgacttccatccaggactgggttcagaagaccatagctgagaactaatgcaaggctggccggaagcccttgcctgaaagcaagatttcagcctggaagagggcaaagtggacgggagtggacaggagtggatgcgataagatgtggtttgaagctgatgggtgccagccctgcattgctgagtcaatcaataaagagctttcttttgaccc

SEQ ID NO: 44153 - DNA, 1044 bp, Artificial Sequence
  derived and/or modified sequence
atgtctgccctgggcgccgtcatcgccctgctgctgtggggccagctgtttgctgtggacagcggaaatgatgtgacagacattgctgatgatggctgccccaagcccccagaaattgcccacggctacgtggagcacagcgtgcgctaccagtgcaagaactactacaagctgaggacagaaggagatggagtgtacaccctgaacaatgagaagcagtggatcaacaaggctgtgggggacaagctgcctgaatgtgaggccgtgtgtgggaagcccaagaacccagccaaccctgtgcagaggatcctgggcggccacctggatgccaagggcagcttcccctggcaggccaagatggtgagccaccacaacctgaccaccggggccaccctcatcaatgagcagtggctgctgaccacagccaagaacctcttcctgaaccacagtgaaaatgccacagccaaggacatcgcccccaccctgaccctgtatgtgggcaagaagcagctggtggagattgagaaggtggtgctgcaccccaactacagccaggtggacatcggcctcatcaagctgaagcagaaggtgtctgtgaatgaaagagtgatgcccatctgcctgcccagcaaggactatgcagaggtgggccgggtgggctacgtgtctggctggggcagaaatgccaacttcaagttcacagaccacctgaagtatgtgatgctgcctgtggccgaccaggaccagtgcatccgccactatgagggcagcacagtgcctgagaagaagacccccaagagccctgtgggcgtgcagcccatcctgaatgagcacaccttctgtgccggcatgagcaagtaccaggaggacacctgctatggagatgctggcagcgcctttgctgtgcatgacctggaggaggacacctggtacgccaccggcatcctgagctttgacaagagctgtgctgtggccgagtatggagtgtatgtgaaggtgaccagcatccaggactgggtgcagaagaccatcgccgagaactag

SEQ ID NO: 44154 - DNA, 846 bp, Artificial Sequence
  derived and/or modified sequence
atgagccgcatcagccagatgacagctgcccggagccccccccggctgcacatggccatgtggagcaccaggtttgccacctctgtgaggaccaaccctgtgcagaggatcctgggcggccacctggatgccaagggcagcttcccctggcaggccaagatggtgagccaccacaacctgaccaccggggccaccctcatcaatgagcagtggctgctgaccacagccaagaacctcttcctgaaccacagtgaaaatgccacagccaaggacatcgcccccaccctgaccctgtatgtgggcaagaagcagctggtggagattgagaaggtggtgctgcaccccaactacagccaggtggacatcggcctcatcaagctgaagcagaaggtgtctgtgaatgaaagagtgatgcccatctgcctgcccagcaaggactatgcagaggtgggccgggtgggctacgtgtctggctggggcagaaatgccaacttcaagttcacagaccacctgaagtatgtgatgctgcctgtggccgaccaggaccagtgcatccgccactatgagggcagcacagtgcctgagaagaagacccccaagagccctgtgggcgtgcagcccatcctgaatgagcacaccttctgtgccggcatgagcaagtaccaggaggacacctgctatggagatgctggcagcgcctttgctgtgcatgacctggaggaggacacctggtacgccaccggcatcctgagctttgacaagagctgtgctgtggccgagtatggagtgtatgtgaaggtgaccagcatccaggactgggtgcagaagaccatcgccgagaactag

SEQ ID NO: 44155 - DNA, 1044 bp, Artificial Sequence
  derived and/or modified sequence
atgagcgccctgggcgccgtgatcgccctgctgctgtggggccagctcttcgctgtcgattctggaaacgatgtgactgatattgctgatgatggttgtcccaaaccccctgaaatcgcgcatggctatgtagaacattcggttcgctaccagtgcaagaattattataaactccggaccgaaggcgatggcgtctacactcttaacaatgaaaaacaatggatcaacaaagccgtgggcgacaagttgcctgagtgtgaggccgtgtgcggtaagcctaaaaatcctgccaatccagtccagagaatcttggggggacacctagacgctaaaggctccttcccttggcaagccaaaatggtttcccatcataacttgactacaggcgccactttgatcaacgagcaatggctccttacaactgccaagaatttattcttgaaccactctgaaaacgccaccgccaaggacatcgcacctaccctgactctgtatgttggcaagaagcagctggtagaaatcgagaaggtagttctgcacccaaattactcccaagttgatataggcctcatcaagcttaagcagaaggttagtgtgaacgagcgcgttatgcccatctgccttccctccaaagactacgctgaggtggggcgggtcggatacgtgagcgggtggggccgcaacgcaaactttaaatttaccgaccacctcaagtacgtcatgctgcccgttgcggatcaggatcagtgtataagacactatgaaggcagtacagtccccgaaaagaagacccctaaaagccccgtgggcgtgcaacccatcctcaacgaacacacgttctgcgccggtatgtcaaagtaccaggaagacacttgttacggtgacgctggctcggcctttgccgtgcatgacctcgaggaagacacttggtacgcgaccggtattctgtcttttgataaatcatgcgccgttgccgaatacggggtttacgtgaaagtaacctcaatccaggactgggtgcagaagaccatcgcggaaaactag

SEQ ID NO: 44156 - DNA, 846 bp, Artificial Sequence
  derived and/or modified sequence
atgagccggatcagccagatgaccgccgcccggagccccccccggctacacatggccatgtggagcactagattcgcgacctcagtacggaccaatccagtgcaacggatcctgggaggacacctagatgccaaggggagctttccctggcaagcaaagatggtgtcccaccataacctgaccacgggtgcaactctcatcaacgaacaatggttattgaccactgccaaaaacttatttctcaaccattccgagaacgcaaccgctaaagacatagcacccacgctgacgctctatgttgggaaaaagcaactggtggaaatcgagaaggtggtactgcatccgaattacagtcaagtagatatcggactcatcaaactgaaacagaaagttagcgtcaatgaaagagtgatgccaatatgccttccaagcaaagactatgcagaggtgggcagagttggctatgtgtccgggtggggacgtaatgccaactttaaattcactgaccatttgaaatatgtgatgctgccagtggcagatcaagatcagtgcatacgacattatgaggggtcgacagtccctgagaagaagacccccaaaagtcccgtgggtgtccaacccattctcaacgagcacaccttctgtgctggcatgagcaaataccaagaagatacctgttacggtgacgccggaagcgccttcgctgttcatgaccttgaggaggatacctggtacgccaccggaatccttagctttgataagagttgcgccgtcgccgaatacggcgtgtatgtcaaagttacatcaattcaggattgggttcagaagaccattgcggagaactag

SEQ ID NO: 44157 - DNA, 1044 bp, Artificial Sequence
  derived and/or modified sequence
atgagtgcactcggtgcagtgatcgcccttctcttgtggggccagctctttgcagtggactccgggaatgacgtaacagacattgctgatgatgggtgccctaagccgcctgagatcgcccacgggtacgtggagcactccgttaggtatcaatgtaaaaactattacaaactcaggacagagggggacggggtctataccctcaacaacgagaagcaatggattaacaaagctgttggtgacaagttacctgagtgcgaggccgtatgtgggaaaccgaaaaatccggctaaccctgtccagcgcatcctgggtggacatttggatgcaaaaggctcattcccatggcaggctaaaatggtctcccaccacaacctgaccacgggcgctacactaatcaatgaacaatggctgctaaccaccgccaagaacttgttcctgaatcacagtgaaaacgcgactgctaaggacatagctcccactctcaccctgtatgtcgggaagaaacaattggtggagatcgaaaaagtagttctccacccaaactattcccaggtggatatcggactcatcaaactaaagcaaaaggtctctgtcaatgaaagggtcatgcccatctgcctccccagcaaggactatgcagaggtgggcagagtcgggtatgtgagcggctggggtcgaaacgctaactttaaatttactgatcacttgaagtacgttatgctccccgtggcagaccaggaccagtgtattaggcactatgaggggtcgaccgtacctgagaagaagactcctaagtccccagtgggggtccagccgattctgaacgagcacacattctgtgcaggtatgtctaagtaccaggaggatacatgctatggtgacgctggatccgctttcgctgtgcacgacctggaggaggacacctggtacgctacgggtatcttatctttcgacaaaagttgtgcagtagcagagtatggcgtgtacgttaaagtgactagcatccaagactgggtgcaaaagactatagcagaaaactag

SEQ ID NO: 44158 - DNA, 846 bp, Artificial Sequence
  derived and/or modified sequence
atgtcacggatctcccaaatgactgccgcacggtccccaccccgactgcatatggctatgtggtccaccagatttgcgacgagtgtccgaactaatcccgtgcagcggatactggggggacatcttgacgctaaagggtcatttccctggcaggcaaaaatggtgagtcaccacaatctgacaacaggcgctaccctgatcaacgagcagtggctattgacaacagctaaaaacctttttttgaatcactccgaaaatgcaaccgctaaagacattgcaccaacactcaccctgtacgtgggcaagaaacaactcgtggaaatcgagaaagtggtgctgcacccaaattatagccaggttgatataggcctcatcaaactaaaacagaaggtgagcgtaaatgagagagttatgcctatttgcctaccttcaaaagattatgctgaagtaggtagggtgggatacgttagcggatggggcaggaatgcgaattttaaattcactgatcacctgaagtatgtaatgctgcctgtggccgaccaggaccagtgcatccgccactacgagggatccacagtgcctgagaaaaaaacaccaaaatccccggtgggagttcaaccaatcttgaacgaacacacattttgtgccggtatgagcaagtatcaggaggatacatgttacggcgatgcagggagtgcatttgctgttcatgatctcgaagaggacacctggtacgccacaggcattctgtcattcgacaagtcttgtgctgtggctgagtatggggtctacgttaaagttacgagcatccaagattgggtgcaaaagacaatcgctgagaactag

SEQ ID NO: 44159 - DNA, 1044 bp, Artificial Sequence
  derived and/or modified sequence
atgagcgccctgggcgccgtgatcgccctgctgctgtggggccagctgttcgccgtggacagcggcaacgacgtgaccgacatcgccgacgacggctgccccaagccccccgagatcgcccacggctacgtggagcacagcgtgagataccagtgcaagaactactacaagctgagaaccgagggcgacggcgtgtacaccctgaacaacgagaagcagtggatcaacaaggccgtgggcgacaagctgcccgagtgcgaggccgtgtgcggcaagcccaagaaccccgccaaccccgtgcagagaatcctgggcggccacctggacgccaagggcagcttcccctggcaggccaagatggtgagccaccacaacctgaccaccggcgccaccctgatcaacgagcagtggctgctgaccaccgccaagaacctgttcctgaaccacagcgagaacgccaccgccaaggacatcgcccccaccctgaccctgtacgtgggcaagaagcagctggtggagatcgagaaggtggtgctgcaccccaactacagccaggtggacatcggcctgatcaagctgaagcagaaggtgagcgtgaacgagagagtgatgcccatctgcctgcccagcaaggactacgccgaggtgggcagagtgggctacgtgagcggctggggcagaaacgccaacttcaagttcaccgaccacctgaagtacgtgatgctgcccgtggccgaccaggaccagtgcatcagacactacgagggcagcaccgtgcccgagaagaagacccccaagagccccgtgggcgtgcagcccatcctgaacgagcacaccttctgcgccggcatgagcaagtaccaggaggacacctgctacggcgacgccggcagcgccttcgccgtgcacgacctggaggaggacacctggtacgccaccggcatcctgagcttcgacaagagctgcgccgtggccgagtacggcgtgtacgtgaaggtgaccagcatccaggactgggtgcagaagaccatcgccgagaactag

SEQ ID NO: 44160 - DNA, 846 bp, Artificial Sequence
  derived and/or modified sequence
atgagcagaatcagccagatgaccgccgccagaagcccccccagactgcacatggccatgtggagcaccagattcgccaccagcgtgagaaccaaccccgtgcagagaatcctgggcggccacctggacgccaagggcagcttcccctggcaggccaagatggtgagccaccacaacctgaccaccggcgccaccctgatcaacgagcagtggctgctgaccaccgccaagaacctgttcctgaaccacagcgagaacgccaccgccaaggacatcgcccccaccctgaccctgtacgtgggcaagaagcagctggtggagatcgagaaggtggtgctgcaccccaactacagccaggtggacatcggcctgatcaagctgaagcagaaggtgagcgtgaacgagagagtgatgcccatctgcctgcccagcaaggactacgccgaggtgggcagagtgggctacgtgagcggctggggcagaaacgccaacttcaagttcaccgaccacctgaagtacgtgatgctgcccgtggccgaccaggaccagtgcatcagacactacgagggcagcaccgtgcccgagaagaagacccccaagagccccgtgggcgtgcagcccatcctgaacgagcacaccttctgcgccggcatgagcaagtaccaggaggacacctgctacggcgacgccggcagcgccttcgccgtgcacgacctggaggaggacacctggtacgccaccggcatcctgagcttcgacaagagctgcgccgtggccgagtacggcgtgtacgtgaaggtgaccagcatccaggactgggtgcagaagaccatcgccgagaactag

SEQ ID NO: 44161 - protein, 1029 aa, Artificial Sequence
  derived and/or modified sequence
MAELPTTETPGDATLCSGRFTISTLLSSDEPSPPAAYDSSHPSHLTHSSTFCMRTFGYNTIDVVPTYEHYANSTQPGEPRKVRPTLADLHSFLKEGRHLHALAFDSRPSHEMTDGLVEGEAGTSSEKNPEEPVRFGWVKGVMIRCMLNIWGVILYLRLPWITAQAGIVLTWIIILLSVTVTSITGLSISAISTNGKVKSGGTYFLISRSLGPELGGSIGLIFAFANAVGVAMHTVGFAETVRDLLQEYGAPIVDPINDIRIIAVVSVTVLLAISLAGMEWESKAQVLFFLVIMVSFANYLVGTLIPPSEDKASKGFFSYRADIFVQNLVPDWRGPDGTFFGMFSIFFPSATGILAGANISGDLKDPAIAIPKGTLMAIFWTTISYLAISATIGSCVVRDASGVLNDTVTPGWGACEGLACSYGWNFTECTQQHSCHYGLINYYQTMSMVSGFAPLITAGIFGATLSSALACLVSAAKVFQCLCEDQLYPLIGFFGKGYGKNKEPVRGYLLAYAIAVAFIIIAELNTIAPIISNFFLCSYALINFSCFHASITNSPGWRPSFQYYNKWAALFGAIISVVIMFLLTWWAALIAIGVVLFLLLYVIYKKPEVNWGSSVQAGSYNLALSYSVGLNEVEDHIKNYRPQCLVLTGPPNFRPALVDFVGTFTRNLSLMICGHVLIGPHKQRMPELQLIANGHTKWLNKRKIKAFYSDVIAEDLRRGVQILMQAAGLGRMKPNILVVGFKKNWQSAHPATVEDYIGILHDAFDFNYGVCVMRMREGLNVSKMMQAHINPVFDPAEDGKEASARGARPSVSGALDPKALVKEEQATTIFQSEQGKKTIDIYWLFDDGGLTLLIPYLLGRKRRWSKCKIRVFVGGQINRMDQERKAIISLLSKFRLGFHEVHILPDINQNPRAEHTKRFEDMIAPFRLNDGFKDEATVNEMRRDCPWKISDEEITKNRVKSLRQVRLNEIVLDYSRDAALIVITLPIGRKGKCPSSLYMAWLETLSQDLRPPVILIRGNQENVLTFYCQ

SEQ ID NO: 44162 - DNA, 3090 bp, Artificial Sequence
  derived and/or modified sequence
atggccgagctacccaccacggaaacaccaggggacgccacattgtgttcaggacgtttcaccatttcgacactcctttcaagcgatgagccctcccctccagccgcctatgacagctcacatccctctcacctgacccactccagcactttttgcatgcgaacctttggctataatacaatcgacgtggtacccacctacgaacattacgcaaatagtactcaaccgggggagccccgaaaagttcggcctactctggctgatctgcactcatttctcaaggagggtcggcatttgcatgcattagcttttgatagtcgccccagtcacgaaatgactgacggcctcgtagagggagaagccggaacgtccagcgaaaagaacccagaagaacccgtgcgcttcgggtgggtcaagggcgtaatgattcggtgtatgctgaacatctggggagtcattttatacctacggttgccttggatcaccgcgcaagcggggatcgtgctgacctggatcattattctgcttagcgtgactgtcacatccatcactgggctgagcataagcgctatctctacaaacggtaaggtcaaaagtggtgggacctatttcttgatctcacgttccctcgggcctgagcttggagggtctatcggcctgatttttgcattcgcgaatgccgtgggcgttgcgatgcacacagtggggttcgccgaaacagtgagagatctcctgcaggagtatggggcacccatcgtggaccctattaacgatatcagaatcattgcggtcgtgagcgtgaccgtactgctcgctattagccttgctgggatggagtgggaatccaaagctcaggtgctcttctttctggtgatcatggtgagcttcgcaaattaccttgtgggaaccctcatccctccatcagaggacaaggcatccaagggctttttcagctaccgggcggatatctttgtgcagaacctcgtgccggattggcggggaccagacgggaccttctttggtatgttcagcatcttcttcccttctgccacaggcattcttgcaggggcaaatatatcgggagacctcaaggatcctgccatcgcaatcccgaagggcacactgatggcaatattctggaccaccatcagctacttggcaatcagcgcgaccatcggcagctgcgtggtacgcgacgcctcgggcgtgcttaatgatacagtcacccccggctggggtgcctgcgaaggtcttgcctgtagttacggctggaacttcacagagtgcacccagcagcattcctgccactatggcctgattaactattatcaaacaatgagcatggtttccgggttcgcccctctgattacagctggaatctttggagccaccctgagtagcgctctagcttgtctagtgtctgcagccaaggtgttccagtgcctgtgcgaggatcagttgtaccctctgattggtttcttcggtaagggatatggaaagaacaaagagcccgttaggggatatctcctagcctatgctatcgccgtggccttcatcattattgcggaattgaacacaattgcccccattatctcgaattttttcttgtgttcctacgctctcataaacttcagctgttttcatgcaagtatcaccaactctcccggttggcgccctagtttccagtattataataaatgggctgctctctttggtgcaatcatttccgtcgtgataatgttcctgttgacttggtgggctgctcttattgcaatcggggtggtattgtttctgttgttgtacgttatctacaaaaagcctgaggtgaactgggggagttcagtccaagccggaagttataaccttgctctgtcctacagtgtcggactgaatgaagttgaagatcatattaaaaattaccgtccccagtgccttgtgctcaccggaccccccaacttcagaccagcactggttgacttcgttggcacgttcacccggaatctgtcattgatgatttgcggacacgtcctgattgggccccacaaacagaggatgcctgagttgcaactgattgctaacggccacacgaaatggctgaataagcggaaaataaaagcattctactctgatgtgattgctgaggatctgagaagaggagtgcaaatccttatgcaggctgctggtctgggacggatgaagccgaacatcctggtggtgggcttcaagaaaaattggcagtctgcacatccagccacagtggaggactatatcggcattctccacgacgcctttgacttcaactacggggtgtgtgtcatgaggatgagagaaggattaaacgtcagtaagatgatgcaggctcatattaatccagtttttgaccctgccgaggacggaaaagaggcatccgcacggggcgcacgaccttccgttagtggcgccctcgatcctaaggccctggtcaaagaagagcaagccacgaccatcttccagagtgagcaaggtaagaaaactatcgacatctactggctgttcgacgacggtgggctgacgctacttatcccttaccttcttgggcgtaagcggcgctggtcaaagtgtaaaataagggtgtttgtcggcggccagatcaaccgaatggatcaggagcggaaggcaatcatctcactgctaagcaaatttaggcttggattccacgaagtccacatcctgcctgatattaaccagaatccccgggcagaacatactaagcggtttgaagatatgatcgctccgttccgccttaatgatgggttcaaggacgaagctaccgtgaatgaaatgaggagagactgcccttggaaaatctccgatgaagaaattacgaagaatagagttaaatcgctgcggcaggttcggcttaatgaaattgtcctggactacagtcgcgacgccgctctaatcgttattaccctgccaataggaagaaagggtaaatgcccaagctcattgtacatggcctggcttgagacactcagccaggatcttaggccccccgtgatcttgattcggggtaaccaggaaaacgtgctcacgttctattgccagtag

SEQ ID NO: 44163 - DNA, 3090 bp, Artificial Sequence
  derived and/or modified sequence
atggccgagttacctacgacggaaacgccgggtgatgccactctgtgctctggtaggtttactatttccacattactcagtagtgatgagccatcacctcctgcggcatacgactcctcacatccctcccatctgacacatagcagtacgttttgcatgaggacctttggctataataccattgatgtagtgcctacatacgagcattacgctaactccacccagcctggcgagccacgaaaagtgaggccgaccctggccgacttacattcctttctgaaggaaggcagacatttgcacgccctggctttcgatagcagaccctcacacgagatgactgatggccttgttgagggagaggccggaacatcgagcgagaagaatcccgaagaacctgtgcggtttggctgggtgaagggcgtgatgatccggtgtatgctgaacatctggggagttatcctgtatctccggctcccttggattactgcccaggccgggatcgttctgacctggattattattctgttgtccgtgacagtgacttctattaccggactgtccatctctgccatcagcacgaacggaaaagtgaagagcggcggtacttacttcctgatatctagatctcttggccccgagctgggcgggtccattggattaatcttcgctttcgccaatgctgtgggcgtcgcaatgcataccgtgggatttgcggagacagtgcgcgatttgctccaggagtatggtgcaccaattgtcgatcctatcaacgacattaggattatcgcagtggtgtcggttactgtgctgttggctatctcattggccggcatggagtgggagagtaaggctcaggtcttgttcttcctggtgatcatggtcagttttgccaattacctcgtgggcacactcatccccccgtcagaagataaagcttctaaagggttcttttcttaccgggccgacattttcgtgcaaaacctggttcctgactggcgcggccccgacggcacttttttcggcatgttctctatttttttcccatcagccaccggaattttggccggcgcaaatatctccggggatctgaaggaccctgcaattgccatccccaagggcaccctgatggcaatattctggaccaccatatcctatctggctatttctgcaaccatcgggtcttgcgtggtaagagatgccagcggcgtcttgaacgacaccgtcacgcctggatggggtgcctgcgaaggtctcgcctgttcgtacggttggaatttcacagagtgcacccaacagcactcatgccactacgggctgatcaactattatcaaaccatgtctatggtcagcggattcgcaccactgattacggctggcatattcggcgccactctcagcagcgctctcgcctgcttagtgtccgccgccaaagtgttccagtgtttgtgtgaggaccagctatatccgctaatcggattctttggaaagggatatggcaagaataaagagccagtgaggggctacctgctggcctatgctatcgccgtggcatttattatcattgccgagcttaatactatcgctcccattatcagtaattttttcttgtgcagttacgctctaatcaacttctcttgttttcacgctagcattacaaattctcccgggtggagaccctctttccagtattataataagtgggccgcactgttcggagccataatcagtgtggtaatcatgttcctactaacctggtgggcggccctgatcgccatcggcgtggtgctgttcctactcctctatgtgatctataaaaagccagaggtgaactggggttctagtgtacaagctggcagttataatctcgcactatcatattctgtcggtttgaacgaagtggaagatcacatcaaaaactataggccccaatgtctggttctcacagggcccccgaacttcagacctgccctcgtggatttcgtcggaaccttcacgcggaatttaagtttgatgatttgtggacatgtgctgatcggtccccataaacaaagaatgccggaactccagttaattgcgaatggccacacaaaatggctgaacaagcgcaagatcaaggctttctacagtgacgtgatagctgaagatttgaggcggggggtccaaatacttatgcaggcagcgggactagggagaatgaaaccaaacattctggtggtgggatttaaaaagaactggcagagtgcacacccagctacggtagaggactacatcgggatcctacatgacgcatttgatttcaactacggagtatgtgtaatgcggatgcgggaaggcctaaacgtcagcaagatgatgcaagctcatatcaatcccgtttttgaccccgccgaggatggtaaagaagcgtctgcccggggggccagacctagtgtctctggcgctcttgaccctaaggccctggtcaaggaagagcaggcaaccacgatctttcagagcgagcagggcaaaaaaacaatcgacatctactggctgtttgacgacgggggtttgaccttgctgattccctacctgctggggagaaaacgtaggtggagcaaatgcaagattagagtatttgtgggcggccaaatcaatcggatggatcaggagagaaaggctatcatttccctgctctccaaattcagattgggttttcacgaggtccacatcttacctgatattaaccagaacccccgagcagaacataccaagcggttcgaggacatgattgctccatttaggctcaacgatggttttaaagatgaggcgacggttaacgagatgaggagagactgtccatggaaaatttccgatgaagagattactaaaaatagagtgaaaagcctgagacaggtccgattgaacgagattgttctggactactcgcgcgatgccgccctgatcgtgatcacactgcccatcgggcgcaagggcaaatgtcctagctcactttacatggcctggttggaaactctaagtcaggacttaaggccaccagtcatactgatccgcggaaatcaggaaaacgtcctgaccttttactgccagtag

SEQ ID NO: 44164 - DNA, 3090 bp, Artificial Sequence
  derived and/or modified sequence
atggccgagctgcccaccacagagaccccaggagatgccaccctgtgcagcggccgcttcaccatcagcaccctgctgagcagtgatgagcccagccccccagctgcctatgacagcagccaccccagccacctgacccacagcagcaccttctgcatgaggaccttcggctacaacaccattgatgtggtgcccacctatgagcactacgccaacagcacccagcccggggagcccaggaaggtgcggcccaccctggccgacctgcacagcttcctgaaggagggccgccacctgcacgccctggcctttgacagccggcccagccatgagatgacagatggcctggtggagggggaggccggcaccagcagcgagaagaaccctgaggagcctgtgcgcttcggctgggtgaagggcgtgatgatccgctgcatgctgaacatctggggcgtcatcctgtacctgcggctgccctggatcacagcccaggccggcatcgtgctgacctggatcatcatcctgctgtctgtgacagtgaccagcatcaccggcctgagcatcagcgccatcagcaccaacgggaaggtgaagagcggcggcacctacttcctgatcagccgcagcctgggccctgagctgggcggcagcatcggcctcatctttgcctttgccaatgctgtgggcgtggccatgcacacagtgggctttgctgagaccgtgcgggacctgctgcaggagtatggagcccccatcgtggaccccatcaatgacatccgcatcatcgctgtggtgtctgtgacagtgctgctggccatcagcctggccggcatggagtgggagagcaaggcccaggtgctcttcttcctggtgatcatggtgtcctttgccaactacctggtgggcaccctcatccccccatctgaggacaaggccagcaagggcttcttctcctacagagctgacatctttgtgcagaacctggtgcctgactggaggggcccagatggcaccttcttcggcatgttcagcatcttcttccccagcgccaccggcatcctggccggggccaacatcagcggggacctgaaggaccctgccatcgccatccccaagggcaccctgatggccatcttctggaccaccatctcctacctggccatcagcgccaccatcggcagctgtgtggtgagagatgccagcggcgtgctgaatgacacagtgaccccaggctggggcgcctgtgagggcctggcctgcagctatggctggaacttcacagagtgcacccagcagcacagctgccactacggcctcatcaactactaccagaccatgtccatggtgtctggctttgcccccctcatcacagctggcatctttggagccaccctgagcagcgccctggcctgcctggtgtctgctgccaaggtgttccagtgcctgtgtgaggaccagctgtaccccctgattggcttcttcggcaagggctacggcaagaacaaggagcctgtgcggggctacctgctggcctatgccatcgctgtggccttcatcatcatcgccgagctgaacaccatcgcccccatcatcagcaacttcttcctgtgcagctatgccctgatcaacttcagctgcttccacgccagcatcaccaacagccctggctggaggcccagcttccagtactacaacaagtgggccgccctgtttggagccatcatctctgtggtgatcatgttcctgctgacctggtgggccgccctgattgccatcggcgtggtgctcttcctgctgctgtatgtgatctacaagaagccagaggtgaactggggcagctctgtgcaggccggcagctacaacctggccctgagctacagcgtgggcctgaatgaggtggaggaccacatcaagaactaccggccccagtgcctggtgctgaccggcccccccaacttccggcctgccctggtggactttgtgggcaccttcaccaggaacctgagcctgatgatctgtggccacgtgctgattggcccccacaagcagaggatgcctgagctgcagctgattgccaacggccacaccaagtggctgaacaagaggaagatcaaggccttctacagtgatgtgattgctgaggacctgcggcggggcgtgcagatcctgatgcaggccgccggcctgggccgcatgaagcccaacatcctggtggtgggcttcaagaagaactggcagagcgcccacccagccaccgtggaggactacatcggcatcctgcatgatgcctttgacttcaactacggcgtgtgtgtgatgaggatgagggagggcctgaatgtgtccaagatgatgcaggcccacatcaaccctgtgtttgatcctgcagaagatggcaaggaggccagcgcccggggggcccggcccagcgtgtctggggccctggaccccaaggccctggtgaaggaggagcaggccaccaccatcttccagagcgagcagggcaagaagaccatcgacatctactggctgtttgatgatggcggcctgaccctgctgatcccctacctgctgggcaggaagaggcgctggagcaagtgcaagatccgggtgtttgtgggcggccagatcaacaggatggaccaggagaggaaggccatcatcagcctgctgagcaagttccggctgggcttccacgaggtgcacatcctgcctgacatcaaccagaaccccagggctgagcacaccaagagatttgaggacatgattgcccccttccggctgaatgatggcttcaaggatgaggccaccgtgaatgagatgaggcgggactgcccctggaagatcagtgatgaggagatcaccaagaacagagtgaagagcctgcggcaggtgcggctgaatgagatcgtgctggactacagcagagatgctgccctgattgtcatcaccctgcccatcggcaggaagggcaagtgccccagcagcctgtacatggcctggctggagaccctgagccaggacctgcggccccctgtgatcctgatccggggcaaccaggagaatgtgctgaccttctactgccagtag

SEQ ID NO: 44165 - DNA, 3090 bp, Artificial Sequence
  derived and/or modified sequence
atggccgagctgcccaccaccgagacccccggcgacgccaccctgtgcagcgggagatttacaatctcaaccctgctgagtagcgacgagccgtctcccccagccgcctatgattctagtcaccctagccacttgacccacagcagtaccttttgcatgcgtacctttggatacaatacaatagatgtcgtgcccacttatgaacactacgccaattccacccagcccggggagcctcgcaaggtgcgtcctaccctcgccgatctgcattcttttctcaaggaaggcaggcacctgcatgccctggcatttgactcgaggccctcccacgaaatgactgacggtctggttgagggtgaggccggcacttcttcagagaaaaatccggaagagcccgtcaggttcggctgggtcaagggggttatgatcaggtgcatgctcaatatctggggcgttatcctgtatctgcggttgccgtggatcaccgcccaggctggtattgttctgacttggattattatcctcctcagtgttaccgttactagcataaccgggttaagtatctcggccatatccaccaacggcaaggtgaagtctggtggtacctattttctgatctctcgcagcctcgggccagaactgggcggctcgattggactgatatttgcctttgccaatgccgtaggggtggctatgcacacagttggtttcgccgagaccgtcagggacctcctgcaagagtatggtgctccgatcgtcgatcctattaacgacattaggatcatcgcagttgttagcgttaccgtcctgctggcgatttctctggcaggcatggaatgggagtccaaggcccaagtgctgttttttctcgtgatcatggtatctttcgctaactatctcgtgggcaccctcatccctcccagtgaagacaaggcaagtaaaggattcttttcttatagagccgacatttttgtgcaaaatctagtgcccgactggcgcggccccgatgggacctttttcggcatgttcagcatcttctttccatccgccaccggcattctggcgggtgcaaatattagtggcgatctgaaggaccctgccatcgccatcccaaaagggactctcatggctatattttggacaaccattagctatttggcgatctccgccacaataggttcgtgcgtagtcagagatgccagtggggtgctgaatgacacggttactccagggtggggggcatgcgagggtctggcctgctcctacggctggaatttcacagagtgcacgcagcagcactcgtgtcactatggcctcattaactattatcagacaatgtcaatggtgtccggatttgccccgttgatcactgcaggcattttcggtgcgacgctctcgtccgcccttgcatgcctggtctcggccgctaaggtgttccagtgtctgtgtgaggaccagctttaccctctcatcggcttcttcgggaagggctatgggaagaataaagagcccgttaggggttatctcctggcctatgcaattgccgtggcgtttattatcattgctgagctgaatacaatcgctccaatcatatccaatttctttctctgcagttatgctctgattaatttttcttgtttccacgcatcgatcacgaatagccccggctggaggccatccttccaatattacaacaaatgggctgctctgtttggagccatcatctccgtggtcatcatgtttcttttgacgtggtgggccgctctcattgccatcggcgtcgtgctatttcttctcctgtacgtcatctataaaaagcccgaagttaattggggctccagcgtacaagcaggcagttataatttagcgttgagttattctgtcggactcaacgaagtcgaggatcacatcaagaactaccgtcctcagtgtctggttctcacaggacccccaaacttcagacctgctctcgttgatttcgtgggaacgttcaccaggaacctttcccttatgatctgcggtcacgtactgattggaccacataaacagcggatgcccgagctccaactgattgctaatggacataccaagtggcttaacaaaagaaaaattaaagctttttacagcgatgtgatcgccgaagatctgcgcaggggcgttcagatccttatgcaggccgccggcctcggccgcatgaaaccaaacatactcgtggtcgggttcaagaagaactggcagtccgcgcaccctgccacggtggaggattacatcggaatcctacacgacgcctttgatttcaattatggcgtgtgtgtaatgcgcatgcgcgagggcttgaacgtctcaaagatgatgcaggcgcacatcaacccagtttttgacccggctgaagacgggaaggaggcaagcgcacgaggcgccaggcccagcgtttcgggcgccctggacccaaaggcactcgtgaaggaggaacaggccaccacaatttttcagagcgagcagggaaagaaaacaatagacatctattggctcttcgacgatggaggccttacgctgctgattccttacctcctgggccgcaagcggcgatggagcaaatgtaaaatcagggtgttcgtgggagggcagataaatcgtatggatcaggagaggaaagctatcatttcgctgctgagcaaattccggctgggcttccacgaggtgcatatcttgcctgatatcaaccagaatcctcgagccgagcatactaagaggtttgaggacatgatagctccattcagactcaatgacggcttcaaagatgaggcaacggtgaatgagatgcggagagattgtccttggaagatctcagacgaggaaatcacgaagaatcgggttaagtccttaaggcaggtaagactgaatgaaatagtgcttgactatagtcgagacgctgccctaattgtgataactctgccaattggaaggaagggcaaatgtccatcttctctgtatatggcttggttggagacactgagccaggacttgaggccaccagtgattctcattcgcgggaatcaggagaatgtgctgactttctactgtcagtag

SEQ ID NO: 44166 - DNA, 3090 bp, Artificial Sequence
  derived and/or modified sequence
atggccgagctgcccaccaccgagacccccggcgacgccaccctgtgctcagggcgatttaccatatccaccctcctgtctagtgacgagccgagccctcccgctgcctacgactcttcccacccgtctcacctcacacacagctctacattttgcatgcggacattcggatacaacacaattgacgtggtccctacctacgagcattacgccaactcaacacagccaggcgaaccaaggaaggtcaggccgacgctggctgatctccactcatttttaaaagagggtcgacatcttcacgcgctggcgttcgactcgagaccaagtcatgagatgacggacggactggtcgagggggaagccgggacaagcagcgaaaaaaatcccgaggagcccgtgagatttggatgggtaaaaggtgtgatgattcggtgtatgctgaacatctggggtgtcatattataccttaggctaccctggatcaccgcccaggcaggtatagtcttgacttggatcataatcttactctcggtaactgtaacgagcattactggactttctatttccgcgatatctaccaacggaaaagtcaaaagcggtggaacctactttctgataagccgatcactcgggccagagctgggtggtagtataggactcatcttcgctttcgctaatgcagttggagtcgcaatgcataccgtcggcttcgccgaaacagtccgggacttgttgcaggagtatggcgccccgatcgtcgaccccattaatgatattcgcattattgccgtggttagtgtaacggtcctgttagccattagtctcgcaggaatggaatgggaaagcaaagctcaagtgttgtttttcttggtgatcatggtatccttcgcaaactaccttgtaggaaccctcatacccccaagcgaggacaaagcctcaaagggtttttttagttatcgcgctgacatctttgtgcagaatcttgtgccggactggagaggacccgatggaaccttctttggaatgttcagtatcttttttccatcagctacaggaatcctggccggggcaaacatctccggtgacctgaaggatcctgcaatcgccattccaaaaggcacgctgatggcaatcttttggacgactatttcctacttggctatttctgcaacgatcggatcatgtgttgtgagagacgcctccggcgttctcaacgatactgttacgcccggttggggcgcctgcgaagggctcgcctgttcatacggctggaatttcactgagtgcacccagcaacacagctgccactacggtcttataaactattatcagaccatgagtatggtgtcgggttttgcccccctcatcaccgcaggaatcttcggggccaccctgagctccgccctggcatgtctggtgagcgccgccaaagtgttccagtgcctgtgcgaagaccagctctacccactgattgggtttttcggcaaagggtacgggaagaataaagagcctgttcgaggatacctactcgcatatgctattgccgtagcatttatcattattgccgaactcaatactattgctcctattatctccaatttcttcctttgcagctatgcccttatcaacttttcctgcttccatgctagcatcacaaattctcctggatggcgcccatccttccagtattataataaatgggcggcactgtttggggccatcattagcgtggtcatcatgtttctgctcacctggtgggcagcgcttattgcaataggggttgtgctgttcctccttttgtatgtcatttacaagaagcctgaagttaattgggggtctagtgtgcaggccggcagctataacttagctcttagttactccgtgggcttgaatgaggtcgaggaccacattaaaaactaccgccctcaatgtcttgtactaacggggccacctaacttcaggccggcgctcgtagatttcgtgggcaccttcacgcgtaacctctctctcatgatctgtgggcacgtcttaattgggccgcataaacagaggatgcctgagctccagctgatcgctaacggccataccaagtggctgaataagcgtaagatcaaggctttttactccgatgttatagccgaggatttaaggagaggcgttcagattctgatgcaagccgcaggcctgggccgaatgaaacctaacattctggtggtcgggtttaagaagaactggcaatccgctcaccccgccactgtggaagattacatcggcatcctccacgacgccttcgatttcaactatggcgtctgtgtcatgcggatgcgggagggactaaacgtgtcgaaaatgatgcaagcacatattaacccagtgttcgatcccgccgaggacgggaaggaggctagtgccaggggcgcacgcccttctgtgagcggagccctggaccccaaggcccttgtgaaagaagagcaggccacgaccatattccagtctgaacagggaaaaaagacaatcgacatttattggctctttgacgatggaggcctcaccctcttgatcccctatcttctcggtaggaaaagacgttggagcaaatgtaaaatccgcgtcttcgttggagggcaaatcaaccggatggaccaggagcgcaaggccatcatctctttgctatcaaaattccggctggggttccatgaagtgcacattctgcctgatattaatcaaaacccgcgcgcagagcatacgaaaaggttcgaggacatgatagccccatttagactcaatgatgggtttaaagacgaggccaccgttaacgaaatgcggagggattgcccctggaaaataagcgacgaagaaattaccaaaaacagggtaaagtccttgcgacaggtcagattaaatgagattgtgcttgattacagcagagatgctgccctgatcgtgatcaccttgccgatcggcaggaaagggaaatgtccatctagcctgtacatggcctggcttgagacactgtcacaggatcttaggccacccgtgattctaatccgggggaatcaggaaaatgtcctgacattctactgccagtag

SEQ ID NO: 44167 - DNA, 3090 bp, Artificial Sequence
  derived and/or modified sequence
atggccgaactgcctactacggagacaccaggtgatgccaccctttgctcgggaagatttacgataagtaccctcttgtcttcagatgaaccatctcctcctgcggcatacgattccagtcacccgtcacacctgacccactccagtacgttttgcatgcgaaccttcggctataatactattgatgtggtccccacatacgagcactacgccaatagcacccagccaggcgagcccagaaaggtgcgcccaaccctcgctgacttgcattcttttctgaaagagggcagacatctgcacgctctcgccttcgattcccgtccttcacatgaaatgactgacggcctagtagaaggcgaagcgggaacgtcatctgagaagaatccggaagagccagtccgattcggctgggtcaagggggtcatgattcggtgtatgctcaacatctggggcgtgatcctctatctgagattaccctggattacggcccaggccggaatcgtgctgacatggatcataatcctcttaagtgtgactgtgacatccataactggactaagcatttccgctatatctacaaacgggaaggtgaaatcaggcggaacctactttttgatcagcaggtccctcggacccgaactggggggttctattggactgatttttgcgttcgctaatgctgtaggagtggctatgcacacagtggggtttgctgagaccgtacgcgacctcttgcaggagtatggcgctcctatcgtcgatcccattaatgacatcaggataatcgccgtggtaagtgtgacagtgctgctggctatctcgctggctggcatggagtgggaaagcaaggcccaggtcctcttctttttggtgatcatggtgtctttcgcaaattacctggtcggtacattaattccgccttccgaggataaggcctctaaaggcttcttctcataccgagccgatatctttgtgcagaatttggtgcccgactggagagggccagacggtacattttttggaatgtttagcatatttttcccttctgccacagggattctggccggagctaatatcagtggcgacctcaaggatcccgctattgccattcccaaaggaacactgatggcaattttttggacaacaatctcgtaccttgctatttcagccaccattggctcatgcgtcgttcgggacgcctccggagtgttaaacgacacagttacccccggttggggggcttgtgaagggcttgcctgttcttatgggtggaattttaccgaatgcacgcagcagcacagttgtcactatgggctgatcaattattaccaaacgatgagcatggtctccggtttcgcacccctcattactgctggcatctttggagctactctgtcatcggcattggcctgcctggtatctgccgctaaggtgttccagtgtctgtgcgaagatcagctgtatcccctgatcggattctttggcaaaggttatggaaagaacaaagagccagtgaggggttacctgttggcttatgcaatcgcagtagctttcatcattatagctgagcttaacacgattgcccctattatcagcaatttctttctgtgctcatacgcgctcataaatttctcatgttttcacgcctcaataaccaatagcccagggtggagacccagttttcagtactacaataaatgggccgctctttttggagccatcatttccgtagtcataatgttccttctcacctggtgggcagccctgatcgccattggagtagtgctctttttgctcctgtacgtcatatataagaaaccggaggtcaactggggtagtagcgtacaggctgggtcgtacaacttagcgctcagctactccgttggactgaatgaggtggaggatcacatcaagaattataggccccagtgcctggtacttaccggacctcccaacttccgcccagctctcgtggacttcgtgggaacgttcacacgaaacctgagtctgatgatctgtggtcacgtgttgattgggcctcataagcaacgcatgcccgaacttcagctgatagcaaatgggcataccaaatggctcaacaagcgtaaaattaaggctttttatagcgatgtcatcgctgaggacttgagaaggggcgtgcagatcctgatgcaggctgctgggcttggcaggatgaagccaaacattttggtggtgggttttaaaaagaactggcagtcagcccaccccgcaacagtggaggactacatcggaattcttcatgatgctttcgacttcaattacggcgtgtgcgtcatgaggatgcgggagggcctgaatgtatcaaagatgatgcaggcccacatcaatcccgtctttgatcccgcagaggatggaaaggaggctagtgctcgcggagctaggccctccgtgtcgggggcattggacccaaaggcactcgtgaaagaagagcaagctaccaccattttccagtcagagcaagggaagaagaccatagacatatactggctgtttgacgatggaggacttaccttgctaattccctacctattagggcgtaaacggaggtggtcaaaatgtaagatacgggtgtttgtggggggtcagatcaataggatggatcaggagcggaaggcgattatatcgctgctctccaagttccgtctgggatttcatgaggttcatattcttcctgatattaaccagaacccaagagccgaacacacaaagcgtttcgaggatatgattgcgccattcaggctgaacgatggttttaaggatgaggcaacagtgaatgagatgaggagagactgcccatggaagatttctgacgaggaaataacaaagaaccgcgtgaaatctctgcggcaggtacgcttaaatgagatagtgcttgattactctcgggacgccgcattaatcgtgatcaccctacccatcggacggaaagggaagtgtccctcctccctgtatatggcatggttggagaccctcagtcaggaccttagaccaccggtaatattgatccgcggtaaccaggagaatgtgctgaccttctattgtcagtag

SEQ ID NO: 44168 - DNA, 3090 bp, Artificial Sequence
  derived and/or modified sequence
atggccgagttgccaactacagagactcccggtgacgccaccctttgtagtggtaggtttaccatctccacccttttaagtagcgacgagccttctcctccagccgcatatgatagtagccacccgtctcatttaacacactcgtccactttttgcatgcgaacttttggttacaatactatagatgttgtccctacatatgagcactatgctaactctacccagccaggagagccccgaaaggtgcgccctacattggcagacctgcacagctttctgaaggagggtcgccacttgcacgcattagcctttgactccagaccatctcatgaaatgactgacggtctggtcgagggagaagctggcacatcttccgaaaagaatccagaggagcccgtgaggttcggatgggtgaagggagttatgatccggtgcatgctgaatatatggggggtcatcctttacttgagactcccctggatcactgcacaggccggtatcgttctcacgtggatcatcatcctgttgagcgtcactgtcaccagtatcactgggctcagtatttctgccatatcgactaatggcaaagtgaagagcggcggaacgtattttctgatcagtcgatcccttggtccagaacttgggggatctatcggcttgatcttcgcattcgctaatgccgtgggtgttgccatgcatacggttggttttgccgaaacggtaagagatctactgcaggaatacggcgcacccattgtggaccctatcaacgatattcggattatcgccgtcgtctcggtcacagttctgcttgcgatttctctggcagggatggagtgggagtcaaaggcccaggtcctcttcttccttgtaattatggtgtccttcgccaactatctggtgggtaccctcattccaccctctgaggacaaagctagcaaaggctttttctcttaccgcgcagacattttcgtccagaatctcgtcccagattggcgtggtcctgatgggaccttttttgggatgttttccatcttctttcctagcgcaactggcattctcgctggcgctaatatttctggcgacctgaaagatccggctatcgccatccccaaaggtacactgatggcaatattctggacaacaatctcttatctcgctatttctgccaccataggttcgtgcgtagtgagagatgctagtggcgtgttgaatgacacagttacacctggctggggggcatgcgaaggactggcctgctcctacgggtggaacttcaccgaatgcactcagcaacatagttgtcattacggcctgattaattactaccagaccatgagcatggtttccggcttcgccccactgatcaccgcaggaatttttggagccaccttaagctctgccttagcttgtttggtatcagctgcaaaagttttccaatgcttgtgtgaagatcagctatatccccttatcggcttcttcgggaagggatacgggaaaaacaaggaaccggtgcgagggtacctgctcgcctatgctattgcggtggcgttcatcatcatagcagagctgaatacaatcgcaccaatcatttctaacttctttttatgtagctatgccttgatcaacttctcatgtttccatgcctccattaccaatagccctggatggcgcccttcttttcagtattacaataagtgggccgctctgttcggcgctataatctctgtagttatcatgttccttttgacgtggtgggccgctctgatagctattggcgtcgtcttattcctcctcttgtatgtgatctacaaaaagcctgaggtgaattggggatctagcgttcaggctgggtcttataatcttgcactttcttactcagtagggctaaacgaagtggaagaccatatcaagaactacagaccgcaatgtctcgtcctcacaggaccaccaaattttcgcccagctttggtggatttcgtgggcacctttacgagaaacctcagtttgatgatttgcgggcacgtgctgattggtcctcataagcagagaatgcctgaattacagctgatcgctaacgggcatacaaagtggctgaacaaacgcaaaattaaagcgttttactctgacgtgatcgcagaagatttgcggagaggtgttcagattttgatgcaggccgctggccttggccgaatgaaacctaacatcctggttgtgggtttcaagaagaactggcagagcgctcaccctgctactgtcgaggactatatcggaattctccacgacgcgttcgactttaactatggcgtatgcgtaatgagaatgcgcgaagggctcaacgtctccaaaatgatgcaagcgcatataaatcccgtgttcgacccagctgaggacgggaaggaagctagcgcaaggggggctcggccaagtgtgagcggggctctggaccctaaagctcttgttaaggaagagcaggccaccacaatcttccagagtgaacagggtaaaaagactatcgacatctattggctgtttgatgacggcggtcttactctgctgatcccatatctcctgggtcgcaagcgcagatggtccaagtgtaaaattagagtgttcgtcggcggtcagatcaacaggatggatcaggaacggaaggcgataataagtctcctgtctaagttccgcctcggtttccacgaggtgcatatcctgcccgatatcaatcagaacccacgagctgaacacaccaaacggttcgaggatatgatcgccccttttcgtctgaacgacgggttcaaagatgaggccactgtgaatgaaatgagacgggactgtccttggaaaatcagcgacgaggagatcactaaaaatagggtaaaaagcctgagacaggtcagactgaacgaaatcgtcttggactacagccgggacgctgccctgattgtgatcacactcccaatcggtagaaaggggaagtgtccttcttccctgtatatggcttggcttgagacactgtcacaagatctgcgtccgcctgttattctaataagggggaatcaggagaatgtccttaccttttattgtcaatag

SEQ ID NO: 44169 - DNA, 3119 bp, Artificial Sequence
  derived and/or modified sequence
ctggcccctccctggacacccaggcgacaatggcagaactgcccacaacagagacgcctggggacgccactttgtgcagcgggcgcttcaccatcagcacactgctgagcagtgatgagccctctccaccagctgcctatgacagcagccaccccagccacctgacccacagcagcaccttctgcatgcgcacctttggctacaacacgatcgatgtggtgcccacatatgagcactatgccaacagcacccagcctggtgagccccggaaggtccggcccacactggctgacctgcactccttcctcaaggaaggcagacacctgcatgccctggcctttgacagccggcccagccacgagatgactgatgggctggtggagggcgaggcaggcaccagcagcgagaagaaccccgaggagccagtgcgcttcggctgggtcaagggggtgatgattcgttgcatgctcaacatttggggcgtgatcctctacctgcggctgccctggattacggcccaggcaggcatcgtcctgacctggatcatcatcctgctgtcggtcacggtgacctccatcacaggcctctccatctcagccatctccaccaatggcaaggtcaagtcaggtggcacctacttcctcatctcccggagtctgggcccagagcttgggggctccatcggcctcattttcgctttcgccaatgccgtgggtgtggccatgcacacggtgggctttgcagagaccgtgcgggacctgctccaggagtatggggcacccatcgtggaccccattaacgacatccgcatcattgccgtggtctcggtcactgtgctgctggccatctccctggctggcatggagtgggagtccaaggcccaggtgctgttcttccttgtcatcatggtctcctttgccaactatttagtggggacgctgatccccccatctgaggacaaggcctccaaaggcttcttcagctaccgggcggacatttttgtccagaacttggtgcctgactggcggggtccagatggcaccttcttcggaatgttctccatcttcttcccctcggccacaggcatcctggcaggggccaacatatctggtgacctcaaggaccctgctatagccatccccaaggggaccctcatggccattttctggacgaccatttcctacctggccatctcagccaccattggctcctgcgtggtgcgtgatgcctctggggtcctgaatgacacagtgacccctggctggggtgcctgcgaggggctggcctgcagctatggctggaacttcaccgagtgcacccagcagcacagctgccactacggcctcatcaactattaccagaccatgagcatggtgtcaggcttcgcgcccctgatcacggctggcatcttcggggccaccctctcctctgccctggcctgccttgtctctgctgccaaagtcttccagtgcctttgcgaggaccagctgtacccactgatcggcttcttcggcaaaggctatggcaagaacaaggagcccgtgcgtggctacctgctggcctacgccatcgctgtggccttcatcatcatcgctgagctcaacaccatagcccccatcatttccaacttcttcctctgctcctatgccctcatcaacttcagctgcttccacgcctccatcaccaactcgcctgggtggagaccttcattccaatactacaacaagtgggcggcgctgtttggggctatcatctccgtggtcatcatgttcctcctcacctggtgggcggccctcatcgccattggcgtggtgctcttcctcctgctctatgtcatctacaagaagccagaggtaaattggggctcctcggtacaggctggctcctacaacctggccctcagctactcggtgggcctcaatgaggtggaagaccacatcaagaactaccgcccccagtgcctggtgctcacggggccccccaacttccgcccggccctggtggactttgtgggcaccttcacccggaacctcagcctgatgatctgtggccacgtgctcatcggaccccacaagcagaggatgcctgagctccagctcatcgccaacgggcacaccaagtggctgaacaagaggaagatcaaggccttctactcggatgtcattgccgaggacctccgcagaggcgtccagatcctcatgcaggccgcaggtctcgggagaatgaagcccaacattctggtggttgggttcaagaagaactggcagtcggctcacccggccacagtggaagactacattggcatcctccatgatgcctttgatttcaactatggcgtgtgtgtcatgaggatgcgggagggactcaacgtgtccaagatgatgcaggcgcacattaaccccgtgtttgacccagcggaggacgggaaggaagccagcgccagaggtgccaggccatcagtctctggcgctttggaccccaaggccctggtgaaggaggagcaggccaccaccatcttccagtcggagcagggcaagaagaccatagacatctactggctctttgacgatggaggcctcaccctcctcattccctatctccttggccgcaagaggaggtggagcaaatgcaagatccgtgtgttcgtaggcggccagattaacaggatggaccaggagagaaaggcgatcatttctctgctgagcaagttccgactgggattccatgaagtccacatcctccctgacatcaaccagaaccctcgggctgagcacaccaagaggtttgaggacatgattgcacccttccgtctgaatgatggcttcaaggatgaggccactgtcaacgagatgcggcgggactgcccctggaagatctcagatgaggagattacgaagaacagagtcaagtcccttcggcaggtgaggctgaatgagattgtgctggattactcccgagacgctgctctcatcgtcatcactttgcccatagggaggaaggggaagtgccccagctcgctgtacatggcctggctggagaccctgtcccaggacctcagacctccagtcatcctgatccgaggaaaccaggaaaacgtgctcaccttttactgccagtaa

SEQ ID NO: 44170 - DNA, 5562 bp, Artificial Sequence
  derived and/or modified sequence
ctggcccctccctggacacccaggcgacaatggcagaactgcccacaacagagacgcctggggacgccactttgtgcagcgggcgcttcaccatcagcacactgctgagcagtgatgagccctctccaccagctgcctatgacagcagccaccccagccacctgacccacagcagcaccttctgcatgcgcacctttggctacaacacgatcgatgtggtgcccacatatgagcactatgccaacagcacccagcctggtgagccccggaaggtccggcccacactggctgacctgcactccttcctcaaggaaggcagacacctgcatgccctggcctttgacagccggcccagccacgagatgactgatgggctggtggagggcgaggcaggcaccagcagcgagaagaaccccgaggagccagtgcgcttcggctgggtcaagggggtgatgattcgttgcatgctcaacatttggggcgtgatcctctacctgcggctgccctggattacggcccaggcaggcatcgtcctgacctggatcatcatcctgctgtcggtcacggtgacctccatcacaggcctctccatctcagccatctccaccaatggcaaggtcaagtcaggtggcacctacttcctcatctcccggagtctgggcccagagcttgggggctccatcggcctcattttcgctttcgccaatgccgtgggtgtggccatgcacacggtgggctttgcagagaccgtgcgggacctgctccaggagtatggggcacccatcgtggaccccattaacgacatccgcatcattgccgtggtctcggtcactgtgctgctggccatctccctggctggcatggagtgggagtccaaggcccaggtgctgttcttccttgtcatcatggtctcctttgccaactatttagtggggacgctgatccccccatctgaggacaaggcctccaaaggcttcttcagctaccgggcggacatttttgtccagaacttggtgcctgactggcggggtccagatggcaccttcttcggaatgttctccatcttcttcccctcggccacaggcatcctggcaggggccaacatatctggtgacctcaaggaccctgctatagccatccccaaggggaccctcatggccattttctggacgaccatttcctacctggccatctcagccaccattggctcctgcgtggtgcgtgatgcctctggggtcctgaatgacacagtgacccctggctggggtgcctgcgaggggctggcctgcagctatggctggaacttcaccgagtgcacccagcagcacagctgccactacggcctcatcaactattaccagaccatgagcatggtgtcaggcttcgcgcccctgatcacggctggcatcttcggggccaccctctcctctgccctggcctgccttgtctctgctgccaaagtcttccagtgcctttgcgaggaccagctgtacccactgatcggcttcttcggcaaaggctatggcaagaacaaggagcccgtgcgtggctacctgctggcctacgccatcgctgtggccttcatcatcatcgctgagctcaacaccatagcccccatcatttccaacttcttcctctgctcctatgccctcatcaacttcagctgcttccacgcctccatcaccaactcgcctgggtggagaccttcattccaatactacaacaagtgggcggcgctgtttggggctatcatctccgtggtcatcatgttcctcctcacctggtgggcggccctcatcgccattggcgtggtgctcttcctcctgctctatgtcatctacaagaagccagaggtaaattggggctcctcggtacaggctggctcctacaacctggccctcagctactcggtgggcctcaatgaggtggaagaccacatcaagaactaccgcccccagtgcctggtgctcacggggccccccaacttccgcccggccctggtggactttgtgggcaccttcacccggaacctcagcctgatgatctgtggccacgtgctcatcggaccccacaagcagaggatgcctgagctccagctcatcgccaacgggcacaccaagtggctgaacaagaggaagatcaaggccttctactcggatgtcattgccgaggacctccgcagaggcgtccagatcctcatgcaggccgcaggtctcgggagaatgaagcccaacattctggtggttgggttcaagaagaactggcagtcggctcacccggccacagtggaagactacattggcatcctccatgatgcctttgatttcaactatggcgtgtgtgtcatgaggatgcgggagggactcaacgtgtccaagatgatgcaggcgcacattaaccccgtgtttgacccagcggaggacgggaaggaagccagcgccagaggtgccaggccatcagtctctggcgctttggaccccaaggccctggtgaaggaggagcaggccaccaccatcttccagtcggagcagggcaagaagaccatagacatctactggctctttgacgatggaggcctcaccctcctcattccctatctccttggccgcaagaggaggtggagcaaatgcaagatccgtgtgttcgtaggcggccagattaacaggatggaccaggagagaaaggcgatcatttctctgctgagcaagttccgactgggattccatgaagtccacatcctccctgacatcaaccagaaccctcgggctgagcacaccaagaggtttgaggacatgattgcacccttccgtctgaatgatggcttcaaggatgaggccactgtcaacgagatgcggcgggactgcccctggaagatctcagatgaggagattacgaagaacagagtcaagtcccttcggcaggtgaggctgaatgagattgtgctggattactcccgagacgctgctctcatcgtcatcactttgcccatagggaggaaggggaagtgccccagctcgctgtacatggcctggctggagaccctgtcccaggacctcagacctccagtcatcctgatccgaggaaaccaggaaaacgtgctcaccttttactgccagtaactccaggctttgacatccctgtccacagctctgagtgtgtgggataagttggaacttgattgcctctagtccacagggatgagactcatgttctgttgcactttaagtggcagcatctgatgatctcaccgaaaaagatggtagatttccaaatctggctggactccacttccatgggacacattccctgggtcttgtgtttataggctagagaaatagcagatggagctgcaaggaaaactctctaaagcatcctattccttttaaaggatttcttttgattttgatgaccattaattaagagttcagtctttgatttgtatgcaaattggagtcccaatgctgggcgtgaatcttgacagtttctacagaccttcctgggtgaaagttcctaaatcatgccctgcttcctccaataggagaatgggagcctcacctgtaggacctacaggctctctaaggaatgcaggtctctctctgagcctccacagccaggcaaatacatatatatatattttttttttagatgaagttttttctcttgttgcccaggctagggtgtaatggcatgatctcaggtcactgcaacctcctcccgggttcaagcatttcttctgtctcagcctcccgaatagctgggattacaggcacctgccatcacacgagctaatttttgtatttttagtagagatggggtttcaccatgttgaccaggctggtgttgagctcctgacctcaggtgatccacccacctcggtctcccaaagtgctggggttacaggcctgagccactgcgcccggcccaggcaaatttcttgaaccacttctcactcccgtcactttcaataaggggtctttgatgtcttcactggttctttggacgagggacttttcgaacttttttggttgcaacacacagtaagaaatatacttcacactgagacttgcagcgcacacacacggaaacgaccaaaacaaaaatgtcacaaaacaatacttacccttccctgggggacgtcctccagtatgttctgttctgtttatttttcactgttggttgcaatccaataaaatgactttgggatccactcatgggtggggacccacacatttgaaaggcatggccacctttctgttgtgccttgcatttgtccacacacagggagtctggctgagctggggaaaggccacggctgggtgtcattgccattttcccagctcatctcaccgggaagaaaagcagattgacagaacacgtgaggaggggtattgatggcaggagagtcaaaaaagagttttaaagaaggggcaaggttgaaggagtctagtggcaagggtaagatttcaggcatggttaagaacagacgacaaggatgtcaggaatgaagatgtggagaggggtgtagagatggcaaggttggcaaggaacagataggcaggagcaggtccaagccaagcctagcccaagaccaggtgaaaggagaggggaggaggagccacctgcaagagatggaaagagcaggcggcagagggggctggcagggaggggctgttaagagtggggttggaggtgggagagaagctaggacaagggagatggagaaaggacctatacctggctcacggaaggccttcaggtcactacacgttgaacatccccagtgtttgagcccccaaagctagggtgcaagagcactgccatcgaatgccagtgggtgaggccaagtgagggtatttgcagctctagacataaccaagaagcgtaaaggtgagttgtttggtggtacgactgcctgtgccttcttccgatggcactggggtggctgaaggaacagacatctttgggtttcatcagcctcctccaagactgctgcagtgcctacactttagacttcagaaggagactaaagacttctagaatttagaaggagatctgaagtctcctttctggagttacaacccaaaggatgttagcatttctcaggtcatcccactgcaaagcccagaaggcttggggctcccaggctgctctgaagccccactgtctgaccgcctcagggcttgctacgagggactggggcacggccaagctgactaggaacagctctcgtgctcctgagggacctggaggatgggcctgcctcccagccattgagctggattctgggataattcttaactcgaaataaggggaagcatccatcagggaatgctggcctttctagagccacgtagaaaacaattttctggttcttcaaacctcaaagagtccttggtccaaaaaacagaatgttttggcttcgggtgtcaaaaaaaaaattttcacgatgtcagaaatagtatgtttttaacaatagtaatagctttgtaaaaaaataaaaagctttaacagcgaggccataaacaatgaaatgaataaaaacggtggtcattcagtcaacgg

SEQ ID NO: 44171 - DNA, 3090 bp, Artificial Sequence
  derived and/or modified sequence
atggccgagctgcccaccaccgagacccccggcgacgccaccctgtgcagcggcagattcaccatcagcaccctgctgagcagcgacgagcccagcccccccgccgcctacgacagcagccaccccagccacctgacccacagcagcaccttctgcatgagaaccttcggctacaacaccatcgacgtggtgcccacctacgagcactacgccaacagcacccagcccggcgagcccagaaaggtgagacccaccctggccgacctgcacagcttcctgaaggagggcagacacctgcacgccctggccttcgacagcagacccagccacgagatgaccgacggcctggtggagggcgaggccggcaccagcagcgagaagaaccccgaggagcccgtgagattcggctgggtgaagggcgtgatgatcagatgcatgctgaacatctggggcgtgatcctgtacctgagactgccctggatcaccgcccaggccggcatcgtgctgacctggatcatcatcctgctgagcgtgaccgtgaccagcatcaccggcctgagcatcagcgccatcagcaccaacggcaaggtgaagagcggcggcacctacttcctgatcagcagaagcctgggccccgagctgggcggcagcatcggcctgatcttcgccttcgccaacgccgtgggcgtggccatgcacaccgtgggcttcgccgagaccgtgagagacctgctgcaggagtacggcgcccccatcgtggaccccatcaacgacatcagaatcatcgccgtggtgagcgtgaccgtgctgctggccatcagcctggccggcatggagtgggagagcaaggcccaggtgctgttcttcctggtgatcatggtgagcttcgccaactacctggtgggcaccctgatcccccccagcgaggacaaggccagcaagggcttcttcagctacagagccgacatcttcgtgcagaacctggtgcccgactggagaggccccgacggcaccttcttcggcatgttcagcatcttcttccccagcgccaccggcatcctggccggcgccaacatcagcggcgacctgaaggaccccgccatcgccatccccaagggcaccctgatggccatcttctggaccaccatcagctacctggccatcagcgccaccatcggcagctgcgtggtgagagacgccagcggcgtgctgaacgacaccgtgacccccggctggggcgcctgcgagggcctggcctgcagctacggctggaacttcaccgagtgcacccagcagcacagctgccactacggcctgatcaactactaccagaccatgagcatggtgagcggcttcgcccccctgatcaccgccggcatcttcggcgccaccctgagcagcgccctggcctgcctggtgagcgccgccaaggtgttccagtgcctgtgcgaggaccagctgtaccccctgatcggcttcttcggcaagggctacggcaagaacaaggagcccgtgagaggctacctgctggcctacgccatcgccgtggccttcatcatcatcgccgagctgaacaccatcgcccccatcatcagcaacttcttcctgtgcagctacgccctgatcaacttcagctgcttccacgccagcatcaccaacagccccggctggagacccagcttccagtactacaacaagtgggccgccctgttcggcgccatcatcagcgtggtgatcatgttcctgctgacctggtgggccgccctgatcgccatcggcgtggtgctgttcctgctgctgtacgtgatctacaagaagcccgaggtgaactggggcagcagcgtgcaggccggcagctacaacctggccctgagctacagcgtgggcctgaacgaggtggaggaccacatcaagaactacagaccccagtgcctggtgctgaccggcccccccaacttcagacccgccctggtggacttcgtgggcaccttcaccagaaacctgagcctgatgatctgcggccacgtgctgatcggcccccacaagcagagaatgcccgagctgcagctgatcgccaacggccacaccaagtggctgaacaagagaaagatcaaggccttctacagcgacgtgatcgccgaggacctgagaagaggcgtgcagatcctgatgcaggccgccggcctgggcagaatgaagcccaacatcctggtggtgggcttcaagaagaactggcagagcgcccaccccgccaccgtggaggactacatcggcatcctgcacgacgccttcgacttcaactacggcgtgtgcgtgatgagaatgagagagggcctgaacgtgagcaagatgatgcaggcccacatcaaccccgtgttcgaccccgccgaggacggcaaggaggccagcgccagaggcgccagacccagcgtgagcggcgccctggaccccaaggccctggtgaaggaggagcaggccaccaccatcttccagagcgagcagggcaagaagaccatcgacatctactggctgttcgacgacggcggcctgaccctgctgatcccctacctgctgggcagaaagagaagatggagcaagtgcaagatcagagtgttcgtgggcggccagatcaacagaatggaccaggagagaaaggccatcatcagcctgctgagcaagttcagactgggcttccacgaggtgcacatcctgcccgacatcaaccagaaccccagagccgagcacaccaagagattcgaggacatgatcgcccccttcagactgaacgacggcttcaaggacgaggccaccgtgaacgagatgagaagagactgcccctggaagatcagcgacgaggagatcaccaagaacagagtgaagagcctgagacaggtgagactgaacgagatcgtgctggactacagcagagacgccgccctgatcgtgatcaccctgcccatcggcagaaagggcaagtgccccagcagcctgtacatggcctggctggagaccctgagccaggacctgagaccccccgtgatcctgatcagaggcaaccaggagaacgtgctgaccttctactgccagtag

SEQ ID NO: 44172 - protein, 1021 aa, Artificial Sequence
  derived and/or modified sequence
MAELPTTETPGDATLCSGRFTISTLLSSDEPSPPAAYDSSHPSHLTHSSTFCMRTFGYNTIDVVPTYEHYANSTQPGEPRKVRPTLADLHSFLKQEGRHLHALAFDSRPSHEMTDGLVEGEAGTSSEKNPEEPVRFGWVKGVMIRCMLNIWGVILYLRLPWITAQAGIVLTWIIILLSVTVTSITGLSISAISTNGKVKSGGTYFLISRSLGPELGGSIGLIFAFANAVGVAMHTVGFAETVRDLLQEYGAPIVDPINDIRIIAVVSVTVLLAISLAGMEWESKAQVLFFLVIMVSFANYLVGTLIPPSEDKASKGFFSYRADIFVQNLVPDWRGPDGTFFGMFSIFFPSATGILAGANISGDLKDPAIAIPKGTLMAIFWTTISYLAISATIGSCVVRDASGVLNDTVTPGWGACEGLACSYGWNFTECTQQHSCHYGLINYYQTMSMVSGFAPLITAGIFGATLSSALACLVSAAKVFQCLCEDQLYPLIGFFGKGYGKNKEPVRGYLLAYAIAVAFIIIAELNTIAPIISNFFLCSYALINFSCFHASITNSPGWRPSFQYYNKWAALFGAIISVVIMFLLTWWAALIAIGVVLFLLLYVIYKKPEVNWGSSVQAGSYNLALSYSVGLNEVEDHIKNYRPQCLVLTGPPNFRPALVDFVGTFTRNLSLMICGHVLIGPHKQRMPELQLIANGHTKWLNKRKIKAFYSDVIAEDLRRGVQILMQAAGLGRMKPNILVVGFKKNWQSAHPATVEDYIGILHDAFDFNYGVCVMRMREGLNVSKMMQAHINPVFDPAEDGKEASARVDPKALVKEEQATTIFQSEQGKKTIDIYWLFDDGGLTLLIPYLLGRKRRWSKCKIRVFVGGQINRMDQERKAIISLLSKFRLGFHEVHILPDINQNPRAEHTKRFEDMIAPFRLNDGFKDEATVNEMRRDCPWKISDEEITKNRVKSLRQVRLNEIVLDYSRDAALIVITLPIGRKGKCPSSLYMAWLETLSQDLRPPVILIRGNQENVLTFYCQ

SEQ ID NO: 44173 - DNA, 3066 bp, Artificial Sequence
  derived and/or modified sequence
atggctgaacttcccaccacagagacaccgggtgatgccacactctgctcaggtcgcttcaccattagcactctgcttagcagcgatgagcctagccccccagccgcctacgactcgtcacatccttctcacctgacacacagttccacattttgtatgagaaccttcggctacaacactattgatgtggtaccaacttatgaacattacgcgaactcaactcagcccggtgagcccagaaaagtgcgcccgaccctagcagacttgcattccttcttgaaacaggaagggcgtcatcttcacgctctggcatttgatagtcggcccagtcacgagatgactgacggactggtggagggtgaagccggcacatctagcgagaaaaacccggaggaaccagtgcgatttggctgggtcaagggggttatgatacgatgcatgcttaatatctggggcgtcattctctatcttcgcctgccctggatcaccgcccaggcggggatcgtgctgacctggatcatcatcctcctgtctgtgaccgtgacatccatcacaggtctatcaatttccgctatatccactaacgggaaggttaaatcaggtgggacgtattttcttatttcccgaagcctcggcccagagctgggcgggagcattggtctgattttcgccttcgccaacgccgtgggcgtcgccatgcacactgttggtttcgctgaaaccgtacgcgacctgctccaggagtatggagctcctatagttgatcctattaacgatatccggattatcgctgttgtatccgtcacagtgctgctggccatttccctcgcaggaatggagtgggagtcaaaagctcaggtcctgttcttcctcgtgataatggtgtcatttgcaaactacctggtcggcacgcttattccccctagtgaggataaagcctcaaaaggatttttttcttacagggctgatattttcgtccaaaacctcgtgcctgactggagggggccagatggtacgtttttcggcatgttctcaatatttttcccctccgcaacaggaatcctggctggcgccaatatatctggagatcttaaagaccctgccatcgctattcccaaaggaacccttatggcaatcttttggacaacgatatcatacctcgctatctctgccactatcgggagctgcgttgtgcgggacgcttcaggcgtcttaaacgacacagtcactcctgggtggggtgcatgcgaggggcttgcttgcagttacggctggaatttcacagaatgcacacaacagcactcgtgccattatggactgataaattactaccagacaatgagcatggtgtctggctttgctcccctgatcactgccggaatctttggggcaactctctcctccgccttagcctgcctcgtgtccgccgccaaggtgtttcagtgcctgtgtgaggaccaactgtatcccttgattgggttttttggcaaaggttacggcaaaaacaaggagccagtcagaggctacctgcttgcgtacgccattgccgtggctttcatcatcatagctgagctgaacacgattgcgccaattatttcaaacttttttctgtgctcatatgccctgattaatttcagttgtttccatgctagcattacaaattcccctggatggaggcctagtttccagtactacaacaaatgggctgctctgtttggagctatcatcagcgtcgtgattatgttcttgctgacctggtgggctgccttgattgccattggcgtcgtgctgtttctcctactctatgtgatctacaagaagcccgaggtcaattgggggtccagtgtgcaagccgggtcatacaatctggcgctgtcctatagtgtcggacttaatgaagtggaggaccacataaaaaattatcggccccagtgtttggtgctgactggccccccgaactttaggcctgctttggtggactttgttggaacattcacgcgcaatctgagccttatgatttgcggccacgtgcttatcgggcctcacaagcagaggatgcccgaacttcaactgattgccaatggccacaccaaatggctgaataaaaggaagatcaaggcgttctacagcgacgtgattgctgaagacctcagaagaggagtgcagattttaatgcaggccgccgggctgggtcgcatgaagccgaacatattagtcgtgggcttcaagaagaactggcagtcagcccatcctgcaacagttgaagattacataggaattcttcacgatgcttttgattttaactacggagtctgcgtcatgcggatgagagaagggctgaacgtttccaagatgatgcaggcacacatcaatcccgttttcgaccctgccgaggatggaaaagaggcctctgcccgcgtggaccccaaggccctcgtcaaggaggagcaggcaacaacgatttttcagtccgagcagggcaaaaagaccatcgacatttactggcttttcgatgacggtggactcactcttcttatcccttacctgctgggacggaagcgccgctggtcgaagtgcaaaattagagttttcgtcggcgggcagattaacagaatggaccaggagcgcaaggctatcattagtttgcttagcaaattcagactgggatttcacgaggtccacatcttgcctgatataaatcaaaatcccagagctgaacacactaaacgcttcgaagacatgattgccccattccggctcaatgatggcttcaaggacgaggccacagtgaatgagatgaggagagattgtccctggaagatatcagacgaggagatcaccaaaaaccgtgtgaaaagcctgagacaagtcaggctcaatgaaattgtcttggattatagtcgggacgccgctcttatcgtgattacactgccaatcggaaggaaggggaaatgcccttcaagtctgtatatggcgtggttggagacgctttcacaggatttacgacctcctgtaatcctaatcagggggaaccaggagaatgtactcactttctactgccagtag

SEQ ID NO: 44174 - DNA, 3066 bp, Artificial Sequence
  derived and/or modified sequence
atggccgagctgcccaccacagagaccccaggagatgccaccctgtgcagcggccgcttcaccatcagcaccctgctgagcagtgatgagcccagccccccagctgcctatgacagcagccaccccagccacctgacccacagcagcaccttctgcatgaggaccttcggctacaacaccattgatgtggtgcccacctatgagcactacgccaacagcacccagcccggggagcccaggaaggtgcggcccaccctggccgacctgcacagcttcctgaagcaggagggccgccacctgcacgccctggcctttgacagccggcccagccatgagatgacagatggcctggtggagggggaggccggcaccagcagcgagaagaaccctgaggagcctgtgcgcttcggctgggtgaagggcgtgatgatccgctgcatgctgaacatctggggcgtcatcctgtacctgcggctgccctggatcacagcccaggccggcatcgtgctgacctggatcatcatcctgctgtctgtgacagtgaccagcatcaccggcctgagcatcagcgccatcagcaccaacgggaaggtgaagagcggcggcacctacttcctgatcagccgcagcctgggccctgagctgggcggcagcatcggcctcatctttgcctttgccaatgctgtgggcgtggccatgcacacagtgggctttgctgagaccgtgcgggacctgctgcaggagtatggagcccccatcgtggaccccatcaatgacatccgcatcatcgctgtggtgtctgtgacagtgctgctggccatcagcctggccggcatggagtgggagagcaaggcccaggtgctcttcttcctggtgatcatggtgtcctttgccaactacctggtgggcaccctcatccccccatctgaggacaaggccagcaagggcttcttctcctacagagctgacatctttgtgcagaacctggtgcctgactggaggggcccagatggcaccttcttcggcatgttcagcatcttcttccccagcgccaccggcatcctggccggggccaacatcagcggggacctgaaggaccctgccatcgccatccccaagggcaccctgatggccatcttctggaccaccatctcctacctggccatcagcgccaccatcggcagctgtgtggtgagagatgccagcggcgtgctgaatgacacagtgaccccaggctggggcgcctgtgagggcctggcctgcagctatggctggaacttcacagaatgtacccagcagcacagctgccactacggcctcatcaactactaccagaccatgtccatggtgtctggctttgcccccctcatcacagctggcatctttggagccaccctgagcagcgccctggcctgcctggtgtctgctgccaaggtgttccagtgcctgtgtgaggaccagctgtaccccctcatcggcttcttcggcaagggctacggcaagaacaaggagcctgtgcggggctacctgctggcctatgccatcgctgtggccttcatcatcatcgccgagctgaacaccatcgcccccatcatcagcaacttcttcctgtgcagctatgccctgatcaacttcagctgcttccacgccagcatcaccaacagccctggctggaggcccagcttccagtactacaacaagtgggccgccctgtttggagccatcatctctgtggtgatcatgttcctgctgacctggtgggccgccctgattgccatcggcgtggtgctcttcctgctgctgtatgtgatctacaagaagccagaggtgaactggggcagctctgtgcaggccggcagctacaacctggccctgagctacagcgtgggcctgaatgaggtggaggaccacatcaagaactaccggccccagtgcctggtgctgactggaccacccaacttccggcctgccctggtggactttgtgggcaccttcaccaggaacctgagcctgatgatctgtggccacgtgctgattggcccccacaagcagaggatgcctgagctgcagctgattgccaacggccacaccaagtggctgaacaagaggaagatcaaggccttctacagtgatgtgattgctgaggacctgcggcggggcgtgcagatcctgatgcaggccgccggcctgggccgcatgaagcccaacatcctggtggtgggcttcaagaagaactggcagagcgcccacccagccaccgtggaggactacatcggcatcctgcatgatgcctttgacttcaactatggagtgtgtgtgatgaggatgagggagggcctgaatgtgtccaagatgatgcaggcccacatcaaccctgtgtttgatcctgcagaagatggcaaggaggccagcgcccgggtggaccccaaggccctggtgaaggaggagcaggccaccaccatcttccagagcgagcagggcaagaagaccatcgacatctactggctgtttgatgatggcggcctgaccctgctgatcccctacctgctgggcaggaagaggcgctggagcaagtgcaagatccgggtgtttgtgggcggccagatcaacaggatggaccaggagaggaaggccatcatcagcctgctgagcaagttccggctgggcttccacgaggtgcacatcctgcctgacatcaaccagaaccccagggctgagcacaccaagagatttgaggacatgattgcccccttccggctgaatgatggcttcaaggatgaggccaccgtgaatgagatgaggcgggactgcccctggaagatcagtgatgaggagatcaccaagaacagagtgaagagcctgcggcaggtgcggctgaatgagatcgtgctggactacagcagagatgctgccctgattgtcatcaccctgcccatcggcaggaagggcaagtgccccagcagcctgtacatggcctggctggagaccctgagccaggacctgcggccccctgtgatcctgatccggggcaaccaggagaatgtgctgaccttctactgccagtag

SEQ ID NO: 44175 - DNA, 3066 bp, Artificial Sequence
  derived and/or modified sequence
atggccgagctgcccaccaccgagacccccggcgacgccaccctgtgtagcggtcgctttactattagcactctgctctcatctgatgagcctagcccacctgctgcctacgattccagccacccgagccatctgacacactcttcgacattttgcatgcgaacttttggctataacaccattgacgtagtaccgacctatgaacattacgcaaatagtactcaacccggcgagccaaggaaagtaaggcctacattggccgatctgcattcttttttgaaacaggaggggaggcatctgcatgccctggcttttgatagccggccctctcatgaaatgaccgacggcctggtagaaggcgaagctggcactagtagtgagaagaatcccgaagagcctgtacgatttgggtgggtgaaaggcgtgatgatccgctgcatgctgaacatctggggcgtgatactttacctcagactgccctggatcactgctcaggcaggaatcgtgctgacatggatcataatcctccttagcgttactgtaacctctataaccggcctgtctatttctgctataagcacgaacggaaaggtaaagagcggggggacatattttctgatttcacgatccctggggccagaactaggtggaagtattggattgatttttgcctttgctaatgcggtcggcgtggctatgcatacggtaggctttgcagaaaccgtgcgagacctgttgcaagagtatggcgcacccatagttgaccccataaatgatattcgcattatcgctgtcgtgagcgtaactgtgctcctggcaatctccctggccggcatggaatgggagagtaaagcccaggtattattttttcttgttataatggtgtccttcgccaattacctggtaggcactttgattcctccttccgaagacaaggcttccaaggggttcttctcctaccgcgcagatatcttcgtgcagaacctggttcccgactggagaggacccgatgggactttttttggcatgttcagtatctttttccctagtgctactgggatactcgctggcgctaatatatccggcgaccttaaagatcccgctatcgcgatcccaaaggggaccctgatggccatcttttggactaccattagctatctggccatctccgcaaccatcggttcctgcgtcgttagggatgcctcaggggtcctgaacgacaccgtgacaccagggtggggcgcttgcgaggggctggcctgctcgtacggatggaacttcaccgagtgtactcaacaacattcatgccattatgggcttataaattactatcagactatgtccatggtgtcggggttcgcacccttgattaccgctggaatcttcggagccacactgagctcagccctggcctgcctggtgtctgccgcaaaagtgtttcaatgtctctgtgaagatcaactgtatcccttaatcgggttctttggcaaggggtacggcaaaaacaaggagccagtccggggatatctgttggcatatgctatcgctgtggcttttataattatcgccgaactgaataccattgcacccattataagtaacttctttctctgtagctacgccctgataaatttttcttgcttccacgctagtattaccaattccccaggatggagaccatccttccagtattataataaatgggccgccttgtttggtgccattatttctgtggtgattatgttccttctgacatggtgggccgccctgatcgcgataggggttgtgcttttcctgctgttgtacgttatttacaaaaaaccagaagtgaattggggtagcagcgtgcaggccggcagttacaatttggctctcagctactcagtgggtctgaacgaagtggaagatcacatcaaaaattatcgcccccagtgtttggtgctcacaggaccccctaattttaggcccgccctggtggattttgttggcaccttcactcgaaatcttagcttgatgatctgcggacacgtgcttatcggtccgcataaacagcggatgccagaactccagctgattgcaaacggacacaccaagtggctaaacaagagaaaaataaaggccttctacagcgatgtgatagccgaggacctgcgccgaggcgttcaaatcctcatgcaagctgctgggctgggacggatgaagcccaatattctcgtggtcggtttcaaaaaaaattggcagagcgcccaccccgccaccgtggaagactatatcgggatccttcacgacgccttcgacttcaactacggggtttgtgtgatgcgcatgcgggagggccttaacgtgtccaaaatgatgcaggcacacataaacccagtcttcgaccctgccgaggacggcaaggaagcctctgcccgggtggaccctaaagcactagtcaaggaggaacaggccactacaattttccagagcgaacagggcaaaaaaaccatcgatatttactggctattcgatgacggtggactcacacttctgatcccctacctgctaggacgcaagagacggtggtccaagtgcaaaatcagggtattcgttggtgggcagatcaacaggatggatcaagagaggaaggcaattatatctttgctaagcaagttccggttaggctttcacgaggttcacattctgcctgacatcaatcagaaccccagagctgaacatactaagaggttcgaggacatgatcgctcctttcaggctcaatgacggctttaaagatgaagccacggtcaatgaaatgaggcgggattgcccctggaaaatatccgacgaggagattaccaagaatagagtcaagagcctgcgacaagtccgtctgaacgagattgtgctcgattacagtcgggatgcggcgctcatcgtcattacgcttcccatcgggcgcaagggtaaatgccctagttcactgtacatggcatggctggaaaccctctctcaggatctgaggccccctgttatcctaatccggggaaaccaggaaaatgttcttacgttttattgtcagtag

SEQ ID NO: 44176 - DNA, 3066 bp, Artificial Sequence
  derived and/or modified sequence
atggcagaactccccaccactgagacacctggcgacgccaccctttgtagcggaaggtttacaatcagtaccctgttaagctccgatgaacccagcccccctgccgcatatgacagctcgcatccttcccacctgacccactccagcacattctgcatgcgcacatttgggtacaacacgatcgacgtcgtgcccacatatgagcactatgctaactccacacagccaggcgagcctcgtaaagtgaggcccactctggccgatctacatagcttcctgaagcaagagggtaggcacctgcacgccttggcatttgactcccggccttcccacgagatgacggatgggctggtggagggtgaggccggaacatcatcggagaagaaccctgaggagcccgttcggttcggatgggttaaaggcgtgatgatccgttgcatgttgaacatttggggtgtgatcctctacctgcggctgccctggatcaccgctcaagctggaatagtcctgacgtggatcattatccttcttagtgtcactgtgaccagcataaccggtctcagtatttcagctatttctactaatggaaaagtcaagtccggcggaacgtactttctcatctcacgcagcctgggaccagagctcggaggatctatcggactgatctttgccttcgctaacgctgtgggggtggctatgcatacagtaggatttgccgagaccgtgcgagaccttcttcaagagtacggtgctcccatcgtggatcctataaacgacatccgcatcatcgccgttgtgtctgtgaccgtgcttctcgcaatcagtctggccggtatggaatgggaaagcaaagcccaggtccttttctttctcgtgataatggtgtcatttgctaattatctagtgggcacactgatcccaccatccgaagacaaagcatcaaagggatttttttcctacagggccgatattttcgtgcaaaatctggtgcctgactggaggggacctgacggcactttcttcgggatgttttccatttttttcccttctgccacgggtatcctagctggcgctaacatctccggtgacctgaaagatcccgctatcgctatacctaagggaactctcatggctattttttggacaacaataagttatttagccatttcagccactatcggctcctgtgtggtgcgcgatgcctcaggtgttctcaacgacacagttaccccgggttggggagcatgtgaggggctggcgtgttcctacggctggaattttaccgaatgcacacaacagcattcctgtcattacgggctcatcaactattaccaaacaatgtcaatggtgtctgggtttgcacctctgatcactgcaggaattttcggcgctactctgagttccgccttagcctgcctcgtgagcgccgcaaaagttttccagtgcttatgtgaggatcagctgtatccattgataggtttctttggcaaggggtacggcaagaataaggagcccgtgagaggctacctcctcgcgtacgctatcgccgttgccttcatcataatcgcggagctcaacacaatcgctccgatcatttcaaacttttttctttgttcttatgcactgatcaacttctcttgttttcacgcctcaatcaccaactcgcccggttggcggccatctttccagtactataacaagtgggccgcactattcggggctattatctctgttgtgatcatgtttctgctcacctggtgggcagcgctgatcgcaatcggcgtagtgcttttcctgctgctctacgtcatctataagaagcccgaggtaaattggggaagtagtgtccaagccggtagctacaatctggcactgagctatagtgtggggcttaatgaggtcgaagaccacattaaaaattatcgtccccagtgtctcgttcttacaggaccccctaactttcgaccggcactggtggatttcgtcgggacattcacacggaatctatccctcatgatctgcggccatgtgctcattgggccacataaacaacgcatgcccgagctacagctgatagccaacgggcacacaaaatggctgaataaacggaagataaaagctttctatagcgatgtcattgccgaggatctcaggaggggggtacagatccttatgcaagccgctggtctgggaaggatgaagcctaacatcctggttgtgggatttaaaaaaaattggcagtcggcgcatccagccaccgtggaggactatattggcatcctgcacgacgcttttgattttaactacggcgtgtgtgtcatgcgtatgagagaggggctgaatgtgtctaaaatgatgcaggctcacatcaaccctgtcttcgaccccgcagaggacggtaaggaggcctcggcccgtgtcgatcctaaggcactcgtgaaggaggagcaggcgacaactatttttcagtccgagcaagggaagaaaacaattgacatttactggctgttcgatgatgggggactaaccctgttgatcccatatcttctggggcgaaagcgcagatggagcaagtgcaagatacgagtgtttgttggcggacagatcaacaggatggaccaagaacgaaaagctatcatctccctgctgtccaagttcaggctgggatttcacgaggtacatattcttcccgatatcaaccagaatccgagggctgagcacactaagagattcgaagatatgattgcgcctttcagactgaacgacggattcaaagacgaagcaacagtgaatgagatgcgacgcgattgtccttggaaaattagcgacgaggaaataaccaaaaacagagttaagtctcttcggcaagtaaggctcaacgagattgttctggattactctcgggatgctgccttgatcgtcatcactctgccaatcgggcgaaaaggcaagtgcccaagcagcctgtacatggcttggctcgagaccttaagccaggatttgagaccgcctgtcatcctgattcgcggtaatcaagagaatgtgctgacattctattgtcagtag

SEQ ID NO: 44177 - DNA, 4208 bp, Artificial Sequence
  derived and/or modified sequence
cccctccctggacacccaggcgacaatggcagaactgcccacaacagagacgcctggggacgccactttgtgcagcgggcgcttcaccatcagcacactgctgagcagtgatgagccctctccaccagctgcctatgacagcagccaccccagccacctgacccacagcagcaccttctgcatgcgcacctttggctacaacacgatcgatgtggtgcccacatatgagcactatgccaacagcacccagcctggtgagccccggaaggtccggcccacactggctgacctgcactccttcctcaagcaggaaggcagacacctgcatgccctggcctttgacagccggcccagccacgagatgactgatgggctggtggagggcgaggcaggcaccagcagcgagaagaaccccgaggagccagtgcgcttcggctgggtcaagggggtgatgattcgttgcatgctcaacatttggggcgtgatcctctacctgcggctgccctggattacggcccaggcaggcatcgtcctgacctggatcatcatcctgctgtcggtcacggtgacctccatcacaggcctctccatctcagccatctccaccaatggcaaggtcaagtcaggtggcacctacttcctcatctcccggagtctgggcccagagcttgggggctccatcggcctcattttcgctttcgccaatgccgtgggtgtggccatgcacacggtgggctttgcagagaccgtgcgggacctgctccaggagtatggggcacccatcgtggaccccattaacgacatccgcatcattgccgtggtctcggtcactgtgctgctggccatctccctggctggcatggagtgggagtccaaggcccaggtgctgttcttccttgtcatcatggtctcctttgccaactatttagtggggacgctgatccccccatctgaggacaaggcctccaaaggcttcttcagctaccgggcggacatttttgtccagaacttggtgcctgactggcggggtccagatggcaccttcttcggaatgttctccatcttcttcccctcggccacaggcatcctggcaggggccaacatatctggtgacctcaaggaccctgctatagccatccccaaggggaccctcatggccattttctggacgaccatttcctacctggccatctcagccaccattggctcctgcgtggtgcgtgatgcctctggggtcctgaatgacacagtgacccctggctggggtgcctgcgaggggctggcctgcagctatggctggaacttcaccgagtgcacccagcagcacagctgccactacggcctcatcaactattaccagaccatgagcatggtgtcaggcttcgcgcccctgatcacggctggcatcttcggggccaccctctcctctgccctggcctgccttgtctctgctgccaaagtcttccagtgcctttgcgaggaccagctgtacccactgatcggcttcttcggcaaaggctatggcaagaacaaggagcccgtgcgtggctacctgctggcctacgccatcgctgtggccttcatcatcatcgctgagctcaacaccatagcccccatcatttccaacttcttcctctgctcctatgccctcatcaacttcagctgcttccacgcctccatcaccaactcgcctgggtggagaccttcattccaatactacaacaagtgggcggcgctgtttggggctatcatctccgtggtcatcatgttcctcctcacctggtgggcggccctcatcgccattggcgtggtgctcttcctcctgctctatgtcatctacaagaagccagaggtaaattggggctcctcggtacaggctggctcctacaacctggccctcagctactcggtgggcctcaatgaggtggaagaccacatcaagaactaccgcccccagtgcctggtgctcacggggccccccaacttccgcccggccctggtggactttgtgggcaccttcacccggaacctcagcctgatgatctgtggccacgtgctcatcggaccccacaagcagaggatgcctgagctccagctcatcgccaacgggcacaccaagtggctgaacaagaggaagatcaaggccttctactcggatgtcattgccgaggacctccgcagaggcgtccagatcctcatgcaggccgcaggtctcgggagaatgaagcccaacattctggtggttgggttcaagaagaactggcagtcggctcacccggccacagtggaagactacattggcatcctccatgatgcctttgatttcaactatggcgtgtgtgtcatgaggatgcgggagggactcaacgtgtccaagatgatgcaggcgcacattaaccccgtgtttgacccagcggaggacgggaaggaagccagcgccagagtggaccccaaggccctggtgaaggaggagcaggccaccaccatcttccagtcggagcagggcaagaagaccatagacatctactggctctttgacgatggaggcctcaccctcctcattccctatctccttggccgcaagaggaggtggagcaaatgcaagatccgtgtgttcgtaggcggccagattaacaggatggaccaggagagaaaggcgatcatttctctgctgagcaagttccgactgggattccatgaagtccacatcctccctgacatcaaccagaaccctcgggctgagcacaccaagaggtttgaggacatgattgcacccttccgtctgaatgatggcttcaaggatgaggccactgtcaacgagatgcggcgggactgcccctggaagatctcagatgaggagattacgaagaacagagtcaagtcccttcggcaggtgaggctgaatgagattgtgctggattactcccgagacgctgctctcatcgtcatcactttgcccatagggaggaaggggaagtgccccagctcgctgtacatggcctggctggagaccctgtcccaggacctcagacctccagtcatcctgatccgaggaaaccaggaaaacgtgctcaccttttactgccagtaactccaggctttgacatccctgtccacagctctgagtgtgtgggataagttggaacttgattgcctctagtccacagggatgagactcatgttctgttgcactttaagtggcagcatctgatgatctcaccgaaaaagatggtagatttccaaatctggctggactccacttccatgggacacattccctgggtcttgtgtttataggctagagaaatagcagatggagctgcaaggaaaactctctaaagcatcctattccttttaaaggatttcttttgattttgatgaccattaattaagagttcagtctttgatttgtatgcaaattggagtcccaatgctgggcgtgaatcttgacagtttctacagaccttcctgggtgaaagttcctaaatcatgccctgcttcctccaataggagaatgggagcctcacctgtaggacctacaggctctctaaggaatgcaggtctctctctgagcctccacagccaggcaaatacatatatatatattttttttttagatgaagttttttctcttgttgcccaggctagggtgtaatggcatgatctcaggtcactgcaacctcctcccgggttcaagcatttcttctgtctcagcctcccgaatagctgggattacaggcacctgccatcacacgagctaatttttgtatttttagtagagatggggtttcaccatgttgaccaggctggtgttgagctcctgacctcaggtgatccacccacctcggtctcccaaagtgctggggttacaggcctgagccactgcgcccggcccaggcaaatttcttgaaccacttctcactcccgtcactttcaataaggggtctttgatgtcttcactggttctttggacgagggacttttcgaacttttttggttgcaacacacagtaagaaatatacttcacactgagacttgcagcgcacacacacggaaacgaccaaaacaaaaatgtcacaaaacaatacttacccttccctgggggacgtcctccagtatgttctgttctgtttatttttcactgttggttgcaatccaataaaatgactttgggatccactcatgggtggggacccacacatttgaaa

SEQ ID NO: 44178 - DNA, 3066 bp, Artificial Sequence
  derived and/or modified sequence
atggccgagctgcccaccaccgagacccccggcgacgccaccctgtgcagcggcagattcaccatcagcaccctgctgagcagcgacgagcccagcccccccgccgcctacgacagcagccaccccagccacctgacccacagcagcaccttctgcatgagaaccttcggctacaacaccatcgacgtggtgcccacctacgagcactacgccaacagcacccagcccggcgagcccagaaaggtgagacccaccctggccgacctgcacagcttcctgaagcaggagggcagacacctgcacgccctggccttcgacagcagacccagccacgagatgaccgacggcctggtggagggcgaggccggcaccagcagcgagaagaaccccgaggagcccgtgagattcggctgggtgaagggcgtgatgatcagatgcatgctgaacatctggggcgtgatcctgtacctgagactgccctggatcaccgcccaggccggcatcgtgctgacctggatcatcatcctgctgagcgtgaccgtgaccagcatcaccggcctgagcatcagcgccatcagcaccaacggcaaggtgaagagcggcggcacctacttcctgatcagcagaagcctgggccccgagctgggcggcagcatcggcctgatcttcgccttcgccaacgccgtgggcgtggccatgcacaccgtgggcttcgccgagaccgtgagagacctgctgcaggagtacggcgcccccatcgtggaccccatcaacgacatcagaatcatcgccgtggtgagcgtgaccgtgctgctggccatcagcctggccggcatggagtgggagagcaaggcccaggtgctgttcttcctggtgatcatggtgagcttcgccaactacctggtgggcaccctgatcccccccagcgaggacaaggccagcaagggcttcttcagctacagagccgacatcttcgtgcagaacctggtgcccgactggagaggccccgacggcaccttcttcggcatgttcagcatcttcttccccagcgccaccggcatcctggccggcgccaacatcagcggcgacctgaaggaccccgccatcgccatccccaagggcaccctgatggccatcttctggaccaccatcagctacctggccatcagcgccaccatcggcagctgcgtggtgagagacgccagcggcgtgctgaacgacaccgtgacccccggctggggcgcctgcgagggcctggcctgcagctacggctggaacttcaccgagtgcacccagcagcacagctgccactacggcctgatcaactactaccagaccatgagcatggtgagcggcttcgcccccctgatcaccgccggcatcttcggcgccaccctgagcagcgccctggcctgcctggtgagcgccgccaaggtgttccagtgcctgtgcgaggaccagctgtaccccctgatcggcttcttcggcaagggctacggcaagaacaaggagcccgtgagaggctacctgctggcctacgccatcgccgtggccttcatcatcatcgccgagctgaacaccatcgcccccatcatcagcaacttcttcctgtgcagctacgccctgatcaacttcagctgcttccacgccagcatcaccaacagccccggctggagacccagcttccagtactacaacaagtgggccgccctgttcggcgccatcatcagcgtggtgatcatgttcctgctgacctggtgggccgccctgatcgccatcggcgtggtgctgttcctgctgctgtacgtgatctacaagaagcccgaggtgaactggggcagcagcgtgcaggccggcagctacaacctggccctgagctacagcgtgggcctgaacgaggtggaggaccacatcaagaactacagaccccagtgcctggtgctgaccggcccccccaacttcagacccgccctggtggacttcgtgggcaccttcaccagaaacctgagcctgatgatctgcggccacgtgctgatcggcccccacaagcagagaatgcccgagctgcagctgatcgccaacggccacaccaagtggctgaacaagagaaagatcaaggccttctacagcgacgtgatcgccgaggacctgagaagaggcgtgcagatcctgatgcaggccgccggcctgggcagaatgaagcccaacatcctggtggtgggcttcaagaagaactggcagagcgcccaccccgccaccgtggaggactacatcggcatcctgcacgacgccttcgacttcaactacggcgtgtgcgtgatgagaatgagagagggcctgaacgtgagcaagatgatgcaggcccacatcaaccccgtgttcgaccccgccgaggacggcaaggaggccagcgccagagtggaccccaaggccctggtgaaggaggagcaggccaccaccatcttccagagcgagcagggcaagaagaccatcgacatctactggctgttcgacgacggcggcctgaccctgctgatcccctacctgctgggcagaaagagaagatggagcaagtgcaagatcagagtgttcgtgggcggccagatcaacagaatggaccaggagagaaaggccatcatcagcctgctgagcaagttcagactgggcttccacgaggtgcacatcctgcccgacatcaaccagaaccccagagccgagcacaccaagagattcgaggacatgatcgcccccttcagactgaacgacggcttcaaggacgaggccaccgtgaacgagatgagaagagactgcccctggaagatcagcgacgaggagatcaccaagaacagagtgaagagcctgagacaggtgagactgaacgagatcgtgctggactacagcagagacgccgccctgatcgtgatcaccctgcccatcggcagaaagggcaagtgccccagcagcctgtacatggcctggctggagaccctgagccaggacctgagaccccccgtgatcctgatcagaggcaaccaggagaacgtgctgaccttctactgccagtag

SEQ ID NO: 44179 - protein, 346 aa, Artificial Sequence
  derived and/or modified sequence
MEEPQSDPSVEPPLSQETFSDLWKLLPENNVLSPLPSQAMDDLMLSPDDIEQWFTEDPGPDEAPRMPEAAPPVAPAPAAPTPAAPAPAPSWPLSSSVPSQKTYQGSYGFRLGFLHSGTAKSVTCTYSPALNKMFCQLAKTCPVQLWVDSTPPPGTRVRAMAIYKQSQHMTEVVRRCPHHERCSDSDGLAPPQHLIRVEGNLRVEYLDDRNTFRHSVVVPYEPPEVGSDCTTIHYNYMCNSSCMGGMNRRPILTIITLEDSSGNLLGRNSFEVRVCACPGRDRRTEEENLRKKGEPHHELPPGSTKRALPNNTSSSPQPKKKPLDGEYFTLQMLLDLRWCYFLINSS

SEQ ID NO: 44180 - DNA, 1029 bp, Artificial Sequence
  derived and/or modified sequence
atggaggagccccagagcgaccccagcgtggagccccccctgagccaggagaccttcagcgacctgtggaagctgctgcccgagaacaacgtgctgagccccctgcccagccaggccatggacgacctgatgctgagccccgacgacatcgagcagtggttcaccgaggaccccggccccgacgaggccccccgcatgcccgaggccgccccccccgtggcccccgcccccgccgcccccacccccgccgcccccgcccccgcccccagctggcccctgagcagcagcgtgcccagccagaagacctaccagggcagctacggcttccgcctgggcttcctgcacagcggcaccgccaagagcgtgacctgcacctacagccccgccctgaacaagatgttctgccagctggccaagacctgccccgtgcagctgtgggtggacagcacccccccccccggcacccgcgtgcgcgccatggccatctacaagcagagccagcacatgaccgaggtggtgcgccgctgcccccaccacgagcgctgcagcgacagcgacggcctggcccccccccagcacctgatccgcgtggagggcaacctgcgcgtggagtacctggacgaccgcaacaccttccgccacagcgtggtggtgccctacgagccccccgaggtgggcagcgactgcaccaccatccactacaactacatgtgcaacagcagctgcatgggcggcatgaaccgccgccccatcctgaccatcatcaccctggaggacagcagcggcaacctgctgggccgcaacagcttcgaggtgcgcgtgtgcgcctgccccggccgcgaccgccgcaccgaggaggagaacctgcgcaagaagggcgagccccaccacgagctgccccccggcagcaccaagcgcgccctgcccaacaacaccagcagcagcccccagcccaagaagaagcccctggacggcgagtacttcaccctgcagaagaccttccccgcccgccacggcggcagccacctg

SEQ ID NO: 44181 - DNA, 1038 bp, Artificial Sequence
  derived and/or modified sequence
atggaggagccccagagcgaccccagcgtggagccccccctgagccaggagaccttcagcgacctgtggaagctgctgcccgagaacaacgtgctgagccccctgcccagccaggccatggacgacctgatgctgagccccgacgacatcgagcagtggttcaccgaggaccccggccccgacgaggccccccgcatgcccgaggccgccccccccgtggcccccgcccccgccgcccccacccccgccgcccccgcccccgcccccagctggcccctgagcagcagcgtgcccagccagaagacctaccagggcagctacggcttccgcctgggcttcctgcacagcggcaccgccaagagcgtgacctgcacctacagccccgccctgaacaagatgttctgccagctggccaagacctgccccgtgcagctgtgggtggacagcacccccccccccggcacccgcgtgcgcgccatggccatctacaagcagagccagcacatgaccgaggtggtgcgccgctgcccccaccacgagcgctgcagcgacagcgacggcctggcccccccccagcacctgatccgcgtggagggcaacctgcgcgtggagtacctggacgaccgcaacaccttccgccacagcgtggtggtgccctacgagccccccgaggtgggcagcgactgcaccaccatccactacaactacatgtgcaacagcagctgcatgggcggcatgaaccgccgccccatcctgaccatcatcaccctggaggacagcagcggcaacctgctgggccgcaacagcttcgaggtgcgcgtgtgcgcctgccccggccgcgaccgccgcaccgaggaggagaacctgcgcaagaagggcgagccccaccacgagctgccccccggcagcaccaagcgcgccctgcccaacaacaccagcagcagcccccagcccaagaagaagcccctggacggcgagtacttcaccctgcagatgctgctggacctgcgctggtgctacttcctgatcaacagcagc

SEQ ID NO: 44182 - DNA, 1032 bp, Artificial Sequence
  derived and/or modified sequence
atggaggagccccagagcgaccccagcgtggagccccccctgagccaggagaccttcagcgacctgtggaagctgctgcccgagaacaacgtgctgagccccctgcccagccaggccatggacgacctgatgctgagccccgacgacatcgagcagtggttcaccgaggaccccggccccgacgaggcccccagaatgcccgaggccgccccccccgtggcccccgcccccgccgcccccacccccgccgcccccgcccccgcccccagctggcccctgagcagcagcgtgcccagccagaagacctaccagggcagctacggcttcagactgggcttcctgcacagcggcaccgccaagagcgtgacctgcacctacagccccgccctgaacaagatgttctgccagctggccaagacctgccccgtgcagctgtgggtggacagcacccccccccccggcaccagagtgagagccatggccatctacaagcagagccagcacatgaccgaggtggtgagaagatgcccccaccacgagagatgcagcgacagcgacggcctggcccccccccagcacctgatcagagtggagggcaacctgagagtggagtacctggacgacagaaacaccttcagacacagcgtggtggtgccctacgagccccccgaggtgggcagcgactgcaccaccatccactacaactacatgtgcaacagcagctgcatgggcggcatgaacagaagacccatcctgaccatcatcaccctggaggacagcagcggcaacctgctgggcagaaacagcttcgaggtgagagtgtgcgcctgccccggcagagacagaagaaccgaggaggagaacctgagaaagaagggcgagccccaccacgagctgccccccggcagcaccaagagagccctgcccaacaacaccagcagcagcccccagcccaagaagaagcccctggacggcgagtacttcaccctgcagaagaccttccccgccagacacggcggcagccacctgtag

SEQ ID NO: 44183 - DNA, 1041 bp, Artificial Sequence
  derived and/or modified sequence
atggaggagccccagagcgaccccagcgtggagccccccctgagccaggagaccttcagcgacctgtggaagctgctgcccgagaacaacgtgctgagccccctgcccagccaggccatggacgacctgatgctgagccccgacgacatcgagcagtggttcaccgaggaccccggccccgacgaggcccccagaatgcccgaggccgccccccccgtggcccccgcccccgccgcccccacccccgccgcccccgcccccgcccccagctggcccctgagcagcagcgtgcccagccagaagacctaccagggcagctacggcttcagactgggcttcctgcacagcggcaccgccaagagcgtgacctgcacctacagccccgccctgaacaagatgttctgccagctggccaagacctgccccgtgcagctgtgggtggacagcacccccccccccggcaccagagtgagagccatggccatctacaagcagagccagcacatgaccgaggtggtgagaagatgcccccaccacgagagatgcagcgacagcgacggcctggcccccccccagcacctgatcagagtggagggcaacctgagagtggagtacctggacgacagaaacaccttcagacacagcgtggtggtgccctacgagccccccgaggtgggcagcgactgcaccaccatccactacaactacatgtgcaacagcagctgcatgggcggcatgaacagaagacccatcctgaccatcatcaccctggaggacagcagcggcaacctgctgggcagaaacagcttcgaggtgagagtgtgcgcctgccccggcagagacagaagaaccgaggaggagaacctgagaaagaagggcgagccccaccacgagctgccccccggcagcaccaagagagccctgcccaacaacaccagcagcagcccccagcccaagaagaagcccctggacggcgagtacttcaccctgcagatgctgctggacctgagatggtgctacttcctgatcaacagcagctag

SEQ ID NO: 44184 - DNA, 1032 bp, Artificial Sequence
  derived and/or modified sequence
atggaggagccccaatctgacccgtctgttgagcctccgttgtcacaggaaaccttctccgacctctggaagctgctgcccgaaaacaatgtgctcagcccactcccttcccaagcaatggatgacctaatgttgtctcccgatgacatcgaacagtggtttacagaagaccccggccccgatgaagcccctcggatgcccgaggccgctccccccgttgctcccgcccctgccgcacccaccccggccgctcccgcacctgccccatcttggcctctgtcaagttccgtcccttcacagaagacatatcagggctcctacgggtttcggctgggttttctgcacagcggcacagctaaaagcgttacctgtacttactctccagccctcaacaaaatgttctgtcagctcgccaagacatgtcccgttcaattgtgggtggactcaacccccccgccaggaacaagggtgagagccatggctatctataaacagagccagcacatgaccgaggtggtgagacgctgtccccatcatgagcgctgtagcgattccgatgggcttgctcccccacagcacctcatccgtgttgaggggaacctcagagtggaatatctggatgaccgaaatacgttccggcatagtgtggtcgtgccttacgagccacccgaggttggatcagactgtaccacaatccattacaactatatgtgtaatagtagctgcatgggcggaatgaatagaaggcctatcctaaccatcattaccctggaggactctagtggcaacttgctcgggagaaactctttcgaggttcgggtctgtgcttgccctgggcgggacaggaggacggaggaagagaatctgcggaagaagggtgagccccatcatgagctccctccaggcagcaccaaacgcgcgcttcctaacaatacctccagcagcccacagcctaaaaagaaacctctggatggagagtactttactcttcagaaaacattccctgccaggcacgggggctcgcacctttag

SEQ ID NO: 44185 - DNA, 1041 bp, Artificial Sequence
  derived and/or modified sequence
atggaagaaccacagtccgatccctctgtggaaccacccctgtcccaggaaaccttcagcgacctttggaagctcttgcccgagaataacgtactctcacctcttccctcacaggccatggacgacttaatgttgtcccctgacgacatagagcagtggttcaccgaggatcctggacctgacgaagctcctcgaatgcccgaggcggcgccaccagtggccccagccccagcagcacccactcccgccgcccccgctcctgcaccatcgtggccactgtcgagcagcgtaccctctcagaaaacctaccagggatcgtacggattccgcctgggatttctccacagcggcaccgccaaatctgtgacgtgtacctactccccagcattgaataagatgttctgccagcttgcgaagacctgtccagtgcagttatgggtcgacagcacacctcccccagggacacgtgtgcgagctatggctatatacaagcaaagccaacacatgacagaggtcgtgagacggtgtccacaccatgagcggtgttcagactccgacggacttgcacccccccagcacctcatcagggtcgagggtaacctgcgcgttgagtacttggacgataggaacaccttccggcactctgtcgttgtaccttatgaacccccagaagtgggcagcgactgtactactatccactacaattatatgtgtaatagctcatgcatgggcgggatgaatagaaggcctatcctaactatcattacgttggaggatagcagcggaaacttacttggaagaaattctttcgaggtgagagtgtgcgcctgccccggccgggacagaaggactgaggaagagaatctccgcaaaaaaggtgagccccatcatgaattaccacctgggagcaccaaacgggcactcccaaacaacacctcatcatcacctcagcccaagaaaaagcccctcgacggggagtacttcaccctgcagatgctcctggatctccggtggtgttatttcctcatcaattcgagttag

SEQ ID NO: 44186 - DNA, 1032 bp, Artificial Sequence
  derived and/or modified sequence
atggaggagccccagagcgaccccagcgtggagccccccctgagccaggagaccttcagtgacctgtggaagctgctgcctgagaacaacgtgctgagccccctgcccagccaggccatggatgacctgatgctgagcccagatgacatcgagcagtggttcacagaggaccccggcccagatgaggcccccaggatgcctgaggccgcccctcctgtggccccagccccagctgcccccaccccagctgccccagccccagcccccagctggcccctgagcagctctgtgcccagccagaagacctaccagggcagctatggcttccggctgggcttcctgcacagcggcacagccaagtctgtgacctgcacctacagccctgccctgaacaagatgttctgccagctggccaagacctgccctgtgcagctgtgggtggacagcaccccacctcctggcaccagggtgcgggccatggccatctacaagcagagccagcacatgacagaggtggtgcggcgctgcccccaccacgagcgctgcagcgacagtgatggcctggccccaccccagcacctgatccgggtggagggcaacctgcgggtggagtacctggatgacaggaacaccttccgccacagcgtggtggtgccctatgagcccccagaggtgggcagtgactgcaccaccatccactacaactacatgtgcaacagcagctgcatgggcggcatgaacagaagacccatcctgaccatcatcaccctggaggacagcagcggcaacctgctgggcagaaattcctttgaggtgcgggtgtgtgcctgccccggccgggacagaagaacagaggaggagaacctgaggaagaagggggagccccaccacgagctgcccccaggcagcaccaagagggccctgcccaacaacaccagcagcagcccccagcccaagaagaagcccctggatggagagtacttcaccctgcagaagaccttccctgcccggcacggcggcagccacctgtag

SEQ ID NO: 44187 - DNA, 1041 bp, Artificial Sequence
  derived and/or modified sequence
atggaggagccccagagcgaccccagcgtggagccccccctgagccaggagaccttcagtgacctgtggaagctgctgcctgagaacaacgtgctgagccccctgcccagccaggccatggatgacctgatgctgagcccagatgacatcgagcagtggttcacagaggaccccggcccagatgaggcccccaggatgcctgaggccgcccctcctgtggccccagccccagctgcccccaccccagctgccccagccccagcccccagctggcccctgagcagctctgtgcccagccagaagacctaccagggcagctatggcttccggctgggcttcctgcacagcggcacagccaagtctgtgacctgcacctacagccctgccctgaacaagatgttctgccagctggccaagacctgccctgtgcagctgtgggtggacagcaccccacctcctggcaccagggtgcgggccatggccatctacaagcagagccagcacatgacagaggtggtgcggcgctgcccccaccacgagcgctgcagcgacagtgatggcctggccccaccccagcacctgatccgggtggagggcaacctgcgggtggagtacctggatgacaggaacaccttccgccacagcgtggtggtgccctatgagcccccagaggtgggcagtgactgcaccaccatccactacaactacatgtgcaacagcagctgcatgggcggcatgaacagaagacccatcctgaccatcatcaccctggaggacagcagcggcaacctgctgggcagaaattcctttgaggtgcgggtgtgtgcctgccccggccgggacagaagaacagaggaggagaacctgaggaagaagggggagccccaccacgagctgcccccaggcagcaccaagagggccctgcccaacaacaccagcagcagcccccagcccaagaagaagcccctggatggagagtacttcaccctgcagatgctgctggacctgcgctggtgctacttcctgatcaacagcagctag

SEQ ID NO: 44188 - DNA, 1032 bp, Artificial Sequence
  derived and/or modified sequence
atggaggagccccagagcgaccccagcgtggagccccccctgagccaggagacatttagcgacctgtggaagttgctccctgaaaacaatgttctgagccccttacctagccaagctatggacgatctgatgctttcacccgacgacatagaacagtggttcacagaagaccctgggcctgatgaagctccacgcatgccggaagccgctcctccagttgccccagccccagcagcacccacccctgccgccccagcccctgcgccctcatggcctctgtcctcctcggtgccttcccaaaaaacctaccaagggagctacggttttcggctggggttcctccattccggcacagctaaaagtgtcacgtgtacttattcgcccgccttaaacaagatgttctgtcagctcgctaaaacatgccctgtacaactatgggtggattctaccccgccccctggaacgagggttcgtgcgatggctatctataaacagtcccaacatatgacggaagttgtgcggaggtgcccgcatcatgaacgctgctctgattctgacgggttggccccaccacagcatctgatccgcgtcgagggaaacctgcgagtcgagtaccttgatgaccgcaacacttttcgccacagtgtagtagtgccatatgagcctcctgaggtgggttcggactgcactactatccactacaattatatgtgtaatagctcatgtatggggggcatgaatcggagaccaatcctaacaatcatcaccctggaggattcatcaggtaatcttctcggcaggaattctttcgaggtccgcgtctgcgcttgcccaggtcgagatcgccgaactgaggaagagaacttacgcaagaagggcgaaccacaccacgagttaccacccgggtcaaccaagcgcgcactgcccaacaacacaagcagctccccacagcctaaaaagaaacctttagatggcgaatacttcacgctccagaagacttttcccgcaagacacggcggtagccacctgtag

SEQ ID NO: 44189 - DNA, 1041 bp, Artificial Sequence
  derived and/or modified sequence
atggaggagccccagagcgaccccagcgtggagccccccctgagccaggagacattttccgacctgtggaaattgctccctgaaaacaacgtcctgtctcccctcccatctcaagccatggacgacctcatgttgagtccagatgacatcgagcagtggttcaccgaggatcccggaccggatgaagccccaagaatgcccgaagccgcgccacccgtcgccccggcaccagctgcccctacacctgccgcgcccgcccccgccccctcatggccattatctagctccgtcccctctcagaagacgtatcaaggctcctacggtttcaggctgggcttccttcattcgggcacggctaaatctgtgacatgtacctactcacctgctctgaataagatgttctgtcagctggctaaaacctgtcccgtccagctgtgggtagacagtacccctcctccggggacgcgggtgagggctatggccatatataagcaatcacagcacatgaccgaagtcgtaaggagatgcccacaccatgaaagatgctctgattccgacggactagcacctccgcagcatttgatccgggtcgagggtaatctccgtgtggagtacctggacgacaggaacacatttagacacagcgttgtggtgccgtatgagccccctgaggtgggctcagactgtactactattcattataactatatgtgtaatagtagctgcatgggcggtatgaacagacgaccaattctgactattatcacattggaagacagcagcggaaacctgctgggacgtaattcgtttgaggtgcgagtctgtgcttgtcccggacgggaccgaagaacggaagaagaaaatctgagaaagaaaggggagcctcaccacgagctgcctcccggctctacaaagagagcgctgcccaacaacacctcttctagtccgcaaccaaaaaagaagcctctggatggggagtatttcactctccagatgctattagacctccggtggtgttactttctcataaattcttcatag

SEQ ID NO: 44190 - DNA, 1032 bp, Artificial Sequence
  derived and/or modified sequence
atggaagagccacaaagcgacccctccgttgaaccacctttatcccaggaaactttttccgatctgtggaaactgttaccggaaaacaatgtcttgtccccattgccctcgcaggcaatggatgatttaatgctgagccctgacgacatagagcagtggttcaccgaggatcctggacctgacgaggcacccaggatgcccgaggcagcccctcctgtggcacctgcccctgccgcacccacccctgccgctcctgcacccgcaccttcgtggcccctttcgtcctctgttccgtcccagaaaacctaccagggtagctatggtttccggctggggttccttcacagcggtacagccaagtccgtgacctgcacttatagccccgcactcaataagatgttttgccagctggctaagacttgccctgttcagttgtgggtcgactccacgcctccccctggtacccgtgtccgcgcaatggcaatttataaacagtcccagcacatgactgaggtcgtgcgcaggtgcccgcatcacgagcgatgctccgatagcgacgggctcgccccacctcagcacctcatccgtgttgaagggaatctccgggttgagtacctagacgacaggaacacattccgccatagcgtggtagtgccttatgaacctccggaggtgggctctgattgtacaaccatccactataattatatgtgcaactcctcctgcatgggagggatgaatcgaagacccatcctgaccattatcaccctggaggatagttctggcaacctactgggacggaactcgtttgaagtccgcgtttgtgcgtgtcccggacgggacagacgcacagaggaggagaacctgcgcaagaagggggagccacaccatgagcttccccctggaagcacaaagcgggctttgcctaataacacctcttcatcaccccagcccaagaaaaaacccctggatggagagtatttcaccctgcagaagacctttcccgcaaggcatggcggatcccatctatag

SEQ ID NO: 44191 - DNA, 1041 bp, Artificial Sequence
  derived and/or modified sequence
atggaggagcctcaatccgacccaagtgtggagcccccactgagtcaggaaacattctctgatctctggaaactcttgcctgagaacaacgtgctgagtcctctcccctcccaggctatggacgatctgatgctctcaccggacgacattgaacagtggttcacggaagatcccggaccggatgaggcacccaggatgcccgaagctgcccctcccgtggcaccagcccctgcagccccaactcctgctgcccctgccccagccccttcttggccgctgtcaagttctgtccccagccaaaaaacctaccaaggctcttatgggtttagactgggatttctgcattcaggcacagctaagtccgtcacgtgtacatatagccccgcactgaacaaaatgttctgtcagctcgccaagacctgtcctgtgcagctgtgggtggattctaccccacctccagggacccgagtacgcgcaatggccatctacaaacagtctcagcatatgacagaggtggtaagaagatgccctcatcacgagaggtgctccgacagtgatggcctggcacctcctcagcacctgatcagggtggagggcaacctaagagtggagtatttggacgaccgcaacaccttccgtcattccgttgtggtgccatatgaaccccctgaagtcggctcagactgtacaactatccattacaactacatgtgtaattcttcttgcatgggtgggatgaacagaagacccatcctgactatcattaccctggaggacagcagtggtaacctcctggggagaaatagtttcgaggtgcgcgtgtgcgcctgtccaggtcgtgaccggaggacagaggaagagaatctgcggaaaaaaggcgaaccacatcacgaacttcccccaggctctaccaagcgtgccttgccaaataatacctcctcttcccctcagccaaagaagaaaccactggatggggagtatttcactctccagatgctgctggatctgaggtggtgctattttttaatcaatagctcttag

SEQ ID NO: 44192 - DNA, 1032 bp, Artificial Sequence
  derived and/or modified sequence
atggaagagccgcaatccgatcctagtgtggaacctcccttgtcccaggagacattttcggatctgtggaaattgctgcctgagaacaacgtccttagccctcttccctcccaggccatggatgaccttatgctgagtcccgacgatatagaacaatggttcactgaagatccaggaccagacgaggcaccccgaatgcccgaagctgccccccctgttgcccccgcgccagctgccccaaccccagcagctccagcacctgcaccaagctggcctctgagctcttccgttccttcacagaaaacgtatcagggatcatatggcttccgactcgggttcctccactccggaactgccaagagcgtgacttgtacctattcacccgcactcaataagatgttttgccagctcgctaagacatgtcctgtgcaactatgggtggactccaccccaccaccaggcacaagggtccgggctatggcaatatataagcaatcccagcatatgaccgaggtcgttaggaggtgcccccaccacgaacggtgttcagactccgatggacttgctccacctcagcacctgatcagagtagagggtaatctgagggtagagtatctagatgatcgcaacacctttcgccactccgtcgtcgtgccctatgagccaccagaggttggatccgattgcaccaccattcactataattacatgtgcaactcttcctgtatgggtggaatgaaccggcggcctatcctcactatcatcactctcgaggacagctctggcaaccttcttggacggaattcctttgaggtgagagtgtgcgcgtgcccaggcagagatcgaagaaccgaggaggagaacctacgcaagaaaggggagccacaccacgagcttccaccaggatctactaagagagctctacccaataacacttcatcctccccgcagccgaagaaaaaacctctggacggtgaatacttcacattacagaagacatttcctgctcggcacggcgggtcacacctctag

SEQ ID NO: 44193 - DNA, 1041 bp, Artificial Sequence
  derived and/or modified sequence
atggaagagccacagtccgaccctagtgtggaaccacctctctctcaggaaaccttcagtgatctctggaagttactgcccgagaacaacgtgctttcccctttaccctcccaagctatggatgatctgatgctcagcccagatgacatcgaacagtggttcacggaagatcctggacccgacgaggcccccaggatgcccgaagctgctccacccgtcgccccagctccagctgcccccacaccggccgcaccagccccagcaccaagctggccgctgtctagttcagtaccatcgcagaaaacatatcaggggtcgtacggctttagactgggttttttacattccggcacagcgaagtcagttacatgcacttacagtcctgctctaaataagatgttctgtcaacttgcaaagacttgccctgtgcagctctgggtcgacagtacccccccaccaggaacacgagtgcgtgctatggctatctataagcagtcgcagcatatgactgaggtggtccgccgctgccctcaccacgagcgttgttccgattcagatggccttgctcctccgcagcatttaataagagtggaggggaacttacgagtggaatacttagacgatcgcaataccttccggcactcggttgttgtgccctatgaaccaccggaggtcggaagcgattgtaccacaatacactataactacatgtgcaacagcagctgtatggggggcatgaacaggcgtcccatcctgaccatcatcaccctcgaagatagctccggcaatctcctcggacggaatagctttgaggttcgcgtgtgtgcttgtcccggaagagacagaagaactgaggaggaaaatctccgcaagaaaggcgaaccccatcatgaacttccccctggatcaaccaagagagccctacccaataacaccagtagctcccctcaaccaaaaaaaaaaccccttgatggagaatattttaccttgcagatgctattagaccttagatggtgttacttcctgatcaattcatcgtag

SEQ ID NO: 44194 - DNA, 1032 bp, Artificial Sequence
  derived and/or modified sequence
atggaggagcctcagtctgatccttcagtggaaccccccctcagtcaagaaaccttttccgacctgtggaagttattacccgaaaacaatgttctttccccccttccttcccaagccatggatgatttaatgctgtcacccgacgacattgagcagtggtttaccgaagatcctgggcccgacgaggcccctcggatgcctgaagccgccccgcctgtcgcccccgcccctgcggcccccacaccagccgcacctgcaccagccccctcttggcctctatcctcaagtgtgccatctcagaagacctaccaggggtcctatggatttcgcctcggatttctgcatagtggtacggctaaaagtgtcacctgcacttactcccccgcactaaacaaaatgttctgccagcttgcaaaaacttgccctgttcagctttgggtcgattccacccctccccctggaacaagagtacgcgctatggcaatctataaacaatcacaacatatgacagaagttgtccgtcggtgcccacatcacgaacggtgttctgacagcgatggtttggcccccccgcagcatctcattcgagtggaaggcaacctgagggtagagtatctagatgatcgcaacacctttcgccactccgtcgtcgtgccctatgagccaccagaggttggatccgattgcaccaccattcactataattacatgtgcaactcttcctgtatgggtggaatgaaccggcggcctatcctcactatcatcactctcgaggacagctctggcaaccttcttggacggaattcctttgaggtgagagtgtgcgcgtgcccaggcagagatcgaagaaccgaggaggagaacctacgcaagaaaggggagccacaccacgagcttccaccaggctccacgaagcgcgccctgcctaataatacctcatcctcacctcagcctaagaaaaaacctttggatggcgaatatttcactctgcagaagacattcccggctcgacatggcggttcccatttatag

SEQ ID NO: 44195 - DNA, 1041 bp, Artificial Sequence
  derived and/or modified sequence
atggaggagcctcaatccgatccatctgttgagccgcctctgtcacaggaaaccttctcggacctctggaagctgctccctgagaataacgtcttgagccccctgccgtcacaggccatggacgacttaatgctctcccccgacgacattgaacaatggttcaccgaagatcccggacccgatgaagcgccccgcatgccagaagccgccccacctgtggcacccgcccctgccgcccctacacccgcagcccccgccccagcccccagttggcccttatcctccagcgtgccaagccaaaagacataccagggttcttacggcttccgattaggctttcttcattcaggcactgcaaagtccgttacttgtacctactcaccggcactgaataagatgttctgccagcttgccaaaacatgtcccgtccagctatgggttgactctacgcccccccccggaacgagagtgcgcgctatggcgatatataagcagtctcagcatatgacagaagttgtgcgcagatgtccccatcacgagagatgctctgacagcgatggtctcgcaccccctcagcacctgatccgcgtggaaggcaatctgcgggtggagtatctggatgacagaaatactttccgacattccgttgtagtcccttacgaaccccctgaagttggatcagattgtacgactattcattacaactacatgtgtaacagctcatgtatgggaggcatgaacagacgaccaatactgaccatcattacgttagaggatagctctggcaacctgctgggccggaattcttttgaggttagagtgtgcgcttgtcctgggagagatagaagaacagaggaggagaacctgagaaagaagggagaacctcatcacgagctacctcctggatcaaccaagagagccctacccaataacaccagtagctcccctcaaccaaaaaaaaaaccccttgatggagaatattttaccttgcagatgctattagaccttagatggtgttacttcctgatcaattcatcgtag

SEQ ID NO: 44196 - DNA, 1152 bp, Artificial Sequence
  derived and/or modified sequence
atggaggagccgcagtcagatcctagcgtcgagccccctctgagtcaggaaacattttcagacctatggaaactacttcctgaaaacaacgttctgtcccccttgccgtcccaagcaatggatgatttgatgctgtccccggacgatattgaacaatggttcactgaagacccaggtccagatgaagctcccagaatgccagaggctgctccccccgtggcccctgcaccagcagctcctacaccggcggcccctgcaccagccccctcctggcccctgtcatcttctgtcccttcccagaaaacctaccagggcagctacggtttccgtctgggcttcttgcattctgggacagccaagtctgtgacttgcacgtactcccctgccctcaacaagatgttttgccaactggccaagacctgccctgtgcagctgtgggttgattccacacccccgcccggcacccgcgtccgcgccatggccatctacaagcagtcacagcacatgacggaggttgtgaggcgctgcccccaccatgagcgctgctcagatagcgatggtctggcccctcctcagcatcttatccgagtggaaggaaatttgcgtgtggagtatttggatgacagaaacacttttcgacatagtgtggtggtgccctatgagccgcctgaggttggctctgactgtaccaccatccactacaactacatgtgtaacagttcctgcatgggcggcatgaaccggaggcccatcctcaccatcatcacactggaagactccagtggtaatctactgggacggaacagctttgaggtgcgtgtttgtgcctgtcctgggagagaccggcgcacagaggaagagaatctccgcaagaaaggggagcctcaccacgagctgcccccagggagcactaagcgagcactgcccaacaacaccagctcctctccccagccaaagaagaaaccactggatggagaatatttcacccttcagaaaacatttccggccaggcacggtggatcacacctgtaatcccagctactcgggaggctgaggcaggagaatcgcttgaacccaggaggcagagggttgcagtgagccgagattgcgccattgcactctagcctgggcaacagagcaagactccatctc

SEQ ID NO: 44197 - RNA, 1032 nt, Artificial Sequence
  derived and/or modified sequence
auggaagagccgcaauccgauccuaguguggaaccucccuugucccaggagacauuuucggaucuguggaaauugcugccugagaacaacguccuuagcccucuucccucccaggccauggaugaccuuaugcugagucccgacgauauagaacaaugguucacugaagauccaggaccagacgaggcaccccgaaugcccgaagcugcccccccuguugcccccgcgccagcugccccaaccccagcagcuccagcaccugcaccaagcuggccucugagcucuuccguuccuucacagaaaacguaucagggaucauauggcuuccgacucggguuccuccacuccggaacugccaagagcgugacuuguaccuauucacccgcacucaauaagauguuuugccagcucgcuaagacauguccugugcaacuauggguggacuccaccccaccaccaggcacaaggguccgggcuauggcaauauauaagcaaucccagcauaugaccgaggucguuaggaggugcccccaccacgaacgguguucagacuccgauggacuugcuccaccucagcaccugaucagaguagaggguaaucugaggguagaguaucuagaugaucgcaacaccuuucgccacuccgucgucgugcccuaugagccaccagagguuggauccgauugcaccaccauucacuauaauuacaugugcaacucuuccuguauggguggaaugaaccggcggccuauccucacuaucaucacucucgaggacagcucuggcaaccuucuuggacggaauuccuuugaggugagagugugcgcgugcccaggcagagaucgaagaaccgaggaggagaaccuacgcaagaaaggggagccacaccacgagcuuccaccaggaucuacuaagagagcucuacccaauaacacuucauccuccccgcagccgaagaaaaaaccucuggacggugaauacuucacauuacagaagacauuuccugcucggcacggcgggucacaccucuag

SEQ ID NO: 44198 - RNA, 1041 nt, Artificial Sequence
  derived and/or modified sequence
auggaagagccacaguccgacccuaguguggaaccaccucucucucaggaaaccuucagugaucucuggaaguuacugcccgagaacaacgugcuuuccccuuuacccucccaagcuauggaugaucugaugcucagcccagaugacaucgaacagugguucacggaagauccuggacccgacgaggcccccaggaugcccgaagcugcuccacccgucgccccagcuccagcugcccccacaccggccgcaccagccccagcaccaagcuggccgcugucuaguucaguaccaucgcagaaaacauaucaggggucguacggcuuuagacuggguuuuuuacauuccggcacagcgaagucaguuacaugcacuuacaguccugcucuaaauaagauguucugucaacuugcaaagacuugcccugugcagcucugggucgacaguacccccccaccaggaacacgagugcgugcuauggcuaucuauaagcagucgcagcauaugacugaggugguccgccgcugcccucaccacgagcguuguuccgauucagauggccuugcuccuccgcagcauuuaauaagaguggaggggaacuuacgaguggaauacuuagacgaucgcaauaccuuccggcacucgguuguugugcccuaugaaccaccggaggucggaagcgauuguaccacaauacacuauaacuacaugugcaacagcagcuguauggggggcaugaacaggcgucccauccugaccaucaucacccucgaagauagcuccggcaaucuccucggacggaauagcuuugagguucgcgugugugcuugucccggaagagacagaagaacugaggaggaaaaucuccgcaagaaaggcgaaccccaucaugaacuucccccuggaucaaccaagagagcccuacccaauaacaccaguagcuccccucaaccaaaaaaaaaaccccuugauggagaauauuuuaccuugcagaugcuauuagaccuuagaugguguuacuuccugaucaauucaucguag

SEQ ID NO: 44199 - RNA, 1032 nt, Artificial Sequence
  derived and/or modified sequence
auggaggagccucagucugauccuucaguggaacccccccucagucaagaaaccuuuuccgaccuguggaaguuauuacccgaaaacaauguucuuuccccccuuccuucccaagccauggaugauuuaaugcugucacccgacgacauugagcagugguuuaccgaagauccugggcccgacgaggccccucggaugccugaagccgccccgccugucgcccccgccccugcggcccccacaccagccgcaccugcaccagcccccucuuggccucuauccucaagugugccaucucagaagaccuaccagggguccuauggauuucgccucggauuucugcauagugguacggcuaaaagugucaccugcacuuacucccccgcacuaaacaaaauguucugccagcuugcaaaaacuugcccuguucagcuuugggucgauuccaccccucccccuggaacaagaguacgcgcuauggcaaucuauaaacaaucacaacauaugacagaaguuguccgucggugcccacaucacgaacgguguucugacagcgaugguuuggcccccccgcagcaucucauucgaguggaaggcaaccugaggguagaguaucuagaugaucgcaacaccuuucgccacuccgucgucgugcccuaugagccaccagagguuggauccgauugcaccaccauucacuauaauuacaugugcaacucuuccuguauggguggaaugaaccggcggccuauccucacuaucaucacucucgaggacagcucuggcaaccuucuuggacggaauuccuuugaggugagagugugcgcgugcccaggcagagaucgaagaaccgaggaggagaaccuacgcaagaaaggggagccacaccacgagcuuccaccaggcuccacgaagcgcgcccugccuaauaauaccucauccucaccucagccuaagaaaaaaccuuuggauggcgaauauuucacucugcagaagacauucccggcucgacauggcgguucccauuuauag

SEQ ID NO: 44200 - RNA, 1041 nt, Artificial Sequence
  derived and/or modified sequence
auggaggagccucaauccgauccaucuguugagccgccucugucacaggaaaccuucucggaccucuggaagcugcucccugagaauaacgucuugagcccccugccgucacaggccauggacgacuuaaugcucucccccgacgacauugaacaaugguucaccgaagaucccggacccgaugaagcgccccgcaugccagaagccgccccaccuguggcacccgccccugccgccccuacacccgcagcccccgccccagcccccaguuggcccuuauccuccagcgugccaagccaaaagacauaccaggguucuuacggcuuccgauuaggcuuucuucauucaggcacugcaaaguccguuacuuguaccuacucaccggcacugaauaagauguucugccagcuugccaaaacaugucccguccagcuauggguugacucuacgcccccccccggaacgagagugcgcgcuauggcgauauauaagcagucucagcauaugacagaaguugugcgcagauguccccaucacgagagaugcucugacagcgauggucucgcacccccucagcaccugauccgcguggaaggcaaucugcggguggaguaucuggaugacagaaauacuuuccgacauuccguuguagucccuuacgaacccccugaaguuggaucagauuguacgacuauucauuacaacuacauguguaacagcucauguaugggaggcaugaacagacgaccaauacugaccaucauuacguuagaggauagcucuggcaaccugcugggccggaauucuuuugagguuagagugugcgcuuguccugggagagauagaagaacagaggaggagaaccugagaaagaagggagaaccucaucacgagcuaccuccuggaucaaccaagagagcccuacccaauaacaccaguagcuccccucaaccaaaaaaaaaaccccuugauggagaauauuuuaccuugcagaugcuauuagaccuuagaugguguuacuuccugaucaauucaucguag

SEQ ID NO: 44201 - protein, 341 aa, Artificial Sequence
  derived and/or modified sequence
MEEPQSDPSVEPPLSQETFSDLWKLLPENNVLSPLPSQAMDDLMLSPDDIEQWFTEDPGPDEAPRMPEAAPPVAPAPAAPTPAAPAPAPSWPLSSSVPSQKTYQGSYGFRLGFLHSGTAKSVTCTYSPALNKMFCQLAKTCPVQLWVDSTPPPGTRVRAMAIYKQSQHMTEVVRRCPHHERCSDSDGLAPPQHLIRVEGNLRVEYLDDRNTFRHSVVVPYEPPEVGSDCTTIHYNYMCNSSCMGGMNRRPILTIITLEDSSGNLLGRNSFEVRVCACPGRDRRTEEENLRKKGEPHHELPPGSTKRALPNNTSSSPQPKKKPLDGEYFTLQDQTSFQKENC

SEQ ID NO: 44202 - DNA, 855 bp, Artificial Sequence
  derived and/or modified sequence
atggaggagccccagagcgaccccagcgtggagccccccctgagccaggagaccttcagcgacctgtggaagctgctgcccgagaacaacgtgctgagccccctgcccagccaggccatggacgacctgatgctgagccccgacgacatcgagcagtggttcaccgaggaccccggccccgacgaggccccccgcatgcccgaggccgccccccccgtggcccccgcccccgccgcccccacccccgccgcccccgcccccgcccccagctggcccctgagcagcagcgtgcccagccagaagacctaccagggcagctacggcttccgcctgggcttcctgcacagcggcaccgccaagagcgtgacctgcacctacagccccgccctgaacaagatgttctgccagctggccaagacctgccccgtgcagctgtgggtggacagcacccccccccccggcacccgcgtgcgcgccatggccatctacaagcagagccagcacatgaccgaggtggtgcgccgctgcccccaccacgagcgctgcagcgacagcgacggcctggcccccccccagcacctgatccgcgtggagggcaacctgcgcgtggagtacctggacgaccgcaacaccttccgccacagcgtggtggtgccctacgagccccccgaggtgggcagcgactgcaccaccatccactacaactacatgtgcaacagcagctgcatgggcggcatgaaccgccgccccatcctgaccatcatcaccctggaggacagccgcccccgccaggtggaccacctgcgcagcggcgtgcaggacagcctggccaacatcgccaagagccacctgtac

SEQ ID NO: 44203 - DNA, 1023 bp, Artificial Sequence
  derived and/or modified sequence
atggaggagccccagagcgaccccagcgtggagccccccctgagccaggagaccttcagcgacctgtggaagctgctgcccgagaacaacgtgctgagccccctgcccagccaggccatggacgacctgatgctgagccccgacgacatcgagcagtggttcaccgaggaccccggccccgacgaggccccccgcatgcccgaggccgccccccccgtggcccccgcccccgccgcccccacccccgccgcccccgcccccgcccccagctggcccctgagcagcagcgtgcccagccagaagacctaccagggcagctacggcttccgcctgggcttcctgcacagcggcaccgccaagagcgtgacctgcacctacagccccgccctgaacaagatgttctgccagctggccaagacctgccccgtgcagctgtgggtggacagcacccccccccccggcacccgcgtgcgcgccatggccatctacaagcagagccagcacatgaccgaggtggtgcgccgctgcccccaccacgagcgctgcagcgacagcgacggcctggcccccccccagcacctgatccgcgtggagggcaacctgcgcgtggagtacctggacgaccgcaacaccttccgccacagcgtggtggtgccctacgagccccccgaggtgggcagcgactgcaccaccatccactacaactacatgtgcaacagcagctgcatgggcggcatgaaccgccgccccatcctgaccatcatcaccctggaggacagcagcggcaacctgctgggccgcaacagcttcgaggtgcgcgtgtgcgcctgccccggccgcgaccgccgcaccgaggaggagaacctgcgcaagaagggcgagccccaccacgagctgccccccggcagcaccaagcgcgccctgcccaacaacaccagcagcagcccccagcccaagaagaagcccctggacggcgagtacttcaccctgcaggaccagaccagcttccagaaggagaactgc

SEQ ID NO: 44204 - DNA, 384 bp, Artificial Sequence
  derived and/or modified sequence
atggaggagccccagagcgaccccagcgtggagccccccctgagccaggagaccttcagcgacctgtggaagctgctgcccgagaacaacgtgctgagccccctgcccagccaggccatggacgacctgatgctgagccccgacgacatcgagcagtggttcaccgaggaccccggccccgacgaggccccccgcatgcccgaggccgccccccccgtggcccccgcccccgccgcccccacccccgccgcccccgcccccgcccccagctggcccctgagcagcagcgtgcccagccagaagacctaccagggcagctacggcttccgcctgggcttcctgcacagcggcaccgccaagagcgtgacctgcacctacagcccc

SEQ ID NO: 44205 - DNA, 495 bp, Artificial Sequence
  derived and/or modified sequence
atggaggagccccagagcgaccccagcgtggagccccccctgagccaggagaccttcagcgacctgtggaagctgctgcccgagaacaacgtgctgagccccctgcccagccaggccatggacgacctgatgctgagccccgacgacatcgagcagtggttcaccgaggaccccggccccgacgaggccccccgcatgcccgaggccgccccccccgtggcccccgcccccgccgcccccacccccgccgcccccgcccccgcccccagctggcccctgagcagcagcgtgcccagccagaagacctaccagggcagctacggcttccgcctgggcttcctgcacagcggcaccgccaagagcgtgacctgcacctacagccccgccctgaacaagatgttctgccagctggccaagacctgccccgtgcagctgtgggtggacagcacccccccccccggcacccgcgtgcgcgccatggccatctacaagcag

SEQ ID NO: 44206 - DNA, 858 bp, Artificial Sequence
  derived and/or modified sequence
atggaggagccccagagcgaccccagcgtggagccccccctgagccaggagaccttcagcgacctgtggaagctgctgcccgagaacaacgtgctgagccccctgcccagccaggccatggacgacctgatgctgagccccgacgacatcgagcagtggttcaccgaggaccccggccccgacgaggcccccagaatgcccgaggccgccccccccgtggcccccgcccccgccgcccccacccccgccgcccccgcccccgcccccagctggcccctgagcagcagcgtgcccagccagaagacctaccagggcagctacggcttcagactgggcttcctgcacagcggcaccgccaagagcgtgacctgcacctacagccccgccctgaacaagatgttctgccagctggccaagacctgccccgtgcagctgtgggtggacagcacccccccccccggcaccagagtgagagccatggccatctacaagcagagccagcacatgaccgaggtggtgagaagatgcccccaccacgagagatgcagcgacagcgacggcctggcccccccccagcacctgatcagagtggagggcaacctgagagtggagtacctggacgacagaaacaccttcagacacagcgtggtggtgccctacgagccccccgaggtgggcagcgactgcaccaccatccactacaactacatgtgcaacagcagctgcatgggcggcatgaacagaagacccatcctgaccatcatcaccctggaggacagcagacccagacaggtggaccacctgagaagcggcgtgcaggacagcctggccaacatcgccaagagccacctgtactag

SEQ ID NO: 44207 - DNA, 1026 bp, Artificial Sequence
  derived and/or modified sequence
atggaggagccccagagcgaccccagcgtggagccccccctgagccaggagaccttcagcgacctgtggaagctgctgcccgagaacaacgtgctgagccccctgcccagccaggccatggacgacctgatgctgagccccgacgacatcgagcagtggttcaccgaggaccccggccccgacgaggcccccagaatgcccgaggccgccccccccgtggcccccgcccccgccgcccccacccccgccgcccccgcccccgcccccagctggcccctgagcagcagcgtgcccagccagaagacctaccagggcagctacggcttcagactgggcttcctgcacagcggcaccgccaagagcgtgacctgcacctacagccccgccctgaacaagatgttctgccagctggccaagacctgccccgtgcagctgtgggtggacagcacccccccccccggcaccagagtgagagccatggccatctacaagcagagccagcacatgaccgaggtggtgagaagatgcccccaccacgagagatgcagcgacagcgacggcctggcccccccccagcacctgatcagagtggagggcaacctgagagtggagtacctggacgacagaaacaccttcagacacagcgtggtggtgccctacgagccccccgaggtgggcagcgactgcaccaccatccactacaactacatgtgcaacagcagctgcatgggcggcatgaacagaagacccatcctgaccatcatcaccctggaggacagcagcggcaacctgctgggcagaaacagcttcgaggtgagagtgtgcgcctgccccggcagagacagaagaaccgaggaggagaacctgagaaagaagggcgagccccaccacgagctgccccccggcagcaccaagagagccctgcccaacaacaccagcagcagcccccagcccaagaagaagcccctggacggcgagtacttcaccctgcaggaccagaccagcttccagaaggagaactgctag

SEQ ID NO: 44208 - DNA, 387 bp, Artificial Sequence
  derived and/or modified sequence
atggaggagccccagagcgaccccagcgtggagccccccctgagccaggagaccttcagcgacctgtggaagctgctgcccgagaacaacgtgctgagccccctgcccagccaggccatggacgacctgatgctgagccccgacgacatcgagcagtggttcaccgaggaccccggccccgacgaggcccccagaatgcccgaggccgccccccccgtggcccccgcccccgccgcccccacccccgccgcccccgcccccgcccccagctggcccctgagcagcagcgtgcccagccagaagacctaccagggcagctacggcttcagactgggcttcctgcacagcggcaccgccaagagcgtgacctgcacctacagcccctag

SEQ ID NO: 44209 - DNA, 498 bp, Artificial Sequence
  derived and/or modified sequence
atggaggagccccagagcgaccccagcgtggagccccccctgagccaggagaccttcagcgacctgtggaagctgctgcccgagaacaacgtgctgagccccctgcccagccaggccatggacgacctgatgctgagccccgacgacatcgagcagtggttcaccgaggaccccggccccgacgaggcccccagaatgcccgaggccgccccccccgtggcccccgcccccgccgcccccacccccgccgcccccgcccccgcccccagctggcccctgagcagcagcgtgcccagccagaagacctaccagggcagctacggcttcagactgggcttcctgcacagcggcaccgccaagagcgtgacctgcacctacagccccgccctgaacaagatgttctgccagctggccaagacctgccccgtgcagctgtgggtggacagcacccccccccccggcaccagagtgagagccatggccatctacaagcagtag

SEQ ID NO: 44210 - DNA, 858 bp, Artificial Sequence
  derived and/or modified sequence
atggaagaaccgcagagtgacccaagtgttgaacctcccctgtcccaggagaccttctccgacctctggaagctcctccccgagaataatgtgctttcccccttaccctcccaggccatggacgatctcatgctgagcccagatgatattgagcagtggttcaccgaggatccggggccagatgaggctcctcgtatgcctgaagctgcccccccagttgcgcccgcccccgcagcacccacccccgcagcacccgctccggcacccagttggcctctgtccagctctgtgccaagccagaagacctaccaggggtcttacggcttcagactcggttttctccattcagggaccgctaaatcagtcacatgtacttactcaccagctttgaataaaatgttttgccagttagcaaagacctgtcccgttcagttgtgggtagatagcacaccccccccaggcacaagggttcgagccatggcgatttacaagcagtcgcagcacatgacggaggtggtgcggcggtgtccccaccacgagaggtgcagcgactccgacgggttggctcctccacagcacctgattcgcgtggagggaaatctgcgcgtggaatacctggacgatcggaatactttcaggcattctgtagtggtgccctatgagccaccagaggtgggctctgattgcaccaccattcactacaactacatgtgtaattcatcctgtatgggagggatgaacagaagacctatcctgactataatcacacttgaagatagtcgtccacgacaggtcgaccacctgagaagcggggtgcaagattcactagccaacattgcaaaaagccatctgtactag

SEQ ID NO: 44211 - DNA, 1026 bp, Artificial Sequence
  derived and/or modified sequence
atggaggagccgcagtctgatccctccgtcgagcctcctctatcccaggagaccttcagtgacctgtggaagctgctacctgaaaacaatgttcttagccctctgccaagccaagctatggatgacctcatgctcagtcccgatgacattgaacagtggtttacagaggatccgggacccgacgaggctccccgcatgcctgaagctgcacctcccgtcgctcccgcccccgccgcccccactcccgccgcgccggctcccgccccttcttggccgctgagctcatctgtgcccagtcaaaagacataccaaggaagctatgggttcagactcggcttcttgcatagcggaaccgcaaaatctgtgacctgtacatacagcccagctctgaacaagatgttttgtcagttggccaaaacctgtcccgtgcagctgtgggttgactccactcccccgcctggtacccgagtccgcgccatggctatttacaagcagtcgcagcacatgaccgaagttgtacggcggtgccctcatcacgagcgctgctctgactccgacgggctggccccaccccagcaccttattagagtggaaggaaatttacgcgtcgaatacctggatgacagaaacacgttccgccactcggtcgttgtgccttatgagccacccgaggttggtagcgattgcacaaccatccattacaattacatgtgcaacagttcttgtatgggaggtatgaacagaagacctatcttgacaatcattactctggaggattcgtctggcaacctgctggggcgcaattcttttgaagtccgggtctgcgcctgcccgggcagggacagacgcaccgaagaagaaaacctgcgcaagaagggcgaacctcaccacgaactgcctcccggaagcacaaaaagggcactgcctaacaataccagcagctctccccagccaaagaagaagccacttgacggcgagtacttcacgttgcaggatcagacgtcctttcagaaggagaattgttag

SEQ ID NO: 44212 - DNA, 387 bp, Artificial Sequence
  derived and/or modified sequence
atggaggagccacagtcagacccctcggtagaaccacccctgtcccaggagaccttttcagacctctggaaactattacccgaaaataatgtgctgtcaccattgccatcacaagccatggatgatctcatgctctcccctgacgatattgagcaatggttcaccgaggaccccgggcctgatgaggccccccggatgccagaggctgcgccaccggtcgcacctgctccagctgcaccaactcctgcggccccagctcccgccccaagctggccactaagcagcagcgttccgtcccagaagacctaccaggggtcctacgggttccgccttggcttcctgcatagcggaaccgctaagagcgtcacatgtacgtatagcccttag

SEQ ID NO: 44213 - DNA, 498 bp, Artificial Sequence
  derived and/or modified sequence
atggaggagccccaaagcgatccatcagttgaacccccactatcccaagaaactttctcagacctgtggaagctgttgcctgagaataacgttctgtcccccctaccttcccaagccatggatgacctgatgttgagtccagacgacatcgaacaatggttcactgaagacccaggacctgatgaggcacctaggatgccggaggccgcaccccccgtggcccctgccccggccgcccccacgcccgctgcccctgcccctgcccccagctggccattaagtagctccgtgccatcgcagaaaacttatcagggaagctatgggtttcggctgggtttcctgcatagcggcacagccaaaagcgtgacctgtacctactccccggcccttaacaaaatgttttgccagcttgctaaaacatgtccggtccagttgtgggtcgacagcactccacctcccggcacacgtgtgcgcgcaatggctatttacaagcaatag

SEQ ID NO: 44214 - DNA, 858 bp, Artificial Sequence
  derived and/or modified sequence
atggaggagccccagagcgaccccagcgtggagccccccctgagccaggagaccttcagtgacctgtggaagctgctgcctgagaacaacgtgctgagccccctgcccagccaggccatggatgacctgatgctgagcccagatgacatcgagcagtggttcacagaggaccccggcccagatgaggcccccaggatgcctgaggccgcccctcctgtggccccagccccagctgcccccaccccagctgccccagccccagcccccagctggcccctgagcagctctgtgcccagccagaagacctaccagggcagctatggcttccggctgggcttcctgcacagcggcacagccaagtctgtgacctgcacctacagccctgccctgaacaagatgttctgccagctggccaagacctgccctgtgcagctgtgggtggacagcaccccacctcctggcaccagggtgcgggccatggccatctacaagcagagccagcacatgacagaggtggtgcggcgctgcccccaccacgagcgctgcagcgacagtgatggcctggccccaccccagcacctgatccgggtggagggcaacctgcgggtggagtacctggatgacaggaacaccttccgccacagcgtggtggtgccctatgagcccccagaggtgggcagtgactgcaccaccatccactacaactacatgtgcaacagcagctgcatgggcggcatgaacagaagacccatcctgaccatcatcaccctggaggacagccggccccggcaggtggaccacctgcggtctggagtgcaggacagcctggccaacatcgccaagagccacctgtactag

SEQ ID NO: 44215 - DNA, 1026 bp, Artificial Sequence
  derived and/or modified sequence
atggaggagccccagagcgaccccagcgtggagccccccctgagccaggagaccttcagtgacctgtggaagctgctgcctgagaacaacgtgctgagccccctgcccagccaggccatggatgacctgatgctgagcccagatgacatcgagcagtggttcacagaggaccccggcccagatgaggcccccaggatgcctgaggccgcccctcctgtggccccagccccagctgcccccaccccagctgccccagccccagcccccagctggcccctgagcagctctgtgcccagccagaagacctaccagggcagctatggcttccggctgggcttcctgcacagcggcacagccaagtctgtgacctgcacctacagccctgccctgaacaagatgttctgccagctggccaagacctgccctgtgcagctgtgggtggacagcaccccacctcctggcaccagggtgcgggccatggccatctacaagcagagccagcacatgacagaggtggtgcggcgctgcccccaccacgagcgctgcagcgacagtgatggcctggccccaccccagcacctgatccgggtggagggcaacctgcgggtggagtacctggatgacaggaacaccttccgccacagcgtggtggtgccctatgagcccccagaggtgggcagtgactgcaccaccatccactacaactacatgtgcaacagcagctgcatgggcggcatgaacagaagacccatcctgaccatcatcaccctggaggacagcagcggcaacctgctgggcagaaattcctttgaggtgcgggtgtgtgcctgccccggccgggacagaagaacagaggaggagaacctgaggaagaagggggagccccaccacgagctgcccccaggcagcaccaagagggccctgcccaacaacaccagcagcagcccccagcccaagaagaagcccctggatggagagtacttcaccctgcaggaccagaccagcttccagaaggagaactgctag

SEQ ID NO: 44216 - DNA, 387 bp, Artificial Sequence
  derived and/or modified sequence
atggaggagccccagagcgaccccagcgtggagccccccctgagccaggagaccttcagtgacctgtggaagctgctgcctgagaacaacgtgctgagccccctgcccagccaggccatggatgacctgatgctgagcccagatgacatcgagcagtggttcacagaggaccccggcccagatgaggcccccaggatgcctgaggccgcccctcctgtggccccagccccagctgcccccaccccagctgccccagccccagcccccagctggcccctgagcagctctgtgcccagccagaagacctaccagggcagctatggcttccggctgggcttcctgcacagcggcacagccaagtctgtgacctgcacctacagcccctag

SEQ ID NO: 44217 - DNA, 498 bp, Artificial Sequence
  derived and/or modified sequence
atggaggagccccagagcgaccccagcgtggagccccccctgagccaggagaccttcagtgacctgtggaagctgctgcctgagaacaacgtgctgagccccctgcccagccaggccatggatgacctgatgctgagcccagatgacatcgagcagtggttcacagaggaccccggcccagatgaggcccccaggatgcctgaggccgcccctcctgtggccccagccccagctgcccccaccccagctgccccagccccagcccccagctggcccctgagcagctctgtgcccagccagaagacctaccagggcagctatggcttccggctgggcttcctgcacagcggcacagccaagtctgtgacctgcacctacagccctgccctgaacaagatgttctgccagctggccaagacctgccctgtgcagctgtgggtggacagcaccccacctcctggcaccagggtgcgggccatggccatctacaagcagtag

SEQ ID NO: 44218 - DNA, 858 bp, Artificial Sequence
  derived and/or modified sequence
atggaggagccccagagcgaccccagcgtggagccccccctgagccaagaaacctttagcgatctgtggaagctcttgcccgagaataatgtcctgagcccactcccctcacaggccatggacgacctaatgttatctccagacgacatcgagcagtggtttacagaggacccagggccggatgaggccccaaggatgccggaagctgccccaccggtggctcccgcacctgccgcgcccacacccgctgcccccgcaccagccccctcgtggccactgtcatcctcggtgccgtcgcaaaagacttatcagggttcttacggcttccggctgggcttcttgcatagcgggacagccaagagcgtaacatgcacctatagccctgcccttaacaagatgttttgtcagctggcaaaaacctgcccagtgcaactatgggtggacagcacccccccccccggtacaagagtgagggccatggctatatataagcagtctcagcatatgacagaagtggtcagacgatgtccccatcatgaacggtgctcagactcagacggcctcgcccctcctcagcacttgatccgcgtggagggaaacctgagggtagagtacctggatgacaggaatacgttcaggcactctgtggtcgtcccctatgaaccacctgaagtcggcagcgactgcaccacaattcactataactatatgtgcaactcttcctgtatgggcggaatgaataggaggcctattctgaccatcatcaccttggaggacagccggcccaggcaggtcgaccatttacgctctggagtacaggacagcctggctaatattgccaagtcccacctgtactag

SEQ ID NO: 44219 - DNA, 1026 bp, Artificial Sequence
  derived and/or modified sequence
atggaggagccccagagcgaccccagcgtggagccccccctgagccaggaaaccttctccgacctgtggaaacttctgccagagaacaacgttttgagccccttgccgagtcaggccatggacgacttgatgctgagtccggatgacatcgagcagtggttcaccgaggaccccggcccagatgaagcgccacgcatgcccgaggccgcgcccccggtcgcccccgctcccgccgcccctacacccgctgccccagctcctgcccccagttggcctctgtcttccagcgtaccatcccagaaaacttaccaggggtcatatggatttagattaggctttctgcatagcggcaccgccaaatccgttacctgtacatacagcccagctctcaataagatgttctgtcagctggcgaagacttgccctgtgcagttgtgggtggattccaccccacctcccgggacgcgggtcagagccatggccatctataaacagtcccagcatatgacagaggttgtgagaaggtgccctcaccatgaaaggtgttccgatagtgacggacttgccccccctcagcacctcatccgcgtcgaggggaaccttcgggtcgagtacttagatgatcggaatacctttagacactctgtagtggtcccgtatgagccaccagaggtggggtctgactgcaccaccatccactataattatatgtgtaacagctcatgcatgggaggcatgaatagacggcccattctgacaatcatcaccttggaagactcttccgggaatctcctgggaaggaattcttttgaagtgagagtctgtgcctgtcctggcagagatcgacgtaccgaagaagaaaacctaagaaaaaagggcgaaccccaccacgaattgccaccaggctcgaccaagcgtgctctgcctaacaataccagcagttccccccagcccaagaagaagccgctcgacggggaatacttcactctccaggatcaaactagctttcagaaagagaactgttag

SEQ ID NO: 44220 - DNA, 387 bp, Artificial Sequence
  derived and/or modified sequence
atggaggagccccagagcgaccccagcgtggagccccccctgagccaggaaaccttctccgacctctggaagctcctgcctgagaataacgtgctatctcccttgcccagccaagctatggacgacctgatgctgtctcccgatgatattgaacagtggtttacagaagaccctgggcccgacgaggcaccacgaatgcccgaggccgcaccaccagtggcccctgcccctgcagcaccaacacctgccgcacctgcacccgcacctagctggcccttaagttcgagtgtgccctcccaaaaaacctatcaaggaagctatggcttccggctaggctttcttcattcaggaaccgcaaaatccgttacttgtacctactccccttag

SEQ ID NO: 44221 - DNA, 498 bp, Artificial Sequence
  derived and/or modified sequence
atggaggagccccagagcgaccccagcgtggagccccccctgagccaggaaacattttctgacctttggaagctgcttccagaaaataatgtcctgagtccgctgccctcgcaggcaatggacgacctgatgctctctccggacgacatcgagcaatggttcactgaagatccaggccccgacgaggcaccgaggatgccggaagcagcaccacctgtcgcgcccgcacccgcggcccccactcccgccgccccagcgccagccccttcttggcccctctcttcttctgtgcccagtcagaaaacctatcaggggtcttatggatttcggctaggatttctccactccggcaccgctaagagtgtcacgtgtacctactctcccgccctgaataagatgttttgccagttagcaaaaacgtgtccagtccagctctgggtggactcaacccctccccccggcacaagagtcagggcgatggccatttacaaacagtag

SEQ ID NO: 44222 - DNA, 858 bp, Artificial Sequence
  derived and/or modified sequence
atggaagaacctcaatcagacccatcagtcgaaccacctcttagtcaagagactttcagtgatctctggaagcttttacccgaaaataacgtgctgagccccctgccttcccaggcaatggacgacctaatgctcagcccagacgatatcgagcaatggtttacagaggacccgggacccgatgaggcacctagaatgcccgaggcagcacctccagtcgcccctgcgccagctgcaccaacccctgctgctcccgctcctgcccctagctggcccctttctagttcagtgccttcccagaagacttatcagggaagttacggttttcgccttggatttttacactctggaactgctaagtccgtaacttgtacatattctcctgctctgaacaagatgttctgccagctggcaaagacctgtccggttcagctgtgggtcgacagtactccgcctcctggaacccgcgtgcgggcaatggctatctacaagcagtcgcaacacatgacagaagtcgtccgtcgatgcccccatcatgaacggtgtagcgactccgacgggttagcaccaccccagcatctgattcgggtggaaggaaacttaagagtggagtatctggatgacagaaacacattccggcattctgtcgttgtaccatatgagcctccggaggtcggttccgactgcactaccattcactataattacatgtgtaactcgtcctgtatgggtggcatgaatagaaggccaatccttaccattatcacgctcgaagacagtcgaccgcgacaagttgatcacctgcggtccggagtgcaggactccctggccaatattgctaagtctcacctgtattag

SEQ ID NO: 44223 - DNA, 1026 bp, Artificial Sequence
  derived and/or modified sequence
atggaagagcctcagtcggacccctcggttgagccgccactgagccaagaaaccttcagcgatttatggaaactactgcctgagaacaacgttctgtcacccctcccgagccaggctatggatgacctgatgctgtcccccgacgatatagagcagtggttcacagaggatccgggaccagacgaagcgcctaggatgcctgaggctgcacccccagtcgcccctgcaccagccgcacccactcctgcagccccagcaccagcaccatcatggccgttaagctcatccgtgccttctcagaaaacttaccaggggagttacggattccggctgggctttttgcatagcgggaccgccaagagtgttacttgcacgtacagccctgctcttaataaaatgttttgtcaactggctaagacgtgccccgtccagctgtgggtagactctacccctccacctggaaccagagtcagagccatggcaatttacaaacagtctcagcacatgaccgaggtggtcaggcgctgccctcaccacgagcgctgcagcgattcggacggactggctccccctcaacatttgattcgcgtggaaggtaaccttcgggtggaatacctggatgatagaaacacattcagacatagtgttgtagtcccctacgagcctcccgaagtggggagcgactgtactaccatacactacaattatatgtgcaattcatcctgcatgggtggtatgaatcggagaccaatccttacaattatcaccctcgaagacagctccggtaatctgctgggacggaatagctttgaggtgcgcgtgtgcgcgtgccctggtcgcgatcgaagaacagaggaagagaacctgaggaagaaaggcgaaccacatcacgagctccctcccggatctaccaagcgagcacttcctaacaatacgtcttccagtccccagcctaaaaaaaagccactggatggagaatacttcacattgcaggatcagactagtttccagaaagaaaactgctag

SEQ ID NO: 44224 - DNA, 387 bp, Artificial Sequence
  derived and/or modified sequence
atggaggagccccagagcgatccctcggtggagcctcccttaagtcaagagacctttagcgacctttggaaactgttgccagagaataatgtgctgagcccactaccaagtcaggcaatggacgatctcatgctgtcgcctgatgacatagagcagtggtttacagaagaccccggtcccgacgaggccccaagaatgcccgaagctgcccctccagtcgccccagctcccgcagctcctactcccgctgctcccgctcccgcaccctcatggcccctgtctagctcagtgccatcacagaagacctatcaaggttcttatggcttccgactgggcttcctccatagcggtacagctaagtctgtgacttgcacatacagcccatag

SEQ ID NO: 44225 - DNA, 498 bp, Artificial Sequence
  derived and/or modified sequence
atggaggaaccccaatcagatcctagcgtcgagccccctctgtctcaggaaaccttcagtgacctgtggaagctgctccccgagaacaatgtcttgtcacctctgcctagccaggccatggatgatctcatgttatcaccggacgacatcgaacagtggtttaccgaggacccaggcccagacgaagcgccacggatgcccgaagcggctccacccgtggctccggcacccgctgcccctacacctgctgcgcctgctccagccccaagttggcctctgtcctcatcggtaccttcacagaagacgtatcaggggagttacggatttaggctagggttcctgcacagcggcacagccaagtccgtgacttgcacctactctccagccctgaataagatgttctgtcagttggccaagacctgtcccgtgcaactctgggtggatagtaccccgcctccgggtactagggtgcgagcgatggctatatacaagcagtag

SEQ ID NO: 44226 - DNA, 858 bp, Artificial Sequence
  derived and/or modified sequence
atggaggagcctcagtcagacccaagtgtggaacctccactaagccaagaaacattctctgacttgtggaagctcctgcctgagaataatgtcttgtcccccctgccttcacaagccatggatgacctaatgctctccccagatgacattgaacagtggtttaccgaggaccccgggcccgatgaagcccctaggatgcctgaagcagccccccctgttgcacctgcaccggcagctccaacgcccgccgcacctgcccccgccccttcctggccactttcctcctcagttccaagccaaaagacatatcagggttcatacggcttcagactgggctttctgcactccgggaccgctaagagtgtgacctgtacctatagccccgcattgaacaagatgttttgtcagttagctaagacatgcccagtgcagctttgggtagatagtactccacctcctggaacgcgtgtacgggccatggctatatacaagcagtcccaacacatgacagaggttgtcaggcgctgcccccatcacgagcggtgctccgattcggacggtctcgccccgcctcagcatctcatacgggtggaaggtaatctgcgcgtggagtatcttgacgatcggaatacctttcgccatagcgtcgttgtgccttatgaaccacccgaggtaggatctgattgtactacaatccattacaattacatgtgtaattcgtcttgcatgggagggatgaatcggcgtccaattcttactatcatcaccctggaggactctcggccccgtcaggttgatcacttaagaagcggcgtccaagactcattagccaatatcgcgaagtcccacttgtactag

SEQ ID NO: 44227 - DNA, 1026 bp, Artificial Sequence
  derived and/or modified sequence
atggaggagcctcagtctgatccctctgttgaaccaccccttagtcaggagacctttagcgatctgtggaaattgttacccgagaataacgtactttcccctctcccttcccaggctatggatgacctcatgctgtcccccgatgacatagagcagtggtttaccgaagatccaggcccagacgaagcacctcggatgcctgaggctgctccccctgtggcacctgctcccgcggctcccactcctgcagcacccgcccccgcaccatcttggcccctgtcaagctcagtccccagccaaaagacctatcaaggatcctatggttttaggttaggattccttcattccggcaccgccaaatctgtcacatgtacatatagcccagcactcaacaagatgttctgccagctggctaaaacttgcccagtccagctgtgggttgactccacccccccacccggaacacgcgtgcgtgccatggccatttacaaacaaagccagcatatgaccgaagtggtccgtaggtgcccccatcatgagcgctgctccgactcagacggcctggccccaccccagcatctcatacgagtggaagggaacctgcgcgtggagtatctggacgacagaaacacttttagacattcagtcgtcgttccttacgaacctcctgaggttggttccgactgcaccactatacattacaattacatgtgtaattcttcctgcatgggcgggatgaacagaaggcctatcctcaccatcatcaccctggaagacagtagtggtaatctgttaggcagaaactcctttgaagtacgggtgtgcgcctgcccaggtcgggatcgccgtaccgaggaggaaaatcttaggaagaagggtgagccacatcacgaattgcctcccggatccacaaagcgcgcccttcccaacaatacatcatctagcccccagcccaaaaaaaagccactggatggggagtatttcacactgcaggaccagacatcctttcagaaagagaattgttag

SEQ ID NO: 44228 - DNA, 387 bp, Artificial Sequence
  derived and/or modified sequence
atggaggagcctcaaagcgacccctccgtggagccacccctgtcacaggagaccttttcagatctgtggaaattgctgcccgaaaataatgtgctctcacccctgccgtctcaggcaatggatgacttgatgctgagccccgatgacatcgagcaatggttcaccgaagacccaggacctgacgaagcaccacgaatgcctgaagctgctcctccagtcgcccctgcacccgccgcccccactcccgcagcccccgctcctgccccatcatggccactgagcagtagtgtcccatcccaaaagacctatcagggttcctacggatttcggctgggatttctgcacagcggcaccgctaaatccgttacatgtacatactcaccatag

SEQ ID NO: 44229 - DNA, 498 bp, Artificial Sequence
  derived and/or modified sequence
atggaagagccccaatccgatccatcagtcgagccccccttgtcacaggagacgttcagtgacctgtggaaactgttgccggagaacaatgtgctgagtcccctaccaagtcaagctatggatgatctgatgctgtcgcctgatgacatcgaacagtggtttacagaggatccaggacccgatgaagctccccgaatgcccgaggcagcccctcccgtcgctcctgcacctgctgcccctacacctgctgcccccgctccagctccctcctggcctctgtcgtccagtgtcccctcacaaaaaacctaccaaggcagttacggcttccgcctgggatttttgcattcgggcactgcaaaatctgtaacttgcacctactcccctgctctgaacaaaatgttttgtcaacttgccaaaacgtgtccggtccaactttgggttgattccacaccaccccccggtaccagggtccgagccatggcaatctataagcaatag

SEQ ID NO: 44230 - DNA, 858 bp, Artificial Sequence
  derived and/or modified sequence
atggaggaaccgcagtctgatcctagtgtggagcctcctctttcccaggaaaccttctctgacctctggaaactgctgcctgagaacaacgttctgtcccctctgcccagccaagccatggatgacctgatgctatctcccgacgacatagagcaatggttcacggaagatcctggccccgatgaagctccacgtatgcctgaggccgcgccacccgtagcacccgcacctgccgccccgacgcctgccgcgcctgctcctgccccaagttggccactgtcttccagcgtgcctagtcaaaaaacctaccagggtagttatggttttagactcggcttcctgcacagtggaacagccaaatccgtcacttgcacatattctcccgcgttaaacaagatgttttgccagctggccaaaacttgcccagtgcaactctgggtggattccacacctccgccaggtacccgcgtgcgtgcaatggctatctacaaacagtcccagcacatgacagaggtggttaggagatgcccacaccacgaacgatgttcagattcagatgggcttgcgcctccacagcacctgattcgcgtggaaggcaatctgcgcgtagagtatctcgacgacagaaatacttttaggcattccgtggtcgtaccatacgagccccccgaagtgggatccgactgtactacgattcattataactacatgtgtaactcctcctgcatgggaggtatgaaccggcgcccgatactgactataattacactggaagattcaagaccacgacaggttgatcacttacgttccggcgtgcaggattcactggctaacatcgccaagagccacttatattag

SEQ ID NO: 44231 - DNA, 1026 bp, Artificial Sequence
  derived and/or modified sequence
atggaggaaccccagtctgacccgagtgtcgaaccaccattgagccaagagactttttccgacctgtggaagttgctgcccgagaataacgtgcttagccccttgccatcacaagcaatggacgatcttatgctgtccccagatgatattgaacagtggtttactgaagatcccgggcccgacgaggctccaagaatgcccgaagccgcccctcccgtggcaccggcccccgcagcaccaacccccgccgctcctgctcctgctccttcatggcctttaagtagcagcgtcccatctcagaaaacataccagggcagctatgggttccgactgggattcctccacagcggcactgcaaagagtgtaacctgtacctactcacccgcacttaacaaaatgttctgtcagctcgctaagacctgcccagttcaattatgggtggactccaccccccctcctggcacaagagtcagagctatggcaatatataaacagagccaacacatgacagaggtcgttcgccgatgtccacaccatgagcggtgctctgatagtgatggccttgcccccccccagcatttgatacgagtggaaggcaacctgcgcgtcgaatatctagacgacaggaacacttttcgacactctgttgttgtgccctacgagccgcctgaggtcggaagcgattgtactaccattcattataactatatgtgtaactcgagctgtatgggcgggatgaaccggagacccatcctaactataattaccctagaagactcgtccggaaacctgttggggagaaactcattcgaagttagagtttgcgcgtgccctggccgcgaccgcaggactgaggaagagaatctacgcaagaagggagagccccaccacgaattgcctcctgggtcaactaagagagcccttccgaacaatacatccagtagcccacagcctaaaaaaaaaccactcgacggtgaatattttacactccaagaccagacctcatttcagaaagagaactgctag

SEQ ID NO: 44232 - DNA, 387 bp, Artificial Sequence
  derived and/or modified sequence
atggaagagccacagtctgacccttctgtcgaacctccgctgtcccaagaaaccttctccgacctctggaagcttcttcctgaaaacaacgtgctctccccacttccatctcaagccatggatgacctaatgctcagccccgacgacatcgagcaatggttcactgaggacccagggcctgatgaggcacctcgcatgcctgaagctgccccacccgtggccccagcaccagcagccccaacccctgccgcccccgcccctgcgcctagttggccattgtctagttctgtaccctctcagaaaacctatcagggatcctatggattcagacttggcttccttcactccggtaccgcgaaatctgtcacctgcacttattcgccttag

SEQ ID NO: 44233 - DNA, 498 bp, Artificial Sequence
  derived and/or modified sequence
atggaggagccacagagtgatccaagcgtggaacctcctctatcccaagaaaccttctccgacttatggaagttgttaccagaaaataacgtgctctcccctttgccttctcaagccatggacgaccttatgttgagccccgacgacatagagcagtggtttacagaagacccaggccccgacgaagcccctcgaatgcccgaggccgcgccaccagttgcccccgctccggcggcacccacccccgcagcaccggccccagccccatcatggcctctcagtagtagtgtccctagccaaaaaacctaccaaggcagttacggcttccgcctgggatttttgcattcgggcactgcaaaatctgtaacttgcacctactcccctgctctgaacaaaatgttttgtcaacttgccaaaacgtgtccggtccaactttgggttgattccacaccaccccccggtaccagggtccgagccatggcaatctataagcaatag

SEQ ID NO: 44234 - DNA, 1018 bp, Artificial Sequence
  derived and/or modified sequence
atggaggagccgcagtcagatcctagcgtcgagccccctctgagtcaggaaacattttcagacctatggaaactacttcctgaaaacaacgttctgtcccccttgccgtcccaagcaatggatgatttgatgctgtccccggacgatattgaacaatggttcactgaagacccaggtccagatgaagctcccagaatgccagaggctgctccccccgtggcccctgcaccagcagctcctacaccggcggcccctgcaccagccccctcctggcccctgtcatcttctgtcccttcccagaaaacctaccagggcagctacggtttccgtctgggcttcttgcattctgggacagccaagtctgtgacttgcacgtactcccctgccctcaacaagatgttttgccaactggccaagacctgccctgtgcagctgtgggttgattccacacccccgcccggcacccgcgtccgcgccatggccatctacaagcagtcacagcacatgacggaggttgtgaggcgctgcccccaccatgagcgctgctcagatagcgatggtctggcccctcctcagcatcttatccgagtggaaggaaatttgcgtgtggagtatttggatgacagaaacacttttcgacatagtgtggtggtgccctatgagccgcctgaggttggctctgactgtaccaccatccactacaactacatgtgtaacagttcctgcatgggcggcatgaaccggaggcccatcctcaccatcatcacactggaagactccaggccaaggcaggtggatcacctgaggtcaggagttcaagacagcctggccaacatagcgaaatcccatctctactaaaaatacaaaaattagcctggcagtggtggcccacgcctgtaatcccagctactaagggggctgaggcaggaggatctcttaaccagggaggaggaggttgcagtgagcagagattgtgccactgcactccagcctgtgcaacagagtgagactctgtctc

SEQ ID NO: 44235 - DNA, 808 bp, Artificial Sequence
  derived and/or modified sequence
aaaagtctagagccaccgtccagggagcaggtagctgctgggctccggggacactttgcgttcgggctgggagcgtgctttccacgacggtgacacgcttccctggattggcagccagactgccttccgggtcactgccatggaggagccgcagtcagatcctagcgtcgagccccctctgagtcaggaaacattttcagacctatggaaactacttcctgaaaacaacgttctgtcccccttgccgtcccaagcaatggatgatttgatgctgtccccggacgatattgaacaatggttcactgaagacccaggtccagatgaagctcccagaatgccagaggctgctccccccgtggcccctgcaccagcagctcctacaccggcggcccctgcaccagccccctcctggcccctgtcatcttctgtcccttcccagaaaacctaccagggcagctacggtttccgtctgggcttcttgcattctgggacagccaagtctgtgacttgcacgtactcccctgccctcaacaagatgttttgccaactggccaagacctgccctgtgcagctgtgggttgattccacacccccgcccggcacccgcgtccgcgccatggccatctacaagcagtcacagcacatgacggaggttgtgaggcgctgcccccaccatgagcgctgctcagatagcgatggtctggcccctcctcagcatcttatccgagtggaaggaaatttgcgtgtggagtatttggatgacagaaacacttttcgacatagtgtggtctctgggaggaggggttaa

SEQ ID NO: 44236 - DNA, 1075 bp, Artificial Sequence
  derived and/or modified sequence
atggaggagccgcagtcagatcctagcgtcgagccccctctgagtcaggaaacattttcagacctatggaaactacttcctgaaaacaacgttctgtcccccttgccgtcccaagcaatggatgatttgatgctgtccccggacgatattgaacaatggttcactgaagacccaggtccagatgaagctcccagaatgccagaggctgctccccccgtggcccctgcaccagcagctcctacaccggcggcccctgcaccagccccctcctggcccctgtcatcttctgtcccttcccagaaaacctaccagggcagctacggtttccgtctgggcttcttgcattctgggacagccaagtctgtgacttgcacgtactcccctgccctcaacaagatgttttgccaactggccaagacctgccctgtgcagctgtgggttgattccacacccccgcccggcacccgcgtccgcgccatggccatctacaagcagtcacagcacatgacggaggttgtgaggcgctgcccccaccatgagcgctgctcagatagcgatggtctggcccctcctcagcatcttatccgagtggaaggaaatttgcgtgtggagtatttggatgacagaaacacttttcgacatagtgtggtggtgccctatgagccgcctgaggttggctctgactgtaccaccatccactacaactacatgtgtaacagttcctgcatgggcggcatgaaccggaggcccatcctcaccatcatcacactggaagactccagtggtaatctactgggacggaacagctttgaggtgcgtgtttgtgcctgtcctgggagagaccggcgcacagaggaagagaatctccgcaagaaaggggagcctcaccacgagctgcccccagggagcactaagcgagcactgcccaacaacaccagctcctctccccagccaaagaagaaaccactggatggagaatatttcacccttcagccacctgaagtccaaaaagggtcagtctacctcccgccataaaaaactcatgttcaagacagaagggcctgactcagactga

SEQ ID NO: 44237 - DNA, 2653 bp, Artificial Sequence
  derived and/or modified sequence
ctagagccaccgtccagggagcaggtagctgctgggctccggggacactttgcgttcgggctgggagcgtgctttccacgacggtgacacgcttccctggattggcagccagactgccttccgggtcactgccatggaggagccgcagtcagatcctagcgtcgagccccctctgagtcaggaaacattttcagacctatggaaactacttcctgaaaacaacgttctgtcccccttgccgtcccaagcaatggatgatttgatgctgtccccggacgatattgaacaatggttcactgaagacccaggtccagatgaagctcccagaatgccagaggctgctccccccgtggcccctgcaccagcagctcctacaccggcggcccctgcaccagccccctcctggcccctgtcatcttctgtcccttcccagaaaacctaccagggcagctacggtttccgtctgggcttcttgcattctgggacagccaagtctgtgacttgcacgtactcccctgccctcaacaagatgttttgccaactggccaagacctgccctgtgcagctgtgggttgattccacacccccgcccggcacccgcgtccgcgccatggccatctacaagcagtcacagcacatgacggaggttgtgaggcgctgcccccaccatgagcgctgctcagatagcgatggtctggcccctcctcagcatcttatccgagtggaaggaaatttgcgtgtggagtatttggatgacagaaacacttttcgacatagtgtggtggtgccctatgagccgcctgaggttggctctgactgtaccaccatccactacaactacatgtgtaacagttcctgcatgggcggcatgaaccggaggcccatcctcaccatcatcacactggaagactccagtggtaatctactgggacggaacagctttgaggtgcgtgtttgtgcctgtcctgggagagaccggcgcacagaggaagagaatctccgcaagaaaggggagcctcaccacgagctgcccccagggagcactaagcgagcactgcccaacaacaccagctcctctccccagccaaagaagaaaccactggatggagaatatttcacccttcaggaccagaccagctttcaaaaagaaaattgttaaagagagcatgaaaatggttctatgactttgcctgatacagatgctacttgacttacgatggtgttacttcctgataaactcgtcgtaagttgaaaatattatccgtgggcgtgagcgcttcgagatgttccgagagctgaatgaggccttggaactcaaggatgcccaggctgggaaggagccaggggggagcagggctcactccagccacctgaagtccaaaaagggtcagtctacctcccgccataaaaaactcatgttcaagacagaagggcctgactcagactgacattctccacttcttgttccccactgacagcctcccacccccatctctccctcccctgccattttgggttttgggtctttgaacccttgcttgcaataggtgtgcgtcagaagcacccaggacttccatttgctttgtcccggggctccactgaacaagttggcctgcactggtgttttgttgtggggaggaggatggggagtaggacataccagcttagattttaaggtttttactgtgagggatgtttgggagatgtaagaaatgttcttgcagttaagggttagtttacaatcagccacattctaggtaggggcccacttcaccgtactaaccagggaagctgtccctcactgttgaattttctctaacttcaaggcccatatctgtgaaatgctggcatttgcacctacctcacagagtgcattgtgagggttaatgaaataatgtacatctggccttgaaaccaccttttattacatggggtctagaacttgacccccttgagggtgcttgttccctctccctgttggtcggtgggttggtagtttctacagttgggcagctggttaggtagagggagttgtcaagtctctgctggcccagccaaaccctgtctgacaacctcttggtgaaccttagtacctaaaaggaaatctcaccccatcccacaccctggaggatttcatctcttgtatatgatgatctggatccaccaagacttgttttatgctcagggtcaatttcttttttcttttttttttttttttttctttttctttgagactgggtctcgctttgttgcccaggctggagtggagtggcgtgatcttggcttactgcagcctttgcctccccggctcgagcagtcctgcctcagcctccggagtagctgggaccacaggttcatgccaccatggccagccaacttttgcatgttttgtagagatggggtctcacagtgttgcccaggctggtctcaaactcctgggctcaggcgatccacctgtctcagcctcccagagtgctgggattacaattgtgagccaccacgtccagctggaagggtcaacatcttttacattctgcaagcacatctgcattttcaccccacccttcccctccttctccctttttatatcccatttttatatcgatctcttattttacaataaaactttgctgccacctgtgtgtctgagggg

SEQ ID NO: 44238 - DNA, 565 bp, Artificial Sequence
  derived and/or modified sequence
ttcgggctgggagcgtgctttccacgacggtgacacgcttccctggattggggctgaggagtgtccgaagagaatgggcaggtgagcggtgagacagttgttcttccagaagctttgcagtgaaaggaatcaaagaaatggagccgtgtatcagcagccagactgccttccgggtcactgccatggaggagccgcagtcagatcctagcgtcgagccccctctgagtcaggaaacattttcagacctatggaaactacttcctgaaaacaacgttctgtcccccttgccgtcccaagcaatggatgatttgatgctgtccccggacgatattgaacaatggttcactgaagacccaggtccagatgaagctcccagaatgccagaggctgctccccccgtggcccctgcaccagcagctcctacaccggcggcccctgcaccagccccctcctggcccctgtcatcttctgtcccttcccagaaaacctaccagggcagctacggtttccgtctgggcttcttgcattctgggacagccaagtctgtgacttgcacgtactcccc

SEQ ID NO: 44239 - DNA, 634 bp, Artificial Sequence
  derived and/or modified sequence
aatgcagggctgaggagtgtccgaagagaatgggcaggtgagcggtgagacagttgttcttccagaagctttgcagtgaaaggaatcaaagaaatggagccgtgtatcagcagccagactgccttccgggtcactgccatggaggagccgcagtcagatcctagcgtcgagccccctctgagtcaggaaacattttcagacctatggaaactacttcctgaaaacaacgttctgtcccccttgccgtcccaagcaatggatgatttgatgctgtccccggacgatattgaacaatggttcactgaagacccaggtccagatgaagctcccagaatgccagaggctgctccccccgtggcccctgcaccagcagctcctacaccggcggcccctgcaccagccccctcctggcccctgtcatcttctgtcccttcccagaaaacctaccagggcagctacggtttccgtctgggcttcttgcattctgggacagccaagtctgtgacttgcacgtactcccctgccctcaacaagatgttttgccaactggccaagacctgccctgtgcagctgtgggttgattccacacccccgcccggcacccgcgtccgcgccatggccatctacaagcagt

SEQ ID NO: 44240 - RNA, 858 nt, Artificial Sequence
  derived and/or modified sequence
auggaggagccucagucagacccaaguguggaaccuccacuaagccaagaaacauucucugacuuguggaagcuccugccugagaauaaugucuuguccccccugccuucacaagccauggaugaccuaaugcucuccccagaugacauugaacagugguuuaccgaggaccccgggcccgaugaagccccuaggaugccugaagcagcccccccuguugcaccugcaccggcagcuccaacgcccgccgcaccugcccccgccccuuccuggccacuuuccuccucaguuccaagccaaaagacauaucaggguucauacggcuucagacugggcuuucugcacuccgggaccgcuaagagugugaccuguaccuauagccccgcauugaacaagauguuuugucaguuagcuaagacaugcccagugcagcuuuggguagauaguacuccaccuccuggaacgcguguacgggccauggcuauauacaagcagucccaacacaugacagagguugucaggcgcugcccccaucacgagcggugcuccgauucggacggucucgccccgccucagcaucucauacggguggaagguaaucugcgcguggaguaucuugacgaucggaauaccuuucgccauagcgucguugugccuuaugaaccacccgagguaggaucugauuguacuacaauccauuacaauuacauguguaauucgucuugcaugggagggaugaaucggcguccaauucuuacuaucaucacccuggaggacucucggccccgucagguugaucacuuaagaagcggcguccaagacucauuagccaauaucgcgaagucccacuuguacuag

SEQ ID NO: 44241 - RNA, 1026 nt, Artificial Sequence
  derived and/or modified sequence
auggaggagccucagucugaucccucuguugaaccaccccuuagucaggagaccuuuagcgaucuguggaaauuguuacccgagaauaacguacuuuccccucucccuucccaggcuauggaugaccucaugcugucccccgaugacauagagcagugguuuaccgaagauccaggcccagacgaagcaccucggaugccugaggcugcucccccuguggcaccugcucccgcggcucccacuccugcagcacccgcccccgcaccaucuuggccccugucaagcucaguccccagccaaaagaccuaucaaggauccuaugguuuuagguuaggauuccuucauuccggcaccgccaaaucugucacauguacauauagcccagcacucaacaagauguucugccagcuggcuaaaacuugcccaguccagcuguggguugacuccacccccccacccggaacacgcgugcgugccauggccauuuacaaacaaagccagcauaugaccgaagugguccguaggugcccccaucaugagcgcugcuccgacucagacggccuggccccaccccagcaucucauacgaguggaagggaaccugcgcguggaguaucuggacgacagaaacacuuuuagacauucagucgucguuccuuacgaaccuccugagguugguuccgacugcaccacuauacauuacaauuacauguguaauucuuccugcaugggcgggaugaacagaaggccuauccucaccaucaucacccuggaagacaguagugguaaucuguuaggcagaaacuccuuugaaguacgggugugcgccugcccaggucgggaucgccguaccgaggaggaaaaucuuaggaagaagggugagccacaucacgaauugccucccggauccacaaagcgcgcccuucccaacaauacaucaucuagcccccagcccaaaaaaaagccacuggauggggaguauuucacacugcaggaccagacauccuuucagaaagagaauuguuag

SEQ ID NO: 44242 - RNA, 387 nt, Artificial Sequence
  derived and/or modified sequence
auggaggagccucaaagcgaccccuccguggagccaccccugucacaggagaccuuuucagaucuguggaaauugcugcccgaaaauaaugugcucucaccccugccgucucaggcaauggaugacuugaugcugagccccgaugacaucgagcaaugguucaccgaagacccaggaccugacgaagcaccacgaaugccugaagcugcuccuccagucgccccugcacccgccgcccccacucccgcagcccccgcuccugccccaucauggccacugagcaguagugucccaucccaaaagaccuaucaggguuccuacggauuucggcugggauuucugcacagcggcaccgcuaaauccguuacauguacauacucaccauag

SEQ ID NO: 44243 - RNA, 498 nt, Artificial Sequence
  derived and/or modified sequence
auggaagagccccaauccgauccaucagucgagccccccuugucacaggagacguucagugaccuguggaaacuguugccggagaacaaugugcugaguccccuaccaagucaagcuauggaugaucugaugcugucgccugaugacaucgaacagugguuuacagaggauccaggacccgaugaagcuccccgaaugcccgaggcagccccucccgucgcuccugcaccugcugccccuacaccugcugcccccgcuccagcucccuccuggccucugucguccaguguccccucacaaaaaaccuaccaaggcaguuacggcuuccgccugggauuuuugcauucgggcacugcaaaaucuguaacuugcaccuacuccccugcucugaacaaaauguuuugucaacuugccaaaacguguccgguccaacuuuggguugauuccacaccaccccccgguaccaggguccgagccauggcaaucuauaagcaauag

SEQ ID NO: 44244 - RNA, 858 nt, Artificial Sequence
  derived and/or modified sequence
auggaggaaccgcagucugauccuaguguggagccuccucuuucccaggaaaccuucucugaccucuggaaacugcugccugagaacaacguucuguccccucugcccagccaagccauggaugaccugaugcuaucucccgacgacauagagcaaugguucacggaagauccuggccccgaugaagcuccacguaugccugaggccgcgccacccguagcacccgcaccugccgccccgacgccugccgcgccugcuccugccccaaguuggccacugucuuccagcgugccuagucaaaaaaccuaccaggguaguuaugguuuuagacucggcuuccugcacaguggaacagccaaauccgucacuugcacauauucucccgcguuaaacaagauguuuugccagcuggccaaaacuugcccagugcaacucuggguggauuccacaccuccgccagguacccgcgugcgugcaauggcuaucuacaaacagucccagcacaugacagaggugguuaggagaugcccacaccacgaacgauguucagauucagaugggcuugcgccuccacagcaccugauucgcguggaaggcaaucugcgcguagaguaucucgacgacagaaauacuuuuaggcauuccguggucguaccauacgagccccccgaagugggauccgacuguacuacgauucauuauaacuacauguguaacuccuccugcaugggagguaugaaccggcgcccgauacugacuauaauuacacuggaagauucaagaccacgacagguugaucacuuacguuccggcgugcaggauucacuggcuaacaucgccaagagccacuuauauuag

SEQ ID NO: 44245 - RNA, 1026 nt, Artificial Sequence
  derived and/or modified sequence
auggaggaaccccagucugacccgagugucgaaccaccauugagccaagagacuuuuuccgaccuguggaaguugcugcccgagaauaacgugcuuagccccuugccaucacaagcaauggacgaucuuaugcuguccccagaugauauugaacagugguuuacugaagaucccgggcccgacgaggcuccaagaaugcccgaagccgccccucccguggcaccggcccccgcagcaccaacccccgccgcuccugcuccugcuccuucauggccuuuaaguagcagcgucccaucucagaaaacauaccagggcagcuauggguuccgacugggauuccuccacagcggcacugcaaagaguguaaccuguaccuacucacccgcacuuaacaaaauguucugucagcucgcuaagaccugcccaguucaauuauggguggacuccacccccccuccuggcacaagagucagagcuauggcaauauauaaacagagccaacacaugacagaggucguucgccgauguccacaccaugagcggugcucugauagugauggccuugcccccccccagcauuugauacgaguggaaggcaaccugcgcgucgaauaucuagacgacaggaacacuuuucgacacucuguuguugugcccuacgagccgccugaggucggaagcgauuguacuaccauucauuauaacuauauguguaacucgagcuguaugggcgggaugaaccggagacccauccuaacuauaauuacccuagaagacucguccggaaaccuguuggggagaaacucauucgaaguuagaguuugcgcgugcccuggccgcgaccgcaggacugaggaagagaaucuacgcaagaagggagagccccaccacgaauugccuccugggucaacuaagagagcccuuccgaacaauacauccaguagcccacagccuaaaaaaaaaccacucgacggugaauauuuuacacuccaagaccagaccucauuucagaaagagaacugcuag

SEQ ID NO: 44246 - RNA, 387 nt, Artificial Sequence
  derived and/or modified sequence
auggaagagccacagucugacccuucugucgaaccuccgcugucccaagaaaccuucuccgaccucuggaagcuucuuccugaaaacaacgugcucuccccacuuccaucucaagccauggaugaccuaaugcucagccccgacgacaucgagcaaugguucacugaggacccagggccugaugaggcaccucgcaugccugaagcugccccacccguggccccagcaccagcagccccaaccccugccgcccccgccccugcgccuaguuggccauugucuaguucuguacccucucagaaaaccuaucagggauccuauggauucagacuuggcuuccuucacuccgguaccgcgaaaucugucaccugcacuuauucgccuuag

SEQ ID NO: 44247 - RNA, 498 nt, Artificial Sequence
  derived and/or modified sequence
auggaggagccacagagugauccaagcguggaaccuccucuaucccaagaaaccuucuccgacuuauggaaguuguuaccagaaaauaacgugcucuccccuuugccuucucaagccauggacgaccuuauguugagccccgacgacauagagcagugguuuacagaagacccaggccccgacgaagccccucgaaugcccgaggccgcgccaccaguugcccccgcuccggcggcacccacccccgcagcaccggccccagccccaucauggccucucaguaguagugucccuagccaaaaaaccuaccaaggcaguuacggcuuccgccugggauuuuugcauucgggcacugcaaaaucuguaacuugcaccuacuccccugcucugaacaaaauguuuugucaacuugccaaaacguguccgguccaacuuuggguugauuccacaccaccccccgguaccaggguccgagccauggcaaucuauaagcaauag

SEQ ID NO: 44248 - protein, 17 aa, Artificial Sequence
  derived and/or modified sequence
TCPVQLWVDSTPPPGTR

SEQ ID NO: 44249 - DNA, 597 bp, Artificial Sequence
  derived and/or modified sequence
atgttctgccagctggccaagacctgccccgtgcagctgtgggtggacagcacccccccccccggcacccgcgtgcgcgccatggccatctacaagcagagccagcacatgaccgaggtggtgcgccgctgcccccaccacgagcgctgcagcgacagcgacggcctggcccccccccagcacctgatccgcgtggagggcaacctgcgcgtggagtacctggacgaccgcaacaccttccgccacagcgtggtggtgccctacgagccccccgaggtgggcagcgactgcaccaccatccactacaactacatgtgcaacagcagctgcatgggcggcatgaaccgccgccccatcctgaccatcatcaccctggaggacagcagcggcaacctgctgggccgcaacagcttcgaggtgcgcgtgtgcgcctgccccggccgcgaccgccgcaccgaggaggagaacctgcgcaagaagggcgagccccaccacgagctgccccccggcagcaccaagcgcgccctgcccaacaacaccagcagcagcccccagcccaagaagaagcccctggacggcgagtacttcaccctgcag

SEQ ID NO: 44250 - DNA, 273 bp, Artificial Sequence
  derived and/or modified sequence
atgttctgccagctggccaagacctgccccgtgcagctgtgggtggacagcacccccccccccggcaccagagtgagagccatggccatctacaagcagagccagcacatgaccgaggtggtgagaagatgcccccaccacgagagatgcagcgacagcgacggcctggcccccccccagcacctgatcagagtggagggcaacctgagagtggagtacctggacgacagaaacaccttcagacacagcgtggtgagcggcagaagaggctag

SEQ ID NO: 44251 - DNA, 600 bp, Artificial Sequence
  derived and/or modified sequence
atgttctgccagctggccaagacctgccccgtgcagctgtgggtggacagcacccccccccccggcaccagagtgagagccatggccatctacaagcagagccagcacatgaccgaggtggtgagaagatgcccccaccacgagagatgcagcgacagcgacggcctggcccccccccagcacctgatcagagtggagggcaacctgagagtggagtacctggacgacagaaacaccttcagacacagcgtggtggtgccctacgagccccccgaggtgggcagcgactgcaccaccatccactacaactacatgtgcaacagcagctgcatgggcggcatgaacagaagacccatcctgaccatcatcaccctggaggacagcagcggcaacctgctgggcagaaacagcttcgaggtgagagtgtgcgcctgccccggcagagacagaagaaccgaggaggagaacctgagaaagaagggcgagccccaccacgagctgccccccggcagcaccaagagagccctgcccaacaacaccagcagcagcccccagcccaagaagaagcccctggacggcgagtacttcaccctgcagtag

SEQ ID NO: 44252 - DNA, 273 bp, Artificial Sequence
  derived and/or modified sequence
atgttttgtcagttggctaagacttgcccagtccagctctgggtggactccacccctccacctggaacccgcgtgagagccatggccatttataaacaaagccagcatatgacagaggttgtgcgtagatgcccccatcacgaaaggtgctccgactccgacgggctcgctccgcctcagcacctgatcagagtggaaggcaatctgagggtggaatatctggacgaccggaacacctttcggcatagcgtggtgtctggtcggagggggtag

SEQ ID NO: 44253 - DNA, 600 bp, Artificial Sequence
  derived and/or modified sequence
atgttctgccaacttgccaagacctgccctgtgcaactttgggtggacagcactccgcctccggggactagggtgagggcgatggccatctataagcaatctcaacatatgaccgaggtcgttcggcggtgcccccaccatgaacggtgctccgactcagacggccttgcccctcctcagcatctgatccgggtggagggaaacctgagggtggaatatttagacgaccggaacactttccggcacagcgttgttgtcccctatgaaccacccgaagtcggcagtgattgcacaacaattcactataactatatgtgtaatagttcttgtatggggggtatgaaccgaagacccatcttgacaatcatcacactggaggactcctcaggaaaccttctggggcgtaactcattcgaggtccgagtgtgcgcctgtcccgggcgcgatcgtaggactgaagaggagaatcttcggaaaaaaggcgaaccgcaccacgaattgccaccagggagcaccaaaagggcattaccaaacaataccagcagttccccccaacccaagaagaaaccactggacggcgagtattttaccctgcagtag

SEQ ID NO: 44254 - DNA, 273 bp, Artificial Sequence
  derived and/or modified sequence
atgttctgccagctggccaagacctgccctgtgcagctgtgggtggacagcaccccacctcctggcaccagggtgcgggccatggccatctacaagcagagccagcacatgacagaggtggtgcggcgctgcccccaccacgagcgctgcagcgacagtgatggcctggccccaccccagcacctgatccgggtggagggcaacctgcgggtggagtacctggatgacaggaacaccttccgccacagcgtggtgtctggccggcggggctag

SEQ ID NO: 44255 - DNA, 600 bp, Artificial Sequence
  derived and/or modified sequence
atgttctgccagctggccaagacctgccctgtgcagctgtgggtggacagcaccccacctcctggcaccagggtgcgggccatggccatctacaagcagagccagcacatgacagaggtggtgcggcgctgcccccaccacgagcgctgcagcgacagtgatggcctggccccaccccagcacctgatccgggtggagggcaacctgcgggtggagtacctggatgacaggaacaccttccgccacagcgtggtggtgccctatgagcccccagaggtgggcagtgactgcaccaccatccactacaactacatgtgcaacagcagctgcatgggcggcatgaacagaagacccatcctgaccatcatcaccctggaggacagcagcggcaacctgctgggcagaaattcctttgaggtgcgggtgtgtgcctgccccggccgggacagaagaacagaggaggagaacctgaggaagaagggggagccccaccacgagctgcccccaggcagcaccaagagggccctgcccaacaacaccagcagcagcccccagcccaagaagaagcccctggatggagagtacttcaccctgcagtag

SEQ ID NO: 44256 - DNA, 273 bp, Artificial Sequence
  derived and/or modified sequence
atgttctgccagctggccaagacctgccccgtgcagctgtgggtggattccacacccccacctgggaccagggtgagggctatggctatctacaaacagtctcaacatatgacagaagtggtccggaggtgcccgcatcacgaacgctgctccgattccgatggcctggcccctccacaacaccttatacgggtagaagggaatttgagggttgaatatttggatgaccgaaacacattcaggcactcagtggtgagtgggcgtagaggctag

SEQ ID NO: 44257 - DNA, 600 bp, Artificial Sequence
  derived and/or modified sequence
atgttctgccagctggccaagacctgccccgtgcagctgtgggtggatagcaccccaccacctgggacacgggttcgggctatggctatttataagcagtcacagcacatgaccgaagtggtgcggcggtgtccccatcacgagcggtgctccgattctgacggcctcgcccctccacagcatctcattagagtagagggcaatctacgggtggagtatcttgacgaccggaatacctttcggcactccgtggtagtcccctatgagccccccgaggtcggatcagattgtactacaatccattacaattacatgtgtaatagctcctgcatgggaggcatgaataggagaccgattctgaccataataaccctcgaagacagctctgggaatctgctggggagaaacagtttcgaagtgagagtgtgtgcatgccctgggagagaccgcagaaccgaggaagaaaatcttcgaaagaaaggtgaacctcaccacgagctccctccagggagcactaaaagagccctgcctaacaacacctcgtcttctccacagcccaaaaaaaagcccctggatggcgaatatttcaccttgcaatag

SEQ ID NO: 44258 - DNA, 273 bp, Artificial Sequence
  derived and/or modified sequence
atgttctgccagctggctaaaacatgccccgtccagctctgggttgacagcaccccgcctcccggaacacgggtgcgagcaatggcaatctataaacagtcacagcacatgaccgaggttgtgcggcgttgccctcatcacgaacgatgcagcgacagcgacggactggctccgcctcagcacctaattcgcgtcgaagggaatctcagggttgaatacctcgatgacagaaatacgtttcggcattccgtcgtgagcggcaggcgaggttag

SEQ ID NO: 44259 - DNA, 600 bp, Artificial Sequence
  derived and/or modified sequence
atgttctgccaacttgccaagacttgccccgtccagctgtgggttgattcgactcccccaccaggcactagggtgcgggctatggccatctacaagcagtctcaacacatgactgaggtggtgcggcgttgtccccatcacgagcgctgttcagattccgacggcttagcacctcctcaacacttgattagagtggaggggaatctaagggttgagtaccttgatgaccgaaatacttttaggcacagcgtggtggtcccatacgaacccccagaggtgggatcagattgtaccaccatccactacaactacatgtgtaactcctcttgcatgggaggcatgaatcggagaccaatcctgactatcatcacattagaagattcctcaggcaacttattaggcagaaattcatttgaggtgcgcgtctgcgcatgtcccggtcgggatcgaagaacagaggaggaaaacctgcgaaaaaagggcgaaccccaccacgagctgccaccgggttctactaagagggctctgcccaacaatacttctagttcaccccaacccaagaaaaaacccctcgacggggaatattttacactgcagtag

SEQ ID NO: 44260 - DNA, 273 bp, Artificial Sequence
  derived and/or modified sequence
atgttttgccagttagctaagacctgccctgtccagctttgggttgatagtacgcccccacccggtactagagtccgggccatggcaatttacaagcagagccaacacatgacagaagttgtaagaagatgcccccatcacgaaagatgcagcgactctgacgggcttgcccctccgcagcaccttattcgggtagaaggtaacttaagggtggaataccttgatgatcgcaacacttttcgacatagcgtggtgtctggaagaaggggttag

SEQ ID NO: 44261 - DNA, 600 bp, Artificial Sequence
  derived and/or modified sequence
atgttttgtcagctggcaaaaacttgccccgtacagttatgggtggattcaactcctccccctggcacacgtgtcagggccatggcaatatataagcagagccagcacatgaccgaggttgtcagacgctgtccacaccacgagcgctgttccgactcagatggacttgcccccccccaacacctgatacgggtagagggtaacttaagggtggagtatcttgacgatagaaacaccttcaggcacagcgttgttgtgccctatgaaccccctgaagtggggtctgactgtaccaccatccactataattatatgtgtaacagttcttgcatgggcggaatgaaccgccgacctatcctaacgatcatcacacttgaagatagctccggcaatctcttaggaagaaactccttcgaagttcgagtttgtgcgtgccctggacgggatagaagaacagaagaggaaaacctcagaaaaaagggcgaaccacatcatgagcttcctcctggttccactaaacgagccctcccgaataacacatcttccagtcctcagccgaaaaagaaacccctggacggagagtactttacactccagtag

SEQ ID NO: 44262 - DNA, 600 bp, Artificial Sequence
  derived and/or modified sequence
atgttctgccaattagccaaaacttgccctgtgcagctgtgggtcgattcaaccccccctcctggaacaagggtcagggcgatggcaatttataagcagtcccaacacatgacggaagtggttcgtcgctgtccccaccatgagagatgttctgactcagacggcctcgcacccccccaacatctgatcagagtcgaggggaacctcagagtggaatacttggatgatcggaatacatttagacactctgttgtagtgccttacgaaccccccgaagtcggcagtgactgtacaaccatccactataattatatgtgtaacagttcttgcatgggcggaatgaaccgccgacctatcctaacgatcatcacacttgaagatagctccggcaatctcttaggaagaaactccttcgaagttcgagtttgtgcgtgccctggacgggatagaagaacagaagaggaaaacctcagaaaaaagggcgaaccacatcatgagcttcctcctggttccactaaacgagccctcccgaataacacatcttccagtcctcagccgaaaaagaaacccctggacggagagtactttacactccagtag

SEQ ID NO: 44263 - RNA, 273 nt, Artificial Sequence
  derived and/or modified sequence
auguuuugccaguuagcuaagaccugcccuguccagcuuuggguugauaguacgcccccacccgguacuagaguccgggccauggcaauuuacaagcagagccaacacaugacagaaguuguaagaagaugcccccaucacgaaagaugcagcgacucugacgggcuugccccuccgcagcaccuuauucggguagaagguaacuuaaggguggaauaccuugaugaucgcaacacuuuucgacauagcguggugucuggaagaagggguuag

SEQ ID NO: 44264 - RNA, 600 nt, Artificial Sequence
  derived and/or modified sequence
auguuuugucagcuggcaaaaacuugccccguacaguuauggguggauucaacuccucccccuggcacacgugucagggccauggcaauauauaagcagagccagcacaugaccgagguugucagacgcuguccacaccacgagcgcuguuccgacucagauggacuugcccccccccaacaccugauacggguagaggguaacuuaaggguggaguaucuugacgauagaaacaccuucaggcacagcguuguugugcccuaugaacccccugaaguggggucugacuguaccaccauccacuauaauuauauguguaacaguucuugcaugggcggaaugaaccgccgaccuauccuaacgaucaucacacuugaagauagcuccggcaaucucuuaggaagaaacuccuucgaaguucgaguuugugcgugcccuggacgggauagaagaacagaagaggaaaaccucagaaaaaagggcgaaccacaucaugagcuuccuccugguuccacuaaacgagcccucccgaauaacacaucuuccaguccucagccgaaaaagaaaccccuggacggagaguacuuuacacuccaguag

SEQ ID NO: 44265 - RNA, 600 nt, Artificial Sequence
  derived and/or modified sequence
auguucugccaauuagccaaaacuugcccugugcagcugugggucgauucaacccccccuccuggaacaagggucagggcgauggcaauuuauaagcagucccaacacaugacggaagugguucgucgcuguccccaccaugagagauguucugacucagacggccucgcacccccccaacaucugaucagagucgaggggaaccucagaguggaauacuuggaugaucggaauacauuuagacacucuguuguagugccuuacgaaccccccgaagucggcagugacuguacaaccauccacuauaauuauauguguaacaguucuugcaugggcggaaugaaccgccgaccuauccuaacgaucaucacacuugaagauagcuccggcaaucucuuaggaagaaacuccuucgaaguucgaguuugugcgugcccuggacgggauagaagaacagaagaggaaaaccucagaaaaaagggcgaaccacaucaugagcuuccuccugguuccacuaaacgagcccucccgaauaacacaucuuccaguccucagccgaaaaagaaaccccuggacggagaguacuuuacacuccaguag

SEQ ID NO: 44266 - protein, 155 aa, Artificial Sequence
  derived and/or modified sequence
MEEPQSDPSVEPPLSQETFSDLWKLLPENNVLYSPALNKMFCQLAKTCPVQLWVDSTPPPGTRVRAMAIYKQSQHMTEVVRRCPHHERCSDSDGLAPPQHLIRVEGNLRVEYLDDRNTFRHSVVVPYEPPEVGSDCTTIHYNYMCNSSCMGGMNR

SEQ ID NO: 44267 - DNA, 2220 bp, Artificial Sequence
  derived and/or modified sequence
gagccaccgtccagggagcaggtagctgctgggctccggggacactttgcgttcgggctgggagcgtgctttccacgacggtgacacgcttccctggattggcagccagactgccttccgggtcactgccatggaggagccgcagtcagatcctagcgtcgagccccctctgagtcaggaaacattttcagacctatggaaactacttcctgaaaacaacgttctgtactcccctgccctcaacaagatgttttgccaactggccaagacctgccctgtgcagctgtgggttgattccacacccccgcccggcacccgcgtccgcgccatggccatctacaagcagtcacagcacatgacggaggttgtgaggcgctgcccccaccatgagcgctgctcagatagcgatggtctggcccctcctcagcatcttatccgagtggaaggaaatttgcgtgtggagtatttggatgacagaaacacttttcgacatagtgtggtggtgccctatgagccgcctgaggttggctctgactgtaccaccatccactacaactacatgtgtaacagttcctgcatgggcggcatgaaccggaggcccatcctcaccatcatcacactggaagactccagtggtaatctactgggacggaacagctttgaggtgcgtgtttgtgcctgtcctgggagagaccggcgcacagaggaagagaatctccgcaagaaaggggagcctcaccacgagctgcccccagggagcactaagcgagcactgcccaacaacaccagctcctctccccagccaaagaagaaaccactggatggagaatatttcacccttcagatccgtgggcgtgagcgcttcgagatgttccgagagctgaatgaggccttggaactcaaggatgcccaggctgggaaggagccaggggggagcagggctcactccagccacctgaagtccaaaaagggtcagtctacctcccgccataaaaaactcatgttcaagacagaagggcctgactcagactgacattctccacttcttgttccccactgacagcctcccacccccatctctccctcccctgccattttgggttttgggtctttgaacccttgcttgcaataggtgtgcgtcagaagcacccaggacttccatttgctttgtcccggggctccactgaacaagttggcctgcactggtgttttgttgtggggaggaggatggggagtaggacataccagcttagattttaaggtttttactgtgagggatgtttgggagatgtaagaaatgttcttgcagttaagggttagtttacaatcagccacattctaggtaggggcccacttcaccgtactaaccagggaagctgtccctcactgttgaattttctctaacttcaaggcccatatctgtgaaatgctggcatttgcacctacctcacagagtgcattgtgagggttaatgaaataatgtacatctggccttgaaaccaccttttattacatggggtctagaacttgacccccttgagggtgcttgttccctctccctgttggtcggtgggttggtagtttctacagttgggcagctggttaggtagagggagttgtcaagtctctgctggcccagccaaaccctgtctgacaacctcttggtgaaccttagtacctaaaaggaaatctcaccccatcccacaccctggaggatttcatctcttgtatatgatgatctggatccaccaagacttgttttatgctcagggtcaatttcttttttcttttttttttttttttttctttttctttgagactgggtctcgctttgttgcccaggctggagtggagtggcgtgatcttggcttactgcagcctttgcctccccggctcgagcagtcctgcctcagcctccggagtagctgggaccacaggttcatgccaccatggccagccaacttttgcatgttttgtagagatggggtctcacagtgttgcccaggctggtctcaaactcctgggctcaggcgatccacctgtctcagcctcccagagtgctgggattacaattgtgagccaccacgtccagctggaagggtcaacatcttttacattctgcaagcacatctgcattttcaccccacccttcccctccttctccctttttatatcccatttttatatcgatctcttattttacaataaaactttgctgcc

SEQ ID NO: 44268 - protein, 361 aa, Artificial Sequence
  derived and/or modified sequence
MQKMESRGVELPSLWEKALKLIGPEKGVVHLATAAVLNAVWDLWAKQEGKPVWKLLVDMDPRMLVSCIDFRYITDVLTEEDALEILQKGQIGKKEREKQMLAQGYPAYTTSCAWLGYSDDTLKQLCAQALKDGWTRFKVKVGADLQDDMRRCQIIRDMIGPEKTLMMDANQRWDVPEAVEWMSKLAKFKPLWIEEPTSPDDILGHATISKALVPLGIGIATGEQCHNRVIFKQLLQAKALQFLQIDSCRLGSVNENLSVLLMAKKFEIPVCPHAGGVGLCELVQHLIIFDYISVSASLENRVCEYVDHLHEHFKYPVMIQRASYMPPKDPGYSTEMKEESVKKHQYPDGEVWKKLLPAQEN

SEQ ID NO: 44269 - DNA, 1086 bp, Artificial Sequence
  derived and/or modified sequence
atgcagaagatggaatccagaggcgtggagctgccgagcctctgggagaaggccctcaagctgattggccctgaaaagggggtggttcacttggccaccgccgcagtgctgaatgcagtctgggatttgtgggccaagcaagagggaaagcctgtgtggaaattgctagttgacatggacccacggatgctggtatcctgtatcgacttccgttatattacagatgtcctcactgaagaagatgccctggagatcctgcaaaagggccagatcggcaagaaagaacgggaaaagcagatgttggctcagggataccctgcatataccacatcttgcgcatggctgggctattccgatgacacgcttaagcagctctgcgctcaggccctcaaagatggctggacacgcttcaaagttaaagtcggggccgatttacaggatgacatgcggaggtgtcagattattagggacatgataggacccgaaaaaacactgatgatggatgccaaccagcggtgggacgtgcccgaagccgttgagtggatgtcaaagctggcaaaattcaagcctctatggatcgaagaaccgacctcccccgatgatatcttggggcacgccaccattagcaaagcattggttcctctcgggattggcattgcgacaggcgaacagtgccataacagggtgatattcaagcagctgctgcaggcgaaagcgctccagttcctgcagattgacagttgtcgactgggaagtgtgaacgaaaacttatctgttcttctgatggcaaagaagttcgagattcccgtctgcccacatgccggtggcgtaggcttatgtgagttggttcaacatctgattatttttgactatatatctgtgtctgcaagccttgaaaatcgagtgtgcgaatacgtagatcacctccatgaacatttcaagtatccagttatgatccaacgcgcctcgtacatgcctcccaaagatcccggctactccacagagatgaaagaagagtcagtgaaaaaacaccagtatcccgatggcgaggtgtggaagaaactcttgccggcccaagagaattag

SEQ ID NO: 44270 - DNA, 1086 bp, Artificial Sequence
  derived and/or modified sequence
atgcagaagatggagagccggggcgtggagctgcccagcctgtgggagaaggccctgaagctgattggccctgagaagggcgtggtgcacctggccacagctgctgtgctgaatgctgtgtgggacctgtgggccaagcaggagggcaagcctgtgtggaagctgctggtggacatggaccccaggatgctggtgtcctgcatcgacttccgctacatcacagatgtgctgacagaggaggatgccctggagatcctgcagaagggccagatcggcaagaaggagcgggagaagcagatgctggcccagggctacccagcctacaccaccagctgtgcctggctgggctacagtgatgacaccctgaagcagctgtgtgcccaggccctgaaggatggctggacccgcttcaaggtgaaggtgggcgctgacctgcaggatgacatgaggcgctgccagatcatccgggacatgattggccctgagaagaccctgatgatggatgccaaccagcgctgggatgtgcctgaggccgtggagtggatgagcaagctggccaagttcaagcccctgtggattgaggagcccaccagcccagatgacatcctgggccacgccaccatcagcaaggccctggtgcccctgggcattggaattgccactggagagcagtgccacaacagagtcatcttcaagcagctgctgcaggccaaggccctgcagttcctgcagattgacagctgccgcctgggctctgtgaatgaaaacctgtctgtgctgctgatggccaagaagtttgagatccctgtgtgcccccacgccggcggcgtgggcctgtgtgagctggtgcagcacctgatcatctttgactacatctctgtgtctgccagcctggagaacagagtgtgtgaatatgtggaccacctgcacgagcacttcaagtaccctgtgatgatccagagggccagctacatgccacccaaggaccccggctacagcacagagatgaaggaggagagcgtgaagaagcaccagtacccagatggagaggtgtggaagaagctgctgcctgcccaggagaactag

SEQ ID NO: 44271 - DNA, 1086 bp, Artificial Sequence
  derived and/or modified sequence
atgcagaagatggagagccggggcgtggagctgcccagcctgtgggagaaggctttgaaactgatagggcccgagaaaggagtggtccatctagccactgctgccgttcttaatgctgtgtgggacctatgggccaagcaggaaggcaaaccagtttggaagctgcttgtggacatggaccctaggatgctcgtgtcctgtatagattttcgatacattaccgacgtcctgacagaagaggacgccctcgagatcctacagaaaggccagattgggaaaaaggagagggagaaacagatgctcgcccaggggtaccctgcatacactaccagttgtgcctggcttggatactccgatgatactctgaagcaactctgcgcccaggctctgaaagacggctggacaagattcaaagtcaaggtcggcgctgatctgcaggacgacatgcgcagatgtcagatcatccgggacatgatagggcccgaaaaaaccctgatgatggacgccaatcaacgatgggatgttcccgaagccgtcgagtggatgtctaagctggctaaatttaagcccctttggatcgaggagccaacatctcccgatgacatcctggggcatgctacaatctcaaaagcactcgtgccattgggtatcggcatcgcaactggcgagcagtgccacaaccgtgtgatcttcaagcagctgcttcaggcaaaggcacttcagtttctacagattgacagctgtcgactcgggtctgttaacgaaaacttgagtgtgctgctgatggctaagaagttcgaaattcccgtttgccctcatgctggcggtgtagggctatgtgaactagtgcagcacctgataatctttgattatatctctgtgtccgctagcctcgagaaccgggtctgcgagtatgtggatcatcttcacgagcactttaagtacccagtgatgatacagcgggcatcttatatgccccctaaggacccgggttacagcaccgagatgaaggaagagtcagttaagaaacaccaatatccagacggcgaggtgtggaagaagctattgccagcgcaagagaattag

SEQ ID NO: 44272 - DNA, 1086 bp, Artificial Sequence
  derived and/or modified sequence
atgcagaaaatggagagcagaggagttgagcttccttcactgtgggaaaaagcattgaaattgataggacccgagaagggcgtagtgcacctggcaactgccgcagtgctgaatgccgtttgggatttgtgggctaaacaagaaggcaagcccgtgtggaaattgttagtggacatggatcctagaatgctagtgagctgtatcgacttcagatacatcactgatgtgctcactgaggaagacgccctcgaaattcttcagaaaggtcagatcggtaagaaagagagagaaaaacagatgctggcacaaggatatccagcatataccacatcttgcgcctggttagggtactcggatgacaccttgaagcagctgtgcgcccaggctcttaaggacgggtggaccagattcaaggttaaggtgggggcagacctccaggacgacatgcgcaggtgtcagataatcagagatatgattggcccagaaaaaactctgatgatggacgccaaccagcggtgggacgtgccagaggccgtcgaatggatgtccaagctggcgaaattcaagcctttgtggattgaagagcccacaagcccagatgacatcctgggccacgctaccatatcaaaggcactggtacctcttggaatagggatagcaacaggagagcaatgtcataacagagtgattttcaaacagctcctccaggccaaggccttacagtttctgcagattgatagctgcagattaggctcggtcaacgaaaatctatcggtgctgctgatggctaagaagtttgaaattcctgtttgtccacatgcgggaggtgtgggtctatgcgagctggtgcaacatctcattatcttcgactatatttcagtctccgcctcattggagaatagagtctgcgagtatgtagatcaccttcatgaacactttaaataccctgttatgatccagcgcgcaagctatatgcctcctaaggatccgggatactccactgaaatgaaggaggaatctgtgaagaagcaccaatacccagacggtgaggtgtggaaaaaactgctgcccgcacaggaaaattag

SEQ ID NO: 44273 - DNA, 1086 bp, Artificial Sequence
  derived and/or modified sequence
atgcagaagatggagagcagaggcgtggagctgcccagcctgtgggagaaggccctgaagctgatcggccccgagaagggcgtggtgcacctggccaccgccgccgtgctgaacgccgtgtgggacctgtgggccaagcaggagggcaagcccgtgtggaagctgctggtggacatggaccccagaatgctggtgagctgcatcgacttcagatacatcaccgacgtgctgaccgaggaggacgccctggagatcctgcagaagggccagatcggcaagaaggagagagagaagcagatgctggcccagggctaccccgcctacaccaccagctgcgcctggctgggctacagcgacgacaccctgaagcagctgtgcgcccaggccctgaaggacggctggaccagattcaaggtgaaggtgggcgccgacctgcaggacgacatgagaagatgccagatcatcagagacatgatcggccccgagaagaccctgatgatggacgccaaccagagatgggacgtgcccgaggccgtggagtggatgagcaagctggccaagttcaagcccctgtggatcgaggagcccaccagccccgacgacatcctgggccacgccaccatcagcaaggccctggtgcccctgggcatcggcatcgccaccggcgagcagtgccacaacagagtgatcttcaagcagctgctgcaggccaaggccctgcagttcctgcagatcgacagctgcagactgggcagcgtgaacgagaacctgagcgtgctgctgatggccaagaagttcgagatccccgtgtgcccccacgccggcggcgtgggcctgtgcgagctggtgcagcacctgatcatcttcgactacatcagcgtgagcgccagcctggagaacagagtgtgcgagtacgtggaccacctgcacgagcacttcaagtaccccgtgatgatccagagagccagctacatgccccccaaggaccccggctacagcaccgagatgaaggaggagagcgtgaagaagcaccagtaccccgacggcgaggtgtggaagaagctgctgcccgcccaggagaactag

SEQ ID NO: 44274 - DNA, 1966 bp, Artificial Sequence
  derived and/or modified sequence
cgccctcccgccgcgcgctcgggatcccgaccagtcctgaccgcacgggggccgcggccacggggcgcaggggccatggtgcgcggcaggatctcccggctctcggtccgggacgtgcgcttccccacgtcgcttgggggccacggcgcggacgccatgcacacggaccctgactactcggctgcctatgtcgtcatagaaactgatgcagaagatggaatcaaggggtgtggaattaccttcactctgggaaaaggcactgaagttgattggtccagaaaagggcgtggtgcacctggcgacagcggccgtcctaaacgcggtgtgggacttgtgggccaagcaggagggaaagcctgtctggaagttacttgtggacatggatcccaggatgctggtatcctgcatagatttcaggtacatcactgatgtcctgactgaggaggatgccctagaaatactgcagaaaggtcaaattggtaaaaaagaaagagagaagcaaatgctggcacaaggataccctgcttacacgacatcgtgcgcctggctggggtactcagatgacacgttgaagcagctctgtgcccaggcgctgaaggatggctggaccaggtttaaagtaaaggtgggtgctgatctccaggatgacatgcgaagatgccaaatcatccgagacatgattggaccggaaaagactttgatgatggatgccaaccagcgctgggatgtgcctgaggcggtggagtggatgtccaagctggccaagttcaagccattgtggattgaggagccaacctcccctgatgacattctggggcacgccaccatttccaaggcactggtcccattaggaattggcattgccacaggagaacagtgccacaatagagtgatatttaagcaactcctacaggcgaaggccctgcagttcctccagattgacagttgcagactgggcagtgtcaatgagaacctctcagtattgctgatggccaaaaagtttgaaattcctgtttgcccccatgctggtggagttggcctctgtgaactggtgcagcacctgattatatttgactacatatcagtttctgcaagccttgaaaatagggtgtgtgagtatgttgaccacctgcatgagcatttcaagtatcccgtgatgatccagcgggcttcctacatgcctcccaaggatcccggctactcaacagaaatgaaggaggaatctgtaaagaaacaccagtatccagatggtgaagtttggaagaaactccttcctgctcaagaaaattaagtgctcagccccaacaacttttttctttctgaagtgaaagggcttaaaatttcttggaaatagttttacaaaaatggatttaaaaaatcctaccgatcaagatgagttcagctagaagtcataccaccctcaggaatcagctaaagcaaaaagaacttttacctcggcatccagcccaacccctaaagactgacaatatccttcgagctcctttgaaagcaccctaaacagccatttccattttaatagttggatgcggattgtacccttcaatctgaaagtcttcagctttgaagtcatcaattttctcaacttttcgaagaatcctgagctttgggaaaggtctgggttctcgctgaagctaaaaacaaaataaggccattattttgccataattgtacgacctgttgtaattgctcctcatgtccgtgaaacaagtacacaggatgtgatcaacaaagttctattttacaggagtatgatcctgtcgataccttgccgtaggttatgtaacatgattggagcgcaaccagctgttctcttgcacagatcgagagtgaggggtattttgtgacattacacagcatcaggagcctggtgcctcatcaggtgtaagttcttataaccactcttggcaaatttattaaagacaggaacacagtcaatctgtaactc

SEQ ID NO: 44275 - protein, 129 aa, Artificial Sequence
  derived and/or modified sequence
MRSLCCAPLLLLLLLPPLLLTPRAGDAAVITGACDKDSQCGGGMCCAVSIWVKSIRICTPMGKLGDSCHPLTRKNNFGNGRQERRKRKRSKRKKEVPFFGRRMHHTCPCLPGLACLRTSFNRFICLAQK

SEQ ID NO: 44276 - DNA, 390 bp, Artificial Sequence
  derived and/or modified sequence
atgcggtcattgtgctgtgctccgctcctgctgctgcttttgctgcctcctctgctgctgacccctcgcgcaggggatgctgccgtgattaccggagcttgcgataaggattctcagtgcggaggcggaatgtgctgtgctgtgtctatctgggtcaagtcaatccgcatctgcacaccgatgggaaaactaggggattcttgtcatccccttactcgcaagaataacttcggcaacggacgtcaggagcggcgtaagagaaagcgcagtaaaagaaagaaagaggtcccattctttgggcggcgcatgcatcacacatgtccctgccttcccggcctcgcatgtctgcggacctcatttaatagattcatctgcttagctcaaaagtag

SEQ ID NO: 44277 - DNA, 390 bp, Artificial Sequence
  derived and/or modified sequence
atgaggagcctgtgctgtgcccccctgctgctgctgctgctgctgccccccctgctgctgacccccagggctggagatgctgctgtgatcactggagcctgtgacaaggacagccagtgtggcggcggcatgtgctgtgctgtgtccatctgggtgaagagcatccgcatctgcacccccatgggcaagctgggggacagctgccaccccctgaccaggaagaacaactttggaaatggccggcaggagaggaggaagaggaagaggagcaagaggaagaaggaggtgcccttctttggaagaaggatgcaccacacctgcccctgcctgcccggcctggcctgcctgcggaccagcttcaaccgcttcatctgcctggcccagaagtag

SEQ ID NO: 44278 - DNA, 390 bp, Artificial Sequence
  derived and/or modified sequence
atgcggagcctgtgctgcgcccccctgctgctgctgctgctgctgccccccttactgttgactcccagggctggcgatgccgccgtcattacaggggcatgtgacaaggactcccagtgtggcggcggcatgtgctgcgccgtcagcatctgggtgaagtccatcaggatctgtactccgatggggaagctaggggattcctgtcatcctctcacacgcaaaaataattttgggaacgggcgccaggaacgtcgcaagagaaaaagatcaaagaggaaaaaagaagtacccttttttggtagacgaatgcaccacacctgcccctgcctcccagggctggcatgtttgcgcacctcctttaaccgcttcatttgtctggcacagaagtag

SEQ ID NO: 44279 - DNA, 390 bp, Artificial Sequence
  derived and/or modified sequence
atgcgcagcctttgctgtgctcctttgctcctcctcctgctcctgccccctttactcctgactcccagggccggagatgccgctgtgattacaggggcatgtgacaaagatagccaatgcggtgggggtatgtgctgcgcggtgagcatttgggtgaagtccatccgcatctgcacccctatgggcaaattgggtgactcttgtcaccccctgactaggaaaaacaactttggcaacggaagacaggaacgtcggaagcggaaaaggtccaaacgtaagaaagaggttccattcttcggcaggcgcatgcaccacacttgtccttgcttgcctgggctggcctgtttgcggacctcatttaatcgattcatttgcctcgcacagaagtag

SEQ ID NO: 44280 - DNA, 1022 bp, Artificial Sequence
  derived and/or modified sequence
gagggcgccatgaggagcctgtgctgcgccccactcctgctcctcttgctgctgccgccgctgctgctcacgccccgcgctggggacgccgccgtgatcaccggggcttgtgacaaggactcccaatgtggtggaggcatgtgctgtgctgtcagtatctgggtcaagagcataaggatttgcacacctatgggcaaactgggagacagctgccatccactgactcgtaaaaacaattttggaaatggaaggcaggaaagaagaaagaggaagagaagcaaaaggaaaaaggaggttccattttttgggcggaggatgcatcacacttgcccatgtctgccaggcttggcctgtttacggacttcatttaaccgatttatttgtttagcccaaaagtaatcgctctggagtagaaaccaaatgtgaatagccacatcttacctgtaaagtcttacttgtgattgtgccaaacaaaaaatgtgccagaaagaaatgctcttgcttcctcaactttccaagtaacatttttatctttgatttgtaaatgatttttttttttttttatcgaaagagaattttacttttggatagaaatatgaagtgtaaggcattatggaactggttcttatttccctgtttgtgttttggtttgatttggcttttttcttaaatgtcaaaaacgtacccattttcacaaaaatgaggaaaataagaatttgatattttgttagaaaaacttttttttttttttctcaccaccccaagccccatttgtgccctgccacacaaatacacctacagcttttggtcccttgcctcttccacctcaaagaatttcaaggctcttaccttactttatttttgtccatttctcttccctcctcttgcattttaaagtggagggtttgtctctttgagtttgatggcagaatcactgatgggaatccagctttttgctggcatttaaatagtgaaaagagtgtatatgtgaacttgacactccaaactcctgtcatggcacg

SEQ ID NO: 44281 - DNA, 390 bp, Artificial Sequence
  derived and/or modified sequence
atgagaagcctgtgctgcgcccccctgctgctgctgctgctgctgccccccctgctgctgacccccagagccggcgacgccgccgtgatcaccggcgcctgcgacaaggacagccagtgcggcggcggcatgtgctgcgccgtgagcatctgggtgaagagcatcagaatctgcacccccatgggcaagctgggcgacagctgccaccccctgaccagaaagaacaacttcggcaacggcagacaggagagaagaaagagaaagagaagcaagagaaagaaggaggtgcccttcttcggcagaagaatgcaccacacctgcccctgcctgcccggcctggcctgcctgagaaccagcttcaacagattcatctgcctggcccagaagtag

SEQ ID NO: 44282 - protein, 78 aa, Artificial Sequence
  derived and/or modified sequence
MDCCTENACSKPDDDILDIPLDDPGANAAAAKIQASFRGHMARKKIKSGERGRKGPGPGGPGGAGVARGGAGGGPSGD

SEQ ID NO: 44283 - DNA, 237 bp, Artificial Sequence
  derived and/or modified sequence
atggactgctgcacagagaatgcatgctctaaaccggacgacgatatccttgatataccccttgatgacccaggagcgaatgccgccgctgcaaaaatccaggctagcttccggggacatatggcccggaaaaagatcaagagcggggagcgcggccgaaaggggccgggaccaggcgggccgggtggagccggcgtggcccgggggggagccgggggcgggcccagtggggattag

SEQ ID NO: 44284 - DNA, 237 bp, Artificial Sequence
  derived and/or modified sequence
atggattgttgtacagagaatgcctgctcaaaacctgacgacgacattctggacatccctctggatgatcccggagccaatgcagccgctgccaagatccaggcttcttttcgcggtcacatggcccgaaaaaagattaaaagcggagagagaggtcggaaggggcctggccctggcgggccgggaggcgccggagtcgcaaggggaggtgcgggcggcgggcctagtggtgattag

SEQ ID NO: 44285 - DNA, 237 bp, Artificial Sequence
  derived and/or modified sequence
atggactgttgcaccgagaatgcttgctccaaaccagatgatgacatactagacatcccactggacgatcctggtgctaacgctgctgccgcaaaaatccaagcctcattccgtggacatatggcaagaaagaagattaagagtggagaaagaggacgcaaaggacctgggcccgggggcccagggggtgcaggcgttgctcgtgggggtgcaggcggagggccatccggagattag

SEQ ID NO: 44286 - DNA, 237 bp, Artificial Sequence
  derived and/or modified sequence
atggactgctgcacagaaaatgcctgcagcaagccagatgatgacatcctggacatccccctggatgaccccggggccaatgctgctgctgccaagatccaggccagcttccggggccacatggccaggaagaagatcaagagcggggagcggggcaggaagggccctggccctgggggccctggaggagctggggtggcccggggcggggccggcggcggccccagcggggactag

SEQ ID NO: 44287 - DNA, 237 bp, Artificial Sequence
  derived and/or modified sequence
atggactgctgcaccgagaacgcctgcagcaagcccgacgacgacatcttggatatccccctcgacgatcctggagcaaacgccgctgccgccaaaatccaggcctcattccgtggacatatggcccggaagaaaatcaaatcaggagagaggggaaggaaaggccctggacctggaggaccagggggcgccggtgtggctaggggcggtgcgggggggggcccgagtggggactag

SEQ ID NO: 44288 - DNA, 237 bp, Artificial Sequence
  derived and/or modified sequence
atggactgctgcaccgagaacgcctgcagcaagcccgacgacgacatccttgatattcctctagatgaccccggggccaacgctgcggctgctaagatccaggcttctttcaggggccacatggcgaggaaaaagatcaaaagtggagagcgcgggcgaaagggaccagggcccggaggacctggcggcgctggcgttgcccgcggaggcgccggtggaggccctagtggagactag

SEQ ID NO: 44289 - DNA, 237 bp, Artificial Sequence
  derived and/or modified sequence
atggactgctgcaccgagaacgcctgcagcaagcccgacgacgacatcctggacattcctttggatgatccaggagcgaacgccgcggccgctaaaattcaagcctctttccggggtcacatggcccggaagaagattaagagcggcgagcggggaagaaagggccccggaccagggggccccggaggagctggcgtcgctagaggaggcgctgggggcggaccatcaggcgattag

SEQ ID NO: 44290 - DNA, 1218 bp, Artificial Sequence
  derived and/or modified sequence
gagcgcgggagaccggacccgagagcagagctgctgtttcggcgcgggtcggctggcggccgactgccccagagcccccacccggcaccacacagaccccacccccgccctgcgccagccttcgtccccgcagaggaccccccgacaccagcatggactgctgcaccgagaacgcctgctccaagccggacgacgacattctagacatcccgctggacgatcccggcgccaacgcggccgccgccaaaatccaggcgagttttcggggccacatggcgcggaagaagataaagagcggagagcgcggccggaagggcccgggccctggggggcctggcggagctggggtggcccggggaggcgcgggcggcggccccagcggagactaggccagaagaactgagcattttcaaagttcccgaggagagatggatgccgcgtccccttcgcagcgacgagacttccctgccgtgtttgtgaccccctcctgcccagcaacctgccagctacaggagccccctgcgtcccagagactccctcacccaggcaggctccgtcgcggagtcgctgagtccgtgcccttttagttagttctgcagtctagtatggtccccatttgcccttccactccaccccaccctaaaccatgcgctcccaatcttccttcttttgcttctcgcccacctcttcccgcacccagcatgcagctctgcctccgcagcctcagtgcgctttcctgcgcgcactgcggagggcgccctaagcgtcacccaagcacactcacttaaagaaaaaacgagttctttcgttctgtgcgcagctaaaaggggcgccctacatctccgtgccactcccgccccagcctagccccaagactttggatccggggcgagatgaagggaagagggttgttttggtttcggacgacccttgctctgaccggaagagaagtccctatcccacacctgcctgtcacgttccctcccctttccccagcgcactgttgagggcagcctctccagctctcttgtttatgcaaacgccgagcgcctgggaggctcggtaggaggagtcttccacggccccgccccgcccctgtcggtcccgccctcccccccgccgggctcctggggctgtggccgaaaggtttctgatctccgtgtgtgcatgtgactgtgctgggttggaatgtgaacaataaagaggaatgtccaagtg

SEQ ID NO: 44291 - DNA, 1215 bp, Artificial Sequence
  derived and/or modified sequence
gagcgcgggagaccggacccgagagcagagctgctgtttcggcgcgggtcggctggcggccgactgccccagagcccccacccggcaccacacagaccccacccccgccctgcgccagccttcgtccccgcagaggaccccccgacaccagcatggactgctgcaccgagaacgcctgctccaagccggacgacgacattctagacatcccgctggacgatcccggcgccaacgcggccgccgccaaaatccaggcgagttttcggggccacatggcgcggaagaagataaagagcggagagcgcggccggaagggcccgggccctggggggcctggcggagctggggtggcccggggaggcgcgggcggcggccccagcggagactaggccagaactgagcattttcaaagttcccgaggagagatggatgccgcgtccccttcgcagcgacgagacttccctgccgtgtttgtgaccccctcctgcccagcaacctgccagctacaggagccccctgcgtcccagagactccctcacccaggcaggctccgtcgcggagtcgctgagtccgtgcccttttagttagttctgcagtctagtatggtccccatttgcccttccactccaccccaccctaaaccatgcgctcccaatcttccttcttttgcttctcgcccacctcttcccgcacccagcatgcagctctgcctccgcagcctcagtgcgctttcctgcgcgcactgcggagggcgccctaagcgtcacccaagcacactcacttaaagaaaaaacgagttctttcgttctgtgcgcagctaaaaggggcgccctacatctccgtgccactcccgccccagcctagccccaagactttggatccggggcgagatgaagggaagagggttgttttggtttcggacgacccttgctctgaccggaagagaagtccctatcccacacctgcctgtcacgttccctcccctttccccagcgcactgttgagggcagcctctccagctctcttgtttatgcaaacgccgagcgcctgggaggctcggtaggaggagtcttccacggccccgccccgcccctgtcggtcccgccctcccccccgccgggctcctggggctgtggccgaaaggtttctgatctccgtgtgtgcatgtgactgtgctgggttggaatgtgaacaataaagaggaatgtccaagtg

SEQ ID NO: 44292 - DNA, 1969 bp, Artificial Sequence
  derived and/or modified sequence
ccggacccgagagcagagctgctgtttcggcgcgggtcggctggcggccgactgccccagagcccccacccggcaccacacagaccccacccccgccctgcgccagccttcgtccccgcagaggaccccccgacaccagcatggactgctgcaccgagaacgcctgctccaagccggacgacgacattctagacatcccgctggacgatcccggcgccaacgcggccgccgccaaaatccaggcgagttttcggggccacatggcgcggaagaagataaagagcggagagcgcggccggaagggcccgggccctggggggcctggcggagctggggtggcccggggaggcgcgggcggcggccccagcggagactaggccagaccttttctctcctcagttcccgaggagagatggatgccgcgtccccttcgcagcgacgagacttccctgccgtgtttgtgaccccctcctgcccagcaacctgccagctacaggagccccctgcgtcccagagactccctcacccaggcaggctccgtcgcggagtcgctgagtccgtgcccttttagttagttctgcagtctagtatggtccccatttgcccttccactccaccccaccctaaaccatgcgctcccaatcttccttcttttgcttctcgcccacctcttcccgcacccagcatgcagctctgcctccgcagcctcagtgcgctttcctgcgcgcactgcggagggcgccctaagcgtcacccaagcacactcacttaaagaaaaaacgagttctttcgttctgtgcgcagctaaaaggggcgccctacatctccgtgccactcccgccccagcctagccccaagactttggatccggggcgagatgaagggaagagggttgttttggtttcggacgacccttgctctgaccggaagagaagtccctatcccacacctgcctgtcacgttccctcccctttccccagcgcactgttgagggcagcctctccagctctcttgtttatgcaaacgccgagcgcctgggaggctcggtaggaggagtcttccacggccccgccccgcccctgtcggtcccgccctcccccccgccgggctcctggggctgtggccgaaaggtttctgatctccgtgtgtgcatgtgactgtgctgggttggaatgtgaacaataaagaggaatgtccaagtgttcagagggtgccgggggagggagtttgggtgcacaaggcctccgcttgcaacttgaacaagcctccttgggccaaaccagaaaccaacaatcgggggctggtggggtgaagtggaggggcacctaggttgaaacccacccctttgacccgaccaaacttcctgcctaccttttctcggacttcaagcccattccttctcttactgttaatactctgagccgcctagaggaattcgccataccagcagaaagaagaaggagacagtatggtacccacagactttaattattgatattccccctcaccgccctcagggatcgggagaagtcacacgaccatagggagcttggacttggtggtcgtcacggtgctggcagacgagggtctttccaggaaccccttgctagaatcagccctcatacaagtgtgctcagagatcccaggagcgatggcatcctccctgatgggtataggcaagttctgagtgaacagtagaagcctcctgcggaggagggccgtcctctaacctggggactcttaaatttcactgtgcttgagaataatctgcggaactttggttaaaatgaaatttctgggcctcatcactccccaacgcacaactacaggaaggctagaagtggcctgaatctgaatgtataactagttcccggtgatttctgtccaggtaatctgaggactccacctggagaaatgttgctctgatccctatcctagaccctgactggcagctaaagtggatgacaga

SEQ ID NO: 44293 - DNA, 237 bp, Artificial Sequence
  derived and/or modified sequence
atggactgttgtaccgagaacgcttgcagtaagcctgacgacgatatcctcgacatacccctcgatgaccccggagcaaacgcagccgctgccaagatccaggctagttttcgcggtcacatggccagaaaaaagataaagtccggtgagagaggacgaaagggcccaggtccaggaggccctggtggggctggggtggccagggggggtgctggagggggtccatccggtgactag

SEQ ID NO: 44294 - DNA, 237 bp, Artificial Sequence
  derived and/or modified sequence
atggattgttgcacagagaatgcttgctctaagcctgatgatgacatactcgatattcctctggatgatccaggtgcaaacgccgcagcagccaagatccaggccagcttccgtggtcatatggcacgcaagaaaataaaatccggcgaaagggggaggaaggggcctggccctgggggaccgggaggcgcaggagtggccaggggcggagccggaggaggccctagcggcgactag

SEQ ID NO: 44295 - DNA, 237 bp, Artificial Sequence
  derived and/or modified sequence
atggactgttgcaccgaaaatgcgtgctctaagcccgatgatgatatattggatatacccctagatgaccccggtgctaacgcagcggctgcgaagatccaggcatcatttcggggacacatggcccgaaaaaagataaaaagtggggaacgcggaagaaagggcccagggcctggagggcctggtggagctggggttgcacgtgggggagccggagggggtccctctggagattag

SEQ ID NO: 44296 - DNA, 237 bp, Artificial Sequence
  derived and/or modified sequence
atggactgctgcaccgagaacgcctgcagcaagcccgacgacgacatcctggacatccccctggacgaccccggcgccaacgccgccgccgccaagatccaggccagcttcagaggccacatggccagaaagaagatcaagagcggcgagagaggcagaaagggccccggccccggcggccccggcggcgccggcgtggccagaggcggcgccggcggcggccccagcggcgactag

SEQ ID NO: 44297 - protein, 655 aa, Artificial Sequence
  derived and/or modified sequence
MFINIKSILWMCSTLIVTHALHKVKVGKSPPVRGSLSGKVSLPCHFSTMPTLPPSYNTSEFLRIKWSKIEVDKNGKDLKETTVLVAQNGNIKIGQDYKGRVSVPTHPEAVGDASLTVVKLLASDAGLYRCDVMYGIEDTQDTVSLTVDGVVFHYRAATSRYTLNFEAAQKACLDVGAVIATPEQLFAAYEDGFEQCDAGWLADQTVRYPIRAPRVGCYGDKMGKAGVRTYGFRSPQETYDVYCYVDHLDGDVFHLTVPSKFTFEEAAKECENQDARLATVGELQAAWRNGFDQCDYGWLSDASVRHPVTVARAQCGGGLLGVRTLYRFENQTGFPPPDSRFDAYCFKRPDRCKMNPCLNGGTCYPTETSYVCTCVPGYSGDQCELDFDECHSNPCRNGATCVDGFNTFRCLCLPSYVGALCEQDTETCDYGWHKFQGQCYKYFAHRRTWDAAERECRLQGAHLTSILSHEEQMFVNRVGHDYQWIGLNDKMFEHDFRWTDGSTLQYENWRPNQPDSFFSAGEDCVVIIWHENGQWNDVPCNYHLTYTCKKGTVACGQPPVVENAKTFGKMKPRYEINSLIRYHCKDGFIQRHLPTIRCLGNGRWAIPKITCMNPSAYQRTYSMKYFKNSSSAKDNSINTSKHDHRWSRRWQESRR

SEQ ID NO: 44298 - DNA, 1968 bp, Artificial Sequence
  derived and/or modified sequence
atgttcatcaacatcaagagcatcctgtggatgtgcagcaccctgatcgtgacccacgccctgcacaaggtgaaggtgggcaagagcccccccgtgagaggcagcctgagcggcaaggtgagcctgccctgccacttcagcaccatgcccaccctgccccccagctacaacaccagcgagttcctgagaatcaagtggagcaagatcgaggtggacaagaacggcaaggacctgaaggagaccaccgtgctggtggcccagaacggcaacatcaagatcggccaggactacaagggcagagtgagcgtgcccacccaccccgaggccgtgggcgacgccagcctgaccgtggtgaagctgctggccagcgacgccggcctgtacagatgcgacgtgatgtacggcatcgaggacacccaggacaccgtgagcctgaccgtggacggcgtggtgttccactacagagccgccaccagcagatacaccctgaacttcgaggccgcccagaaggcctgcctggacgtgggcgccgtgatcgccacccccgagcagctgttcgccgcctacgaggacggcttcgagcagtgcgacgccggctggctggccgaccagaccgtgagataccccatcagagcccccagagtgggctgctacggcgacaagatgggcaaggccggcgtgagaacctacggcttcagaagcccccaggagacctacgacgtgtactgctacgtggaccacctggacggcgacgtgttccacctgaccgtgcccagcaagttcaccttcgaggaggccgccaaggagtgcgagaaccaggacgccagactggccaccgtgggcgagctgcaggccgcctggagaaacggcttcgaccagtgcgactacggctggctgagcgacgccagcgtgagacaccccgtgaccgtggccagagcccagtgcggcggcggcctgctgggcgtgagaaccctgtacagattcgagaaccagaccggcttccccccccccgacagcagattcgacgcctactgcttcaagagacccgacagatgcaagatgaacccctgcctgaacggcggcacctgctaccccaccgagaccagctacgtgtgcacctgcgtgcccggctacagcggcgaccagtgcgagctggacttcgacgagtgccacagcaacccctgcagaaacggcgccacctgcgtggacggcttcaacaccttcagatgcctgtgcctgcccagctacgtgggcgccctgtgcgagcaggacaccgagacctgcgactacggctggcacaagttccagggccagtgctacaagtacttcgcccacagaagaacctgggacgccgccgagagagagtgcagactgcagggcgcccacctgaccagcatcctgagccacgaggagcagatgttcgtgaacagagtgggccacgactaccagtggatcggcctgaacgacaagatgttcgagcacgacttcagatggaccgacggcagcaccctgcagtacgagaactggagacccaaccagcccgacagcttcttcagcgccggcgaggactgcgtggtgatcatctggcacgagaacggccagtggaacgacgtgccctgcaactaccacctgacctacacctgcaagaagggcaccgtggcctgcggccagccccccgtggtggagaacgccaagaccttcggcaagatgaagcccagatacgagatcaacagcctgatcagataccactgcaaggacggcttcatccagagacacctgcccaccatcagatgcctgggcaacggcagatgggccatccccaagatcacctgcatgaaccccagcgcctaccagagaacctacagcatgaagtacttcaagaacagcagcagcgccaaggacaacagcatcaacaccagcaagcacgaccacagatggagcagaagatggcaggagagcagaagatag

SEQ ID NO: 44299 - DNA, 1968 bp, Artificial Sequence
  derived and/or modified sequence
atgttcatcaacatcaaatccatcctgtggatgtgcagcacacttatcgttacccatgcactgcataaggtaaaagtgggcaagagccctcctgtcaggggctccttgagcgggaaagtctccttgccttgccacttttctaccatgcctaccctacctccttcctacaatacaagtgaattcctcagaattaagtggtccaagattgaagttgacaagaatggaaaagatttgaaggagactacagtacttgtggcacaaaatggaaacataaagatcggtcaggactacaaaggcagggtgagcgtccctacgcatcctgaggcggtcggcgacgctagcctcaccgtagtgaagttacttgcgtcggacgctggactgtatcgatgtgacgtgatgtatggcatcgaggacacgcaagacacggtgtcattgacagttgatggggtggtgttccattatagggcagccacatcaaggtacacccttaatttcgaagctgcgcaaaaagcctgcttagacgtaggagccgtgattgcgacaccagagcagctgttcgctgcttatgaggacggattcgagcagtgcgacgccggatggctggcggaccagactgtaaggtatccgatccgggcccctagggtggggtgttatggcgataaaatgggcaaggctggggttcgtacttatgggtttcgatcacctcaagaaacctatgatgtctattgctacgtggaccatttagatggcgatgtgtttcatctgaccgttccgtcgaagtttactttcgaggaggcggccaaggaatgcgaaaaccaggatgcccgccttgccactgtcggggaactgcaagcagcctggcgaaacggttttgatcaatgtgactatggatggctgtccgacgcttccgtccgacatcctgtgaccgtggccagagcccaatgtggaggaggactgttgggagttcgtacactgtatcgcttcgagaaccaaaccgggttccccccgccagacagtaggtttgacgcctactgttttaagcggccggatcgttgcaagatgaacccatgcctgaatggaggaacctgctacccaacagagaccagctatgtgtgcacttgcgttccaggctatagcggtgatcaatgtgaattggactttgacgagtgtcactccaatccatgtcgaaatggcgccacttgcgtcgacggattcaacacatttaggtgtctgtgtttaccgagctacgtgggagcgttgtgcgaacaggacacagaaacctgtgactatggctggcacaagttccaaggccagtgttacaaatactttgctcacaggcgtacttgggacgctgctgagagagaatgtagactgcagggcgcccacctcactagcatactttcccacgaggagcagatgttcgtcaaccgcgtgggtcacgactaccaatggatcggactcaacgataaaatgtttgaacatgatttccggtggaccgacggatccacccttcagtatgaaaattggaggcccaaccaacccgatagtttcttcagtgccggcgaggactgtgtggtgatcatctggcatgagaacggccagtggaacgacgtcccatgcaattaccatctgacatacacgtgcaaaaagggcacagttgcctgcggacaaccacctgtcgtggaaaatgctaagactttcggcaagatgaagccccgctatgagattaactccttaattcgataccactgcaaggacggcttcattcagaggcatctgccaactatacggtgtctaggtaacggcagatgggcgatccccaaaataacatgtatgaatcccagtgcttatcagcgaacctactccatgaaatatttcaagaactcctcaagcgcaaaggacaattcaattaatacatcaaagcacgatcatcgttggtccaggcgctggcaggaatcccgtcggtag

SEQ ID NO: 44300 - DNA, 1968 bp, Artificial Sequence
  derived and/or modified sequence
atgttcatcaacatcaagagcatcctgtggatgtgcagcaccctcatcgtgacccacgccctgcacaaggtgaaggtgggcaagagcccccctgtgcggggcagcctgagcggcaaggtgtccctgccctgccacttcagcaccatgcccaccctgcccccatcctacaacaccagcgagttcctgcgcatcaagtggagcaagattgaggtggacaagaatggcaaggacctgaaggagaccaccgtgctggtggcccagaatggaaacatcaagattggccaggactacaagggccgggtgtctgtgcccacccaccctgaggccgtgggagatgccagcctgactgtggtgaagctgctggccagtgatgctggcctgtaccgctgtgatgtgatgtatggaattgaggacacccaggacacagtgtccctgactgtggatggagtggtgttccactaccgggccgccaccagccgctacaccctgaactttgaagctgcccagaaggcctgcctggatgtgggcgctgtgattgccaccccagagcagctgtttgctgcctatgaagatggctttgagcagtgtgatgctggctggctggccgaccagacagtgcgctaccccatccgggccccccgggtgggctgctacggggacaagatgggcaaggccggcgtgaggacctacggcttccgcagcccccaggagacctatgatgtgtactgctacgtggaccacctggatggagatgtgttccacctgactgtgcccagcaagttcacctttgaggaggccgccaaggaatgtgagaaccaggatgcccggctggccaccgtgggggagctgcaggccgcctggagaaatggatttgaccagtgtgactatggctggctgagtgatgcctctgtgcgccaccctgtgacagtggcccgggcccagtgtggcggcggcctgctgggcgtgaggaccctgtacagatttgagaaccagacaggcttccccccaccagacagcagatttgatgcctactgcttcaagaggccagaccgctgcaagatgaacccctgcctgaatggaggcacctgctaccccacagagaccagctatgtgtgcacctgtgtgcccggctacagcggggaccagtgtgagctggactttgatgagtgccacagcaacccctgcagaaatggagccacctgtgtggatggcttcaacaccttccgctgcctgtgcctgcccagctatgtgggcgccctgtgtgagcaggacacagagacctgtgactatggctggcacaagttccagggccagtgctacaagtactttgcccacaggaggacctgggatgctgctgagagagaatgtcggctgcagggcgcccacctgaccagcatcctgagccatgaggagcagatgtttgtgaacagagtgggccatgactaccagtggattggcctgaatgacaagatgtttgaacatgacttccgctggacagatggcagcaccctgcagtatgagaactggaggcccaaccagcctgacagcttcttctctgctggggaggactgtgtggtgatcatctggcatgaaaatggccagtggaatgatgtgccctgcaactaccacctgacctacacctgcaagaagggcaccgtggcctgtggccagccccctgtggtggagaatgccaagaccttcggcaagatgaagcccaggtatgagatcaacagcctcatccgctaccactgcaaggatggcttcatccagaggcacctgcccaccatccgctgcctgggcaatggccgctgggccatccccaagatcacctgcatgaaccccagcgcctaccagaggacctacagcatgaagtacttcaagaacagcagcagcgccaaggacaacagcatcaacaccagcaagcatgaccaccgctggagccgccgctggcaggagagcagaagatag

SEQ ID NO: 44301 - DNA, 1968 bp, Artificial Sequence
  derived and/or modified sequence
atgttcatcaacatcaagagcatcctgtggatgtgcagcaccctgatcgtcacccatgcactgcacaaagttaaagtggggaagtctccgcctgtgcgggggtcgttaagcggcaaggtcagcctgccgtgtcatttctccacgatgcctactctccctccttcttataatacatcggaattcttgcggattaagtggtcgaagatcgaggtagacaagaacggaaaggatctgaaggagaccaccgtgttggtagcgcagaatgggaacattaagatcgggcaggattataaggggagagtctccgtcccgacgcatcctgaagctgttggcgatgcgtctttaaccgtggtgaagctcctcgctagtgatgctggtttgtaccggtgcgacgtcatgtacggcatcgaggacacccaggataccgtgagtctgacggtcgacggcgtggtcttccattatcgagcagctactagtcgttataccctcaatttcgaggcggcacagaaagcctgtctcgacgttggagcagttattgcaacgccagagcaattgttcgccgcctacgaagatggtttcgaacaatgtgatgcggggtggctagctgatcaaactgtacgttatcctatcagggcgccccgcgtcggatgctatggggataaaatgggaaaggccggagtgaggacatatgggttcagatcccctcaggagacctacgacgtgtattgttacgtcgatcacctagatggggacgtgttccatttgaccgttccatctaaatttacctttgaagaagctgccaaggaatgcgaaaatcaagacgccagacttgccacagtgggagagctccaggcagcttggcggaatggctttgatcaatgcgattacggctggcttagcgacgcctcagtacgccatcctgtcaccgtagcacgagcacaatgtggcgggggattgttgggcgtgagaactctctatcggttcgagaaccaaaccggattccccccccctgacagccggtttgatgcttattgcttcaaacggcctgataggtgtaaaatgaatccttgtttgaatggaggaacttgctaccccacagagaccagctacgtgtgtacgtgcgtcccaggttactctggcgaccaatgtgaactggacttcgacgagtgccactcgaacccatgccggaacggcgccacttgtgtagacggcttcaacacgtttaggtgtttatgcctaccctcctacgtcggagcactttgcgagcaagacaccgagacctgcgactatggatggcacaagtttcaaggccagtgctacaaatattttgctcatcgcaggacgtgggatgcggctgagcgggagtgccgtctacagggagcacatctgactagcatcctgagtcacgaagagcagatgtttgtgaatcgagtgggccatgattatcagtggattggtctaaacgataaaatgtttgaacacgattttaggtggacagatgggagcaccctccagtatgagaactggcgtccaaaccagcctgactcctttttttcagcaggcgaggactgtgtcgttatcatttggcacgagaacgggcaatggaacgatgttccctgcaactatcacctgacatacacctgcaagaaggggactgtcgcttgcggtcagcctcctgtcgtagagaacgccaagacttttggaaagatgaagccacgatacgaaatcaactcgctgataagataccactgcaaagacgggttcattcaacggcatttgccaaccattaggtgtctcggcaatggacgctgggccattcctaagatcacttgtatgaacccatcagcctaccagagaacttatagtatgaaatattttaagaattcctcatcagccaaagataatagcatcaacacctcgaagcatgaccatcggtggtcccggcggtggcaagagagccgaaggtag

SEQ ID NO: 44302 - DNA, 1968 bp, Artificial Sequence
  derived and/or modified sequence
atgttcataaacatcaaatctattctgtggatgtgtagtacactcatagtgacgcacgctctgcacaaagttaaggtgggaaaaagtccacctgtgcggggatctcttagcgggaaagtttcattgccatgtcatttcagcacaatgcccacgttaccaccatcttataacacatcagaattcctacgaattaagtggtcaaagatcgaggtcgataaaaacggcaaggatctaaaagaaactactgtgctagtggcacagaatgggaacattaaaatcggccaggattacaagggaagggtgtctgtgccaacgcacccagaggcagtaggagatgcttctctgacagtggtaaagctgctggccagcgacgccggactttatcgttgcgatgtcatgtatgggattgaagatacgcaggatactgtgagcctgacggtggacggagtggtgttccactacagagctgccacctcccgatacactttgaactttgaggctgcccaaaaagcctgcctggatgtgggagccgtgatcgctaccccagagcagttgtttgcagcctatgaggatggctttgagcagtgcgacgcgggttggctcgcagaccagactgtccgatacccgattagggctccgagggtggggtgctatggcgataagatgggaaaagcgggagtgagaacctacggctttaggtcaccccaagagacttacgatgtgtactgttacgtggatcatcttgacggtgacgtcttccacctgaccgtgccaagcaaattcacattcgaggaagccgctaaggagtgtgagaatcaagatgcgaggttggccactgtgggggagttgcaggctgcatggaggaatgggtttgaccagtgtgactatggatggttatcagacgcctccgtcagacatcccgtcactgtagccagagcccaatgtggtggtggtctgctgggagtccgcaccttgtacagatttgaaaaccagactggcttcccacctcccgatagtcgctttgatgcttattgttttaagcgcccagacaggtgcaagatgaacccctgtcttaatggcggtacctgttatccaacggagacaagttacgtgtgcacatgtgttccaggctattcgggtgaccagtgcgagctcgactttgacgagtgtcactcaaatccttgcaggaatggtgccacctgcgtagacggatttaacacgttccggtgtctgtgcctgccttcctacgtcggagctctgtgtgagcaagacacggaaacctgcgattacggatggcacaaatttcaaggccagtgctacaaatactttgcgcacagacggacatgggacgccgctgaaagagagtgccgactgcaaggcgcacacctgacttctatcctcagccacgaggagcagatgttcgttaatagggtgggccatgactatcaatggatagggctgaacgacaaaatgttcgagcacgacttcagatggaccgatggtagtacactgcagtacgagaactggaggcccaatcagcctgatagttttttcagcgcgggagaagactgtgtggtaatcatctggcacgaaaatggccaatggaatgacgtgccttgcaactatcacctcacatatacgtgcaaaaaaggcactgttgcttgcggacagcctcctgtggtggaaaacgcaaaaaccttcggcaagatgaagcccaggtacgaaattaattcactcatccggtaccactgcaaggatggttttatccagcgccatctgcccactatacggtgtctgggcaacggaaggtgggcaatcccgaagatcacatgtatgaatccgtccgcttaccagagaacctattcaatgaagtacttcaagaattcatcttccgccaaggataactccatcaatacctccaaacacgatcaccggtggagtaggaggtggcaggaatccaggcgatag

SEQ ID NO: 44303 - DNA, 2087 bp, Artificial Sequence
  derived and/or modified sequence
caccacgcttcctatgtgacccgcctgggcaacgccgaacccagtcgcgcagcgctgcagtgaattttccccccaaactgcaataagccgccttccaaggccaagatgttcataaatataaagagcatcttatggatgtgttcaaccttaatagtaacccatgcgctacataaagtcaaagtgggaaaaagcccaccggtgaggggctccctctctggaaaagtcagcctaccttgtcatttttcaacgatgcctactttgccacccagttacaacaccagtgaatttctccgcatcaaatggtctaagattgaagtggacaaaaatggaaaagatttgaaagagactactgtccttgtggcccaaaatggaaatatcaagattggtcaggactacaaagggagagtgtctgtgcccacacatcccgaggctgtgggcgatgcctccctcactgtggtcaagctgctggcaagtgatgcgggtctttaccgctgtgacgtcatgtacgggattgaagacacacaagacacggtgtcactgactgtggatggggttgtgtttcactacagggcggcaaccagcaggtacacactgaattttgaggctgctcagaaggcttgtttggacgttggggcagtcatagcaactccagagcagctctttgctgcctatgaagatggatttgagcagtgtgacgcaggctggctggctgatcagactgtcagatatcccatccgggctcccagagtaggctgttatggagataagatgggaaaggcaggagtcaggacttatggattccgttctccccaggaaacttacgatgtgtattgttatgtggatcatctggatggtgatgtgttccacctcactgtccccagtaaattcaccttcgaggaggctgcaaaagagtgtgaaaaccaggatgccaggctggcaacagtgggggaactccaggcggcatggaggaacggctttgaccagtgcgattacgggtggctgtcggatgccagcgtgcgccaccctgtgactgtggccagggcccagtgtggaggtggtctacttggggtgagaaccctgtatcgttttgagaaccagacaggcttccctccccctgatagcagatttgatgcctactgctttaaacgacctgatcgctgcaaaatgaacccgtgccttaacggaggcacctgttatcctactgaaacttcctacgtatgcacctgtgtgccaggatacagcggagaccagtgtgaacttgattttgatgaatgtcactctaatccctgtcgtaatggagccacttgtgttgatggttttaacacattcaggtgcctctgccttccaagttatgttggtgcactttgtgagcaagataccgagacatgtgactatggctggcacaaattccaagggcagtgctacaaatactttgcccatcgacgcacatgggatgcagctgaacgggaatgccgtctgcagggtgcccatctcacaagcatcctgtctcacgaagaacaaatgtttgttaatcgtgtgggccatgattatcagtggataggcctcaatgacaagatgtttgagcatgacttccgttggactgatggcagcacactgcaatacgagaattggagacccaaccagccagacagcttcttttctgctggagaagactgtgttgtaatcatttggcatgagaatggccagtggaatgatgttccctgcaattaccatctcacctatacgtgcaagaaaggaacagtcgcttgcggccagccccctgttgtagaaaatgccaagacctttggaaagatgaaacctcgttatgaaatcaactccctgattagataccactgcaaagatggtttcattcaacgtcaccttccaactatccggtgcttaggaaatggaagatgggctatacctaaaattacctgcatgaacccatctgcataccaaaggacttattctatgaaatactttaaaaattcctcatcagcaaaggacaattcaataaatacatccaaacatgatcatcgttggagccggaggtggcaggagtcgaggcgctgatccctaaaatggcg

SEQ ID NO: 44304 - protein, 365 aa, Artificial Sequence
  derived and/or modified sequence
MNGTRNWCTLVDVHPEDQAAAGRKTYAMVSSHSAGHSLASELVESHDGHEEIIKVYLKGRSGDKMIHEKNINQLKSEVQYIQEARNCLQKLREDISSKLDRNLGDSLHRQEIQVVLEKPNGFSQSPTALYSSPPEVDTCINEDVESLRKTVQDLLAKLQEAKRQHQSDCVAFEVTLSRYQREAEQSNVALQREEDRVEQKEAEVGELQRRLLGMETEHQALLAKVREGEVALEELRSNNADCQAEREKAATLEKEVAGLREKIHHLDDMLKSQQRKVRQMIEQLQNSKAVIQSKDATIQELKEKIAYLEAENLEMHDRMEHLIEKQISHGNFSTQARAKTENPGSIRISKPPSPKPMPVIRVVET

SEQ ID NO: 44305 - protein, 199 aa, Artificial Sequence [sequence omitted]

SEQ ID NO: 44306 - protein, 180 aa, Artificial Sequence
  derived and/or modified sequence
MNGTRNWCTLVDVHPEDQAAAGRKTYAMVSSHSAGHSLASELVESHDGHEEIIKVYLKGRSGDKMIHEKNINQLKSEVQYIQEARNCLQKLREDISSKLDRNLGDSLHRQEIQVVLEKPNGFSQSPTALKAGDTDVQSDWRMSWGNEVPSTNTAQFLATNCLFFYLLHLQPTLPWPPADR

SEQ ID NO: 44307 - DNA, 1098 bp, Artificial Sequence
  derived and/or modified sequence
atgaacggcaccagaaactggtgcaccctggtggacgtgcaccccgaggaccaggccgccgccggcagaaagacctacgccatggtgagcagccacagcgccggccacagcctggccagcgagctggtggagagccacgacggccacgaggagatcatcaaggtgtacctgaagggcagaagcggcgacaagatgatccacgagaagaacatcaaccagctgaagagcgaggtgcagtacatccaggaggccagaaactgcctgcagaagctgagagaggacatcagcagcaagctggacagaaacctgggcgacagcctgcacagacaggagatccaggtggtgctggagaagcccaacggcttcagccagagccccaccgccctgtacagcagcccccccgaggtggacacctgcatcaacgaggacgtggagagcctgagaaagaccgtgcaggacctgctggccaagctgcaggaggccaagagacagcaccagagcgactgcgtggccttcgaggtgaccctgagcagataccagagagaggccgagcagagcaacgtggccctgcagagagaggaggacagagtggagcagaaggaggccgaggtgggcgagctgcagagaagactgctgggcatggagaccgagcaccaggccctgctggccaaggtgagagagggcgaggtggccctggaggagctgagaagcaacaacgccgactgccaggccgagagagagaaggccgccaccctggagaaggaggtggccggcctgagagagaagatccaccacctggacgacatgctgaagagccagcagagaaaggtgagacagatgatcgagcagctgcagaacagcaaggccgtgatccagagcaaggacgccaccatccaggagctgaaggagaagatcgcctacctggaggccgagaacctggagatgcacgacagaatggagcacctgatcgagaagcagatcagccacggcaacttcagcacccaggccagagccaagaccgagaaccccggcagcatcagaatcagcaagccccccagccccaagcccatgcccgtgatcagagtggtggagacctag

SEQ ID NO: 44308 - DNA, 600 bp, Artificial Sequence
  derived and/or modified sequence
atgaacggcaccagaaactggtgcaccctggtggacgtgcaccccgaggaccaggccgccgccggcagaaagacctacgccatggtgagcagccacagcgccggccacagcctggccagcgagctggtggagagccacgacggccacgaggagatcatcaaggtgtacctgaagggcagaagcggcgacaagatgatccacgagaagaacatcaaccagctgaagagcgaggtgcagtacatccaggaggccagaaactgcctgcagaagctgagagaggacatcagcagcaagctggacagaaacctgggcgacagcctgcacagacaggagatccaggtggtgctggagaagcccaacggcttcagccagagccccaccgccctgtacagcagcccccccgaggtggacacctgcatcaacgaggacgtggagagcctgagaaagaccgtgcaggacctgctggccaagctgcaggaggccaagagacagcaccagagcgactgcgtggccttcgaggtgaccctgagcagataccagagagaggccgagcagagcaacgtggccctgcagagagaggaggacagatgccccgagtag

SEQ ID NO: 44309 - DNA, 543 bp, Artificial Sequence
  derived and/or modified sequence
atgaacggcaccagaaactggtgcaccctggtggacgtgcaccccgaggaccaggccgccgccggcagaaagacctacgccatggtgagcagccacagcgccggccacagcctggccagcgagctggtggagagccacgacggccacgaggagatcatcaaggtgtacctgaagggcagaagcggcgacaagatgatccacgagaagaacatcaaccagctgaagagcgaggtgcagtacatccaggaggccagaaactgcctgcagaagctgagagaggacatcagcagcaagctggacagaaacctgggcgacagcctgcacagacaggagatccaggtggtgctggagaagcccaacggcttcagccagagccccaccgccctgaaggccggcgacaccgacgtgcagagcgactggagaatgagctggggcaacgaggtgcccagcaccaacaccgcccagttcctggccaccaactgcctgttcttctacctgctgcacctgcagcccaccctgccctggccccccgccgacagatag

SEQ ID NO: 44310 - DNA, 1098 bp, Artificial Sequence
  derived and/or modified sequence
atgaacgggactcgcaattggtgcacgctcgtcgacgtgcacccagaggaccaagcagccgccgggcgtaaaacctatgctatggtctccagccactctgcaggacattccttagccagcgagctcgtagagtctcacgacgggcatgaggagatcatcaaagtatacctgaagggtagatcaggcgataaaatgatccatgaaaagaacattaatcagctgaaatctgaagtgcagtacatccaggaagctcgaaactgcttacagaaacttagagaagacattagctccaaactcgatcgcaatttaggcgatagtctacacaggcaggagatacaagttgtgttggagaagccaaatggcttctcccagagccctacggctctctacagctccccacctgaagtggacacctgcattaatgaggatgtcgaatccttgcggaagacagtgcaggacctcctggctaaattgcaagaagctaagaggcagcatcaatctgattgcgttgcctttgaggtgaccctgtccagatatcagcgcgaggcagagcaaagcaatgtggctcttcagcgggaagaagatcgggtcgagcagaaagaggccgaagtgggagaactgcagcggcgacttttaggaatggagactgagcatcaggctttgctcgctaaagtacgggaaggagaagtggccctcgaagagcttaggtcaaataatgctgattgtcaagcagaaagggaaaaagccgccaccctggagaaagaggtggctggcctccgtgaaaagatacaccacttggacgatatgctgaagtctcagcagcggaaagtgcggcagatgatagaacagttgcaaaatagcaaagccgtaattcagagcaaggatgccacaattcaagagctaaaggaaaaaatagcctatctggaagcagagaatctcgaaatgcatgatcgtatggaacacctgattgagaagcagattagtcatggcaactttagtacccaggcccgggctaagaccgaaaacccagggtcaatccgcataagcaagcccccctcgcctaaaccaatgccagtgatcagggtggttgagacttag

SEQ ID NO: 44311 - DNA, 600 bp, Artificial Sequence
  derived and/or modified sequence
atgaatggcaccagaaactggtgcaccttggttgatgtccatcccgaggaccaggccgcagccggtcgcaaaacctatgccatggtcagcagccatagcgcagggcacagtctggcgagtgagctggtggagtcccatgatggccacgaagaaatcattaaagtttacctgaagggcagaagtggagataaaatgatccacgaaaagaatatcaaccagctcaagagcgaggtacagtacatacaggaagctagaaattgcttgcagaaactgagggaagacatttccagcaagcttgatcgtaatctcggggactctctccaccgccaagaaatccaggtggttctggagaaacctaacgggtttagtcaatcccctacggctctttattcatccccccctgaggtcgatacatgtatcaacgaggacgttgagagcttgcggaaaacagtccaggatctcctggccaagctccaggaggccaagcgtcagcaccaaagcgactgtgtggcgtttgaggttactctttcccggtatcagcgggaagctgagcagagcaatgtggctctgcagcgggaggaggatcgttgtccagaatag

SEQ ID NO: 44312 - DNA, 543 bp, Artificial Sequence
  derived and/or modified sequence
atgaatggtactagaaattggtgcacgctggtcgatgtgcatcccgaggaccaggctgctgccggacggaagacctacgcaatggtgtcttcccattccgccggacactccctggcctctgaattggtggaatctcacgatggccacgaggaaatcatcaaggtttatctgaaaggaaggagtggcgataagatgatccatgaaaagaacatcaaccagttaaagtccgaggtgcagtacatccaggaggcccgcaattgcctccaaaaattgcgcgaggacatatctagtaagttagacaggaacttgggggattctttgcataggcaggagattcaggttgtgcttgaaaaacccaacggtttttcccaaagcccaaccgcactgaaggctggcgatactgacgtccaatccgattggagaatgagctgggggaatgaggttccttctaccaacacggcgcagtttctcgcaacaaactgtctgttcttctatcttcttcatctccagcctacgctcccatggccgcccgctgacaggtag

SEQ ID NO: 44313 - DNA, 1098 bp, Artificial Sequence
  derived and/or modified sequence
atgaatggcaccaggaactggtgcaccctggtggatgtgcaccctgaggaccaggccgctgctggcaggaagacctacgccatggtgagcagccacagcgctggccacagcctggccagcgagctggtggagagccatgatggccacgaggagatcatcaaggtgtacctgaagggccgcagcggggacaagatgattcatgagaagaacatcaaccagctgaagtctgaggtgcagtacatccaggaggccaggaactgcctgcagaagctgcgggaggacatcagcagcaagctggacaggaacctgggggacagcctgcaccggcaggagatccaggtggtgctggagaagcccaacggcttcagccagagccccacagccctgtacagcagccccccagaggtggacacctgcatcaatgaagatgtggagagcctgaggaagacagtgcaggacctgctggccaagctgcaggaggccaagaggcagcaccagagcgactgtgtggcctttgaggtgaccctgagccgctaccagcgggaggccgagcagagcaatgtggccctgcagcgggaggaggacagagtggagcagaaggaggccgaggtgggggagctgcagaggcggctgctgggcatggagacagagcaccaggccctgctggccaaggtgcgggagggggaggtggccctggaggagctgcggagcaacaatgctgactgccaggccgagcgggagaaggccgccaccctggagaaggaggtggccggcctgcgggagaagatccaccacctggatgacatgctgaagagccagcagaggaaggtgcggcagatgattgagcagctgcagaacagcaaggctgtgatccagagcaaggatgccaccatccaggagctgaaggagaagatcgcctacctggaggccgagaacctggagatgcatgacaggatggagcacctgattgagaagcagatcagccacggcaacttcagcacccaggcccgggccaagacagaaaatcctggcagcatccgcatcagcaagccacccagccccaagcccatgcctgtgatccgggtggtggagacctag

SEQ ID NO: 44314 - DNA, 600 bp, Artificial Sequence
  derived and/or modified sequence
atgaatggcaccaggaactggtgcaccctggtggatgtgcaccctgaggaccaggccgctgctggcaggaagacctacgccatggtgagcagccacagcgctggccacagcctggccagcgagctggtggagagccatgatggccacgaggagatcatcaaggtgtacctgaagggccgcagcggggacaagatgattcatgagaagaacatcaaccagctgaagtctgaggtgcagtacatccaggaggccaggaactgcctgcagaagctgcgggaggacatcagcagcaagctggacaggaacctgggggacagcctgcaccggcaggagatccaggtggtgctggagaagcccaacggcttcagccagagccccacagccctgtacagcagccccccagaggtggacacctgcatcaatgaagatgtggagagcctgaggaagacagtgcaggacctgctggccaagctgcaggaggccaagaggcagcaccagagcgactgtgtggcctttgaggtgaccctgagccgctaccagcgggaggccgagcagagcaatgtggccctgcagcgggaggaggaccgctgcccagagtag

SEQ ID NO: 44315 - DNA, 543 bp, Artificial Sequence
  derived and/or modified sequence
atgaatggcaccaggaactggtgcaccctggtggatgtgcaccctgaggaccaggccgctgctggcaggaagacctacgccatggtgagcagccacagcgctggccacagcctggccagcgagctggtggagagccatgatggccacgaggagatcatcaaggtgtacctgaagggccgcagcggggacaagatgattcatgagaagaacatcaaccagctgaagtctgaggtgcagtacatccaggaggccaggaactgcctgcagaagctgcgggaggacatcagcagcaagctggacaggaacctgggggacagcctgcaccggcaggagatccaggtggtgctggagaagcccaacggcttcagccagagccccacagccctgaaggccggggacacagatgtgcagagcgactggaggatgtcctggggcaatgaggtgcccagcaccaacacagcccagttcctggccaccaactgcctcttcttctacctgctgcacctgcagcccaccctgccctggcccccagctgacagatag

SEQ ID NO: 44316 - DNA, 1098 bp, Artificial Sequence
  derived and/or modified sequence
atgaacggcacccggaactggtgcaccctggtggacgtgcaccccgaggatcaggccgctgcaggtaggaagacatatgccatggtgtctagccatagtgcgggacactctctggcaagcgaattagtggaatctcacgatggccatgaggagattattaaggtgtacctcaaaggcaggtcaggcgataaaatgatccatgagaagaacatcaatcagcttaaaagcgaagttcagtatatccaggaagctagaaactgtctgcaaaagttgagagaagacattagtagcaagctggatcggaatctcggcgattcactgcatagacaggaaattcaggttgtgctagagaaacctaacggcttcagtcagtctccaaccgcgctctactctagtcctccggaggtggatacctgtattaacgaggacgtggagtctttgcgcaagaccgtgcaggacctcctcgccaagctgcaggaggccaagcggcagcaccagtccgactgcgtggcctttgaagtcacactgagccggtatcagcgggaagcagaacagagcaatgtggctctgcagagggaggaagatagagtggaacagaaagaagccgaggtgggtgaattgcaaaggcggttgctagggatggaaaccgagcatcaggcactgcttgccaaagtgcgggagggtgaggtcgccctggaggagctgcgaagtaataatgctgattgtcaggctgaaagggagaaagcagctaccctggaaaaggaagttgccggcctgcgtgaaaagattcatcatctagatgacatgctcaaaagtcagcagagaaaagtgcggcagatgattgagcagctacaaaactccaaagctgtgattcagagtaaagacgccaccattcaagaactgaaagagaagattgcttatctggaagcggaaaatttagagatgcatgacaggatggaacacctgatcgagaagcagatatcacacggaaacttctctacccaggctcgcgccaagacagagaatccaggatctatccgcatctcaaaacctccatcgcccaaaccaatgcccgttattcgggttgtggagacctag

SEQ ID NO: 44317 - DNA, 600 bp, Artificial Sequence
  derived and/or modified sequence
atgaacggcacccggaactggtgcaccctggtggacgtgcaccccgaggatcaggcagctgcaggccggaaaacatacgccatggtgtctagccactctgccggccattccctggcaagtgagctcgtcgagtctcacgacgggcacgaggaaatcatcaaagtgtacttgaaaggaaggagcggggacaaaatgattcatgagaagaacattaatcagctgaaatctgaagtgcagtatattcaggaagctcgcaactgtctgcaaaagctgagagaggatatcagcagcaaacttgacagaaatctgggcgattctctgcaccgtcaagaaattcaagtagtattggagaaacctaacggcttctcgcaatccccaaccgccctgtactcgagcccccccgaggtggatacctgcatcaacgaagacgttgagtcccttcgtaaaacagtgcaagatttgttggcaaaactccaggaggccaagagacaacatcagtcagactgtgtggcctttgaagtgaccctgtctagatatcagcgcgaggcggagcagtccaacgttgcgcttcagcgcgaggaggaccggtgccccgaatag

SEQ ID NO: 44318 - DNA, 543 bp, Artificial Sequence
  derived and/or modified sequence
atgaacggcacccggaactggtgcaccctggtggacgtgcaccccgaagaccaggcagcagctgggcgtaagacctacgcgatggtatcttcacacagcgctggccactccctcgcaagtgaactggtggaatctcacgacggtcacgaagagattatcaaagtttacctgaaaggacgttctggggataaaatgattcatgagaagaacataaaccagctgaagtcagaagtgcagtacatccaggaagccaggaattgcctccaaaagctgcgcgaggacatttcaagcaaattggacagaaacctgggtgattccctgcataggcaggagattcaggtcgtactggaaaagcctaatggcttcagccagagcccaaccgccctgaaagccggcgataccgatgtgcagtccgactggagaatgtcatggggaaatgaggtgccttccaccaacaccgcccaattcctagcgaccaactgcctatttttctacctgttgcatctacagcccacactgccatggcctcccgccgaccggtag

SEQ ID NO: 44319 - DNA, 1098 bp, Artificial Sequence
  derived and/or modified sequence
atgaacgggacccggaactggtgcaccttggttgacgtgcatcctgaggaccaggcggcagcaggcaggaaaacttacgcgatggtgtcgtcacattcggctggacactccctggcatccgagctggtagagtcacatgacggacacgaggagataataaaggtgtacctcaagggcagatcaggcgacaagatgattcatgaaaaaaatatcaatcagttgaaatccgaggtgcagtacatacaggaagccagaaactgcctccagaagctgagagaggatatcagcagcaagttggataggaacctcggcgacagtctccacagacaggaaatccaagtggtcctcgagaagccaaatggattttcacagagcccaactgccttatactcttctcctcctgaggtagacacttgtatcaacgaagacgtggagtccctcaggaagacggtccaggacctgttagctaaactgcaagaggctaaaagacagcaccaatcagactgtgttgccttcgaggtgactttgtctcggtaccaacgggaggctgagcaatctaacgtagcattgcagcgggaagaagatcgcgtggaacagaaggaagctgaggtcggcgagttgcagcggagactccttggcatggagactgaacaccaggccctcttggccaaagttcgcgagggggaggtcgccctggaagaactgagatccaataatgcagactgccaggccgagcgggagaaggccgcaaccctggaaaaagaggttgccggtctgagagagaaaatccatcacctggacgacatgctgaagagccagcaacggaaggttcggcagatgatcgagcagctacaaaatagcaaagctgtgatacaaagcaaagatgcaaccatccaggaattaaaggagaagattgcctatctggaggcagaaaacctcgaaatgcatgaccgaatggagcacctgattgagaagcaaattagccatggtaacttctccacacaagctcgtgctaagaccgaaaacccagggtcaatccggattagcaaacccccttcgccaaaaccaatgccggtgatccgggtggtggagacatag

SEQ ID NO: 44320 - DNA, 600 bp, Artificial Sequence
  derived and/or modified sequence
atgaacgggacacggaattggtgcacactggtagacgtccaccccgaggatcaggccgctgccggaagaaaaacgtacgccatggtcagttcgcactcggctggacacagtctggcatccgaactagttgagtctcatgatggacatgaggagatcataaaagtgtatctaaagggacgctctggagacaagatgatacatgaaaaaaatattaaccagttaaagtccgaagtccagtacattcaggaagcgagaaattgcttgcagaagcttcgggaagacattagcagtaagctcgaccggaacctcggcgacagtttgcacaggcaggagatccaggtcgtgctagagaaacctaacggtttctctcaaagccctacagccctgtatagtagtcctccagaagttgatacttgtatcaacgaagacgtggaatctctaagaaagacagttcaagatctacttgcaaaactgcaagaagccaagcgtcagcatcaaagcgactgtgtagcattcgaggtgacactgtcccgataccagagggaagctgagcagtctaatgtggccctacagagggaggaggataggtgcccagaatag

SEQ ID NO: 44321 - DNA, 543 bp, Artificial Sequence
  derived and/or modified sequence
atgaatggcactagaaactggtgtacgctggtggacgtgcacccagaagatcaggcagcagcgggaagaaaaacctacgccatggttagcagccattctgccggacactcattggcctccgaacttgtagaatcccacgatggccatgaagaaatcatcaaggtctatcttaaagggcgttcaggcgacaaaatgatccatgaaaagaatattaaccaattaaaaagcgaggttcagtatatccaagaggccaggaactgtctgcagaaactaagagaagatatttcttcgaaactagacagaaatctgggcgattccctccatagacaggagatccaagtggtcctggaaaaacctaatgggttctcccagtctcccacggcactaaaggctggtgacacagatgtccaatcagattggaggatgtcttggggtaacgaagtcccatctaccaacacagcacagtttctcgcaaccaattgcctgtttttctacctgctgcacctgcagccaactctgccttggcctcctgccgaccggtag

SEQ ID NO: 44322 - DNA, 1098 bp, Artificial Sequence
  derived and/or modified sequence
atgaacggcactagaaactggtgtacactggtggacgtccacccggaggaccaggccgctgcaggcaggaagacatacgctatggtgtctagtcactcagctggccacagtctcgcatccgaattagtcgaaagtcatgacggacacgaagagatcataaaggtgtacttgaaggggcgctctggcgacaaaatgattcacgaaaagaatatcaaccagctcaagtcagaggtccaatacatacaggaagcaaggaactgtctacagaagctaagagaggacatttctagtaagctggaccgcaatctgggagacagcttgcatcgacaggagatccaggtcgtgttggagaagcccaatggattcagtcagagccctaccgccttatacagttccccccccgaggttgacacctgcattaatgaggatgtggagtccctgcgcaaaaccgtccaggatttactggccaaactacaagaggccaaaaggcagcaccagtcagactgcgtcgcctttgaagtgacactgagccgctaccagcgagaagccgagcaatccaacgttgccctgcaaagagaggaggatcgcgtagaacaaaaggaagccgaagtgggcgagttacagcgtagattgttgggcatggaaactgagcaccaagcactgcttgcaaaagtcagggaaggcgaggtggcccttgaggaacttagatctaacaacgctgattgccaagccgagcgtgagaaagccgcgaccctggagaaagaagttgctgggctccgggagaaaatccaccatctggacgatatgctcaagtcacagcagaggaaagtgaggcaaatgatagagcagctccagaattcaaaagctgtgattcagtccaaagacgcgacaattcaggaattgaaggagaagatcgcttacttggaagcagaaaatcttgagatgcatgatcgaatggaacacctgatcgaaaagcagatctctcacggtaactttagtacccaggctagggccaaaactgaaaaccccggcagcataaggatctccaagcccccgtcacccaagccaatgccagtgattagagtggtagaaacctag

SEQ ID NO: 44323 - DNA, 600 bp, Artificial Sequence
  derived and/or modified sequence
atgaacggaacgaggaactggtgtactcttgtggatgtccaccccgaagatcaggccgctgccgggcggaaaacttacgcgatggtttcatcccattctgctggtcatagcctggcatccgagctcgttgaatctcatgacggccacgaggagattattaaagtgtatttgaagggcagatccggtgataaaatgatacatgaaaaaaatatcaatcagctgaaatcagaagtgcagtatatccaggaagctcgaaattgtctgcagaaactgagagaggatattagtagcaagctggaccgcaatctgggggactcccttcatagacaagaaatccaggtggtgctcgagaaaccaaatgggttttctcagtcgccaacagccttgtactcatctccgccagaggtcgacacatgtattaatgaggacgttgagagccttcgcaaaacggttcaagatctgctggcaaagttacaggaggctaagcggcagcaccagtctgactgtgtcgcttttgaagtcacgttgtcacgctaccaacgcgaggcagagcaaagtaacgtagcgcttcagagagaggaggataggtgtccagaatag

SEQ ID NO: 44324 - DNA, 543 bp, Artificial Sequence
  derived and/or modified sequence
atgaacggaacaaggaattggtgcacactagtggatgtgcatccagaggaccaagctgccgccggccgtaagacttacgcaatggtctcaagtcactcagccggccactcccttgcttccgagctagtggagtctcacgatggccatgaggaaataattaaagtgtaccttaagggccgctccggcgacaaaatgattcatgagaagaacatcaatcagttaaaatctgaagtccagtatattcaagaggcccgaaactgtctgcagaagctgcgtgaagatatttccagtaaactcgacagaaaccttggcgacagcttgcaccgccaagagatccaagtggtacttgagaaaccaaatggattttctcagtcccctaccgcccttaaagccggagatacggacgtccaaagtgactggcgcatgtcttgggggaacgaggtccctagtacgaatacagcccagtttctggcaactaattgtttattcttttatctgctccacctgcaaccgacccttccatggccaccagctgaccgatag

SEQ ID NO: 44325 - DNA, 1098 bp, Artificial Sequence
  derived and/or modified sequence
atgaatggcacacgaaattggtgtacactggtggacgttcatcccgaagaccaagccgcagccggcagaaagacctatgcaatggtgagctcacatagtgctggccacagccttgcgagtgaactggttgagtctcatgatggacatgaggaaattattaaggtatatctcaagggccgttcaggcgataaaatgatccacgaaaaaaacataaaccagttgaaatcagaggtgcaatacattcaagaggcccgcaactgcctgcaaaaacttagggaggacatctcatctaaacttgatcgcaatctgggagacagcttgcatcgacaggagatccaggtcgtgttggagaagcccaatggattcagtcagagccctaccgccttatacagttccccccccgaggttgacacctgcattaatgaggatgtggagtccctgcgcaaaaccgtccaggatttactggccaaactacaagaggccaaaaggcagcaccagtcagactgcgtcgcctttgaagtgacactgagccgctaccagcgagaagccgagcaatccaacgttgccctgcaaagagaggaggatcgcgtagaacaaaaggaagctgaggttggggagctacaaaggaggttactggggatggagactgaacaccaagccctcttagctaaagttagggaaggggaagtcgccctcgaggaactcaggtcgaacaacgcagactgccaggccgagagagaaaaggctgcgacgctcgaaaaggaggtggccggactccgcgaaaaaatccaccacttggacgacatgctaaagtcacagcaacgaaaagtgcgtcagatgatcgaacagctgcagaattcaaaggccgtgattcaaagtaaggacgccaccatacaggagttgaaggagaaaattgcctacttggaggccgaaaacttagagatgcacgaccgaatggaacacttgattgaaaagcaaatctcccatggaaatttctctacacaggcccgcgctaaaactgagaaccccggctccataagaatcagtaagccccctagccctaaaccaatgccagtgattagagtggtggagacatag

SEQ ID NO: 44326 - DNA, 600 bp, Artificial Sequence
  derived and/or modified sequence
atgaacggaacgaggaactggtgtactcttgtggatgtccaccccgaagatcaggccgctgccgggcggaaaacttacgcgatggtttcatcccattctgctggtcatagcctggcatccgagctcgttgaatctcatgacggccacgaggagattattaaagtgtatttgaagggcagatccggtgataaaatgatacatgaaaaaaatatcaatcagctgaaatcagaagtgcagtatatccaggaagctcgaaattgtctgcagaaactgagagaggatattagtagcaagctggaccggaacctcggagactcgctgcacagacaggaaatccaggtcgttctagagaagcctaatggatttagccagagcccaactgccctgtacagcagcccccccgaagttgacacctgtattaacgaagacgtcgagagcctgcggaaaaccgtgcaggacttgctggccaaacttcaagaagctaaaagacagcatcagtccgattgtgtggcctttgaggtgaccttatcaagatatcagagagaggccgagcaatccaacgttgctctgcagagagaggaggatcggtgccctgagtag

SEQ ID NO: 44327 - DNA, 543 bp, Artificial Sequence
  derived and/or modified sequence
atgaacggaacccgaaactggtgcaccctagtggatgtacaccccgaggatcaggccgcagcagggagaaaaacctatgccatggtctctagtcacagtgccggacattccctagcaagcgaattagttgagtctcatgacggtcacgaagagatcatcaaggtctatctaaagggcagaagtggcgacaaaatgatccacgaaaaaaacattaatcagctgaagtcggaagtgcagtatatacaggaagctcggaactgcctccagaaactgcgagaagacatctcgtctaaactggatagaaaccttggcgacagcttgcaccgccaagagatccaagtggtacttgagaaaccaaatggattttctcagtcccctaccgcccttaaagccggagatacggacgtccaaagtgactggcgcatgtcttgggggaacgaggtccctagtacgaatacagcccagtttctggcaactaattgtttattcttttatctgctccacctgcaaccgacccttccatggccaccagctgaccgatag

SEQ ID NO: 44328 - DNA, 3033 bp, Artificial Sequence
  derived and/or modified sequence
cagttggagccagacagcggggtggacaagtggcgtgtgtgctgcgaccccgagggaagatgaacgggacgcggaactggtgtaccctggtggacgtgcacccagaggaccaggcggcggcgggcaggaagacctatgccatggtgtccagccactcagctggtcattctctggcttcagaactggtggagtcccatgatggacatgaggagatcattaaggtgtacttgaaggggaggtctggagacaagatgattcacgagaagaatattaaccagctgaagagtgaggtccagtacatccaggaggccaggaactgcctacagaagctccgggaggatataagtagcaagcttgacaggaacctaggagattctctccatcgacaggagatacaggtggtgctagaaaagccaaatggctttagtcagagtcccacagccctgtacagcagcccacctgaggtggacacctgtataaatgaggatgttgagagcttgaggaagacggtgcaggacttgctggccaagcttcaggaggccaagcggcaacaccagtcagactgtgtggcttttgaggtcacactcagccggtaccagagggaagcagaacaaagtaatgtggcccttcagagagaggaggacagagtggagcagaaagaggcagaagtcggagagctgcagaggcgcttgctagggatggagacggagcatcaggccttactggcgaaagtgagggaaggggaggtggccctagaggaacttcggagcaacaatgctgactgccaagcagaacgagaaaaggctgctaccctggaaaaggaagtggccgggttgcgggagaagatccaccacttggatgacatgctcaagagccagcagcggaaagtccggcaaatgatagagcagctccagaattcaaaagctgtgatccagtcaaaggacgccaccatccaggagctcaaggagaaaatcgcctatctggaggcagagaatttagagatgcatgaccggatggaacacctgatagaaaaacaaatcagtcatggcaacttcagcacccaggcccgggccaagacagagaacccgggcagtattaggatatccaagccgcctagcccgaagcccatgcctgtcatccgagtggtggaaacctgagctgcctggagatggttgctgccattgctgctgcctctgcctcggagaagcccactgcccctgttggctgttaacactgcctttgacttcctgactgtcccctggctgcacccaggacttcgggctcctgtgtctcaccattcccaagcccctggccactctaagctgggcagacggagcacgagcacctattcaaggcactgcagccctttggaagacattgtcctgcaagcaggagccagggcaatatctatattcctacagtgactatttttctctgtagagagcctcccttctgttgtagactggactctggctgtgccataagccaggccttcatcagattgggagaggtgacaagatttgcctcagccctaaaagctggagacacagatgtccagagtgattggagaatgtcctgggggaatgaagttccttccacaaacacagctcagttcttagcaacaaactgtttgtttttctacttgctccatctgcagcctacgctgccctggcctcctgcagacagatagtggggttacctggcaaggcctggtgagagccagtgaacctaagctttgactgggtggccttgtctttctggggaggagggaatgtacattcagggagtagccttttgcggaaaaattctctagggctacagacagtcatgtgtgacttctctctgctgtgaaaactcccagagtctctttagggattttccctaaggtgtaccaccaggcacacctcagtcttcttgacccagagcctgaaaactgttttcactgggttccaccagtcccagcaaaatcctctttgtatttattttgctaagttattggtggttttgcttacatctcatgattgatataataccaaagttctatagccttctcttgcagtatttggatttgcttgaaaccgggaaaactgttcccattaggcttgttaatgtcagagtgacactattatgaatctttctctccctttcctctgcctgtttcttctctctttctccttcaaacttgctctgcagctaaggaaggtgagtctactttccctgaggctttggggtcagagtatatgttgtttggagaaagagggcaatcaggactcttctgggacccagatgagttcttcactagcccttctgaaccccttgctccataattggtcttttatcctggctctgaatgaccctgcaggtcatcatggttttctttttttattgtttttttttttttctgagacagagtctcactctgtcacccaggctggagtgcagtggcgcgatctcagctcactgcaacctctgcctcccggatttaagcgattcttctgcctcagcctcccgagtagctgggactacaggtgtgccaccacgcctggctgatttttgtatttttagtagagatggggtttcaccatactggctaggctggtctcgaattcctgacctcaggtgatccacccacctcggcttcccaaagtgctaggattataggcttgagctactgcgcccggcccatggtgtttttctttagggctcttcctacaaccttgagaagtagataggcatcagagtatggtactataggaatcagaaaaattcaaaacaaatgtggattaagtgtttaggctctatgtggctcacgcagccagaatccttaagtctgtgtgtttctgtgtctcaagactgggctcacattctggctttgtccataacaatgctctgggatttcagggagttccctcatttgtaaaatgagggggtcagagcaggtgatatccatgtttcttccctttctgatattgttgtctgtggcatattctttgtatggcgaatttaataaattatattaatgtgtctctttga

SEQ ID NO: 44329 - DNA, 2107 bp, Artificial Sequence
  derived and/or modified sequence
agcggggtggacaagtggcgtgtgtgctgcgaccccgagggaagatgaacgggacgcggaactggtgtaccctggtggacgtgcacccagaggaccaggcggcggcgggcaggaagacctatgccatggtgtccagccactcagctggtcattctctggcttcagaactggtggagtcccatgatggacatgaggagatcattaaggtgtacttgaaggggaggtctggagacaagatgattcacgagaagaatattaaccagctgaagagtgaggtccagtacatccaggaggccaggaactgcctacagaagctccgggaggatataagtagcaagcttgacaggaacctaggagattctctccatcgacaggagatacaggtggtgctagaaaagccaaatggctttagtcagagtcccacagccctgtacagcagcccacctgaggtggacacctgtataaatgaggatgttgagagcttgaggaagacggtgcaggacttgctggccaagcttcaggaggccaagcggcaacaccagtcagactgtgtggcttttgaggtcacactcagccggtaccagagggaagcagaacaaagtaatgtggcccttcagagagaggaggacagatgtccagagtgattggagaatgtcctgggggaatgaagttccttccacaaacacagctcagttcttagcaacaaactgtttgtttttctacttgctccatctgcagcctacgctgccctggcctcctgcagacagatagtggggttacctggcaaggcctggtgagagccagtgaacctaagctttgactgggtggccttgtctttctggggaggagggaatgtacattcagggagtagccttttgcggaaaaattctctagggctacagacagtcatgtgtgacttctctctgctgtgaaaactcccagagtctctttagggattttccctaaggtgtaccaccaggcacacctcagtcttcttgacccagagcctgaaaactgttttcactgggttccaccagtcccagcaaaatcctctttgtatttattttgctaagttattggtggttttgcttacatctcatgattgatataataccaaagttctatagccttctcttgcagtatttggatttgcttgaaaccgggaaaactgttcccattaggcttgttaatgtcagagtgacactattatgaatctttctctccctttcctctgcctgtttcttctctctttctccttcaaacttgctctgcagctaaggaaggtgagtctactttccctgaggctttggggtcagagtatatgttgtttggagaaagagggcaatcaggactcttctgggacccagatgagttcttcactagcccttctgaaccccttgctccataattggtcttttatcctggctctgaatgaccctgcaggtcatcatggttttctttttttattgtttttttttttttctgagacagagtctcactctgtcacccaggctggagtgcagtggcgcgatctcagctcactgcaacctctgcctcccggatttaagcgattcttctgcctcagcctcccgagtagctgggactacaggtgtgccaccacgcctggctgatttttgtatttttagtagagatggggtttcaccatactggctaggctggtctcgaattcctgacctcaggtgatccacccacctcggcttcccaaagtgctaggattataggcttgagctactgcgcccggcccatggtgtttttctttagggctcttcctacaaccttgagaagtagataggcatcagagtatggtactataggaatcagaaaaattcaaaacaaatgtggattaagtgtttaggctctatgtggctcacgcagccagaatccttaagtctgtgtgtttctgtgtctcaagactgggctcacattctggctttgtccataacaatgctctgggatttcagggagttccctcatttgtaaaatgagggggtcagagcaggtgatatccatgtttcttccctttctgatattgttgtctgtggcatattctttgtatggcgaatttaataaattatattaatgtgtc

SEQ ID NO: 44330 - DNA, 992 bp, Artificial Sequence
  derived and/or modified sequence
cagttggagccagacagcggggtggacaagtggcgtgtgtgctgcgaccccgagggaagatgaacgggacgcggaactggtgtaccctggtggacgtgcacccagaggaccaggcggcggcgggcaggaagacctatgccatggtgtccagccactcagctggtcattctctggcttcagaactggtggagtcccatgatggacatgaggagatcattaaggtgtacttgaaggggaggtctggagacaagatgattcacgagaagaatattaaccagctgaagagtgaggtccagtacatccaggaggccaggaactgcctacagaagctccgggaggatataagtagcaagcttgacaggaacctaggagattctctccatcgacaggagatacaggtggtgctagaaaagccaaatggctttagtcagagtcccacagccctaaaagctggagacacagatgtccagagtgattggagaatgtcctgggggaatgaagttccttccacaaacacagctcagttcttagcaacaaactgtttgtttttctacttgctccatctgcagcctacgctgccctggcctcctgcagacagatagtggggttacctggcaaggcctggtgagagccagtgaacctaagctttgactgggtggccttgtctttctggggaggagggaatgtacattcagggagtagccttttgcggaaaaattctctagggctacagacagtcatgtgtgacttctctctgctgtgaaaactcccagagtctctttagggattttccctaaggtgtaccaccaggcacacctcagtcttcttgacccagagcctgaaaactgttttcactgggttccaccagtcccagcaaaatcctctttgtatttattttgctaagttattggtggttttgcttacatctcatgattgatataataccaaagttctatagccttctcttgcagtatttggatttgcttgaaacc

SEQ ID NO: 44331 - RNA, 1098 nt, Artificial Sequence
  derived and/or modified sequence
augaacggcacuagaaacugguguacacugguggacguccacccggaggaccaggccgcugcaggcaggaagacauacgcuauggugucuagucacucagcuggccacagucucgcauccgaauuagucgaaagucaugacggacacgaagagaucauaaagguguacuugaaggggcgcucuggcgacaaaaugauucacgaaaagaauaucaaccagcucaagucagagguccaauacauacaggaagcaaggaacugucuacagaagcuaagagaggacauuucuaguaagcuggaccgcaaucugggagacagcuugcaucgacaggagauccaggucguguuggagaagcccaauggauucagucagagcccuaccgccuuauacaguuccccccccgagguugacaccugcauuaaugaggauguggagucccugcgcaaaaccguccaggauuuacuggccaaacuacaagaggccaaaaggcagcaccagucagacugcgucgccuuugaagugacacugagccgcuaccagcgagaagccgagcaauccaacguugcccugcaaagagaggaggaucgcguagaacaaaaggaagccgaagugggcgaguuacagcguagauuguugggcauggaaacugagcaccaagcacugcuugcaaaagucagggaaggcgagguggcccuugaggaacuuagaucuaacaacgcugauugccaagccgagcgugagaaagccgcgacccuggagaaagaaguugcugggcuccgggagaaaauccaccaucuggacgauaugcucaagucacagcagaggaaagugaggcaaaugauagagcagcuccagaauucaaaagcugugauucaguccaaagacgcgacaauucaggaauugaaggagaagaucgcuuacuuggaagcagaaaaucuugagaugcaugaucgaauggaacaccugaucgaaaagcagaucucucacgguaacuuuaguacccaggcuagggccaaaacugaaaaccccggcagcauaaggaucuccaagcccccgucacccaagccaaugccagugauuagagugguagaaaccuag

SEQ ID NO: 44332 - RNA, 600 nt, Artificial Sequence
  derived and/or modified sequence
augaacggaacgaggaacugguguacucuuguggauguccaccccgaagaucaggccgcugccgggcggaaaacuuacgcgaugguuucaucccauucugcuggucauagccuggcauccgagcucguugaaucucaugacggccacgaggagauuauuaaaguguauuugaagggcagauccggugauaaaaugauacaugaaaaaaauaucaaucagcugaaaucagaagugcaguauauccaggaagcucgaaauugucugcagaaacugagagaggauauuaguagcaagcuggaccgcaaucugggggacucccuucauagacaagaaauccagguggugcucgagaaaccaaauggguuuucucagucgccaacagccuuguacucaucuccgccagaggucgacacauguauuaaugaggacguugagagccuucgcaaaacgguucaagaucugcuggcaaaguuacaggaggcuaagcggcagcaccagucugacugugucgcuuuugaagucacguugucacgcuaccaacgcgaggcagagcaaaguaacguagcgcuucagagagaggaggauagguguccagaauag

SEQ ID NO: 44333 - RNA, 543 nt, Artificial Sequence
  derived and/or modified sequence
augaacggaacaaggaauuggugcacacuaguggaugugcauccagaggaccaagcugccgccggccguaagacuuacgcaauggucucaagucacucagccggccacucccuugcuuccgagcuaguggagucucacgauggccaugaggaaauaauuaaaguguaccuuaagggccgcuccggcgacaaaaugauucaugagaagaacaucaaucaguuaaaaucugaaguccaguauauucaagaggcccgaaacugucugcagaagcugcgugaagauauuuccaguaaacucgacagaaaccuuggcgacagcuugcaccgccaagagauccaagugguacuugagaaaccaaauggauuuucucaguccccuaccgcccuuaaagccggagauacggacguccaaagugacuggcgcaugucuugggggaacgaggucccuaguacgaauacagcccaguuucuggcaacuaauuguuuauucuuuuaucugcuccaccugcaaccgacccuuccauggccaccagcugaccgauag

SEQ ID NO: 44334 - RNA, 1098 nt, Artificial Sequence
  derived and/or modified sequence
augaauggcacacgaaauugguguacacugguggacguucaucccgaagaccaagccgcagccggcagaaagaccuaugcaauggugagcucacauagugcuggccacagccuugcgagugaacugguugagucucaugauggacaugaggaaauuauuaagguauaucucaagggccguucaggcgauaaaaugauccacgaaaaaaacauaaaccaguugaaaucagaggugcaauacauucaagaggcccgcaacugccugcaaaaacuuagggaggacaucucaucuaaacuugaucgcaaucugggagacagcuugcaucgacaggagauccaggucguguuggagaagcccaauggauucagucagagcccuaccgccuuauacaguuccccccccgagguugacaccugcauuaaugaggauguggagucccugcgcaaaaccguccaggauuuacuggccaaacuacaagaggccaaaaggcagcaccagucagacugcgucgccuuugaagugacacugagccgcuaccagcgagaagccgagcaauccaacguugcccugcaaagagaggaggaucgcguagaacaaaaggaagcugagguuggggagcuacaaaggagguuacuggggauggagacugaacaccaagcccucuuagcuaaaguuagggaaggggaagucgcccucgaggaacucaggucgaacaacgcagacugccaggccgagagagaaaaggcugcgacgcucgaaaaggagguggccggacuccgcgaaaaaauccaccacuuggacgacaugcuaaagucacagcaacgaaaagugcgucagaugaucgaacagcugcagaauucaaaggccgugauucaaaguaaggacgccaccauacaggaguugaaggagaaaauugccuacuuggaggccgaaaacuuagagaugcacgaccgaauggaacacuugauugaaaagcaaaucucccauggaaauuucucuacacaggcccgcgcuaaaacugagaaccccggcuccauaagaaucaguaagcccccuagcccuaaaccaaugccagugauuagagugguggagacauag

SEQ ID NO: 44335 - RNA, 600 nt, Artificial Sequence
  derived and/or modified sequence
augaacggaacgaggaacugguguacucuuguggauguccaccccgaagaucaggccgcugccgggcggaaaacuuacgcgaugguuucaucccauucugcuggucauagccuggcauccgagcucguugaaucucaugacggccacgaggagauuauuaaaguguauuugaagggcagauccggugauaaaaugauacaugaaaaaaauaucaaucagcugaaaucagaagugcaguauauccaggaagcucgaaauugucugcagaaacugagagaggauauuaguagcaagcuggaccggaaccucggagacucgcugcacagacaggaaauccaggucguucuagagaagccuaauggauuuagccagagcccaacugcccuguacagcagcccccccgaaguugacaccuguauuaacgaagacgucgagagccugcggaaaaccgugcaggacuugcuggccaaacuucaagaagcuaaaagacagcaucaguccgauuguguggccuuugaggugaccuuaucaagauaucagagagaggccgagcaauccaacguugcucugcagagagaggaggaucggugcccugaguag

SEQ ID NO: 44336 - RNA, 543 nt, Artificial Sequence
  derived and/or modified sequence
augaacggaacccgaaacuggugcacccuaguggauguacaccccgaggaucaggccgcagcagggagaaaaaccuaugccauggucucuagucacagugccggacauucccuagcaagcgaauuaguugagucucaugacggucacgaagagaucaucaaggucuaucuaaagggcagaaguggcgacaaaaugauccacgaaaaaaacauuaaucagcugaagucggaagugcaguauauacaggaagcucggaacugccuccagaaacugcgagaagacaucucgucuaaacuggauagaaaccuuggcgacagcuugcaccgccaagagauccaagugguacuugagaaaccaaauggauuuucucaguccccuaccgcccuuaaagccggagauacggacguccaaagugacuggcgcaugucuugggggaacgaggucccuaguacgaauacagcccaguuucuggcaacuaauuguuuauucuuuuaucugcuccaccugcaaccgacccuuccauggccaccagcugaccgauag

SEQ ID NO: 44337 - protein, 398 aa, Artificial Sequence
  derived and/or modified sequence
MGAPAASLLLLLLLFACCWAPGGANLSQDDSQPWTSDETVVAGGTVVLKCQVKDHEDSSLQWSNPAQQTLYFGEKRALRDNRIQLVTSTPHELSISISNVALADEGEYTCSIFTMPVRTAKSLVTVLGIPQKPIITGYKSSLREKDTATLNCQSSGSKPAARLTWRKGDQELHGEPTRIQEDPNGKTFTVSSSVTFQVTREDDGASIVCSVNHESLKGADRSTSQRIEVLYTPTAMIRPDPPHPREGQKLLLHCEGRGNPVPQQYLWEKEGSVPPLKMTQESALIFPFLNKSDSGTYGCTATSNMGSYKAYYTLNVNDPSPVPSSSSTYHAIIGGIVAFIVFLLLIMLIFLGHYLIRHKGTYLTHEAKGSDDAPDADTAIINAEGGQSGGDDKKEYFI

SEQ ID NO: 44338 - protein, 234 aa, Artificial Sequence
  derived and/or modified sequence
MGAPAASLLLLLLLFACCWAPGGANLSQDDSQPWTSDETVVAGGTVVLKCQVKDHEDSSLQWSNPAQQTLYFGEKRALRDNRIQLVTSTPHELSISISNVALADEGEYTCSIFTMPVRTAKSLVTVLGIPQKPIITGYKSSLREKDTATLNCQSSGSKPAARLTWRKGDQELHGEPTRIQEDPNDTPTAMIRPDPPHPREGQKLLLHCEGRGNPVPQQYLWEKEGSVPPLKMTQ

SEQ ID NO: 44339 - DNA, 1197 bp, Artificial Sequence
  derived and/or modified sequence
atgggcgcccccgccgccagcctgctgctgctgctgctgctgttcgcctgctgctgggcccccggcggcgccaacctgagccaggacgacagccagccctggaccagcgacgagaccgtggtggccggcggcaccgtggtgctgaagtgccaggtgaaggaccacgaggacagcagcctgcagtggagcaaccccgcccagcagaccctgtacttcggcgagaagagagccctgagagacaacagaatccagctggtgaccagcaccccccacgagctgagcatcagcatcagcaacgtggccctggccgacgagggcgagtacacctgcagcatcttcaccatgcccgtgagaaccgccaagagcctggtgaccgtgctgggcatcccccagaagcccatcatcaccggctacaagagcagcctgagagagaaggacaccgccaccctgaactgccagagcagcggcagcaagcccgccgccagactgacctggagaaagggcgaccaggagctgcacggcgagcccaccagaatccaggaggaccccaacggcaagaccttcaccgtgagcagcagcgtgaccttccaggtgaccagagaggacgacggcgccagcatcgtgtgcagcgtgaaccacgagagcctgaagggcgccgacagaagcaccagccagagaatcgaggtgctgtacacccccaccgccatgatcagacccgaccccccccaccccagagagggccagaagctgctgctgcactgcgagggcagaggcaaccccgtgccccagcagtacctgtgggagaaggagggcagcgtgccccccctgaagatgacccaggagagcgccctgatcttccccttcctgaacaagagcgacagcggcacctacggctgcaccgccaccagcaacatgggcagctacaaggcctactacaccctgaacgtgaacgaccccagccccgtgcccagcagcagcagcacctaccacgccatcatcggcggcatcgtggccttcatcgtgttcctgctgctgatcatgctgatcttcctgggccactacctgatcagacacaagggcacctacctgacccacgaggccaagggcagcgacgacgcccccgacgccgacaccgccatcatcaacgccgagggcggccagagcggcggcgacgacaagaaggagtacttcatctag

SEQ ID NO: 44340 - DNA, 705 bp, Artificial Sequence
  derived and/or modified sequence
atgggcgcccccgccgccagcctgctgctgctgctgctgctgttcgcctgctgctgggcccccggcggcgccaacctgagccaggacgacagccagccctggaccagcgacgagaccgtggtggccggcggcaccgtggtgctgaagtgccaggtgaaggaccacgaggacagcagcctgcagtggagcaaccccgcccagcagaccctgtacttcggcgagaagagagccctgagagacaacagaatccagctggtgaccagcaccccccacgagctgagcatcagcatcagcaacgtggccctggccgacgagggcgagtacacctgcagcatcttcaccatgcccgtgagaaccgccaagagcctggtgaccgtgctgggcatcccccagaagcccatcatcaccggctacaagagcagcctgagagagaaggacaccgccaccctgaactgccagagcagcggcagcaagcccgccgccagactgacctggagaaagggcgaccaggagctgcacggcgagcccaccagaatccaggaggaccccaacgacacccccaccgccatgatcagacccgaccccccccaccccagagagggccagaagctgctgctgcactgcgagggcagaggcaaccccgtgccccagcagtacctgtgggagaaggagggcagcgtgccccccctgaagatgacccagtag

SEQ ID NO: 44341 - DNA, 1197 bp, Artificial Sequence
  derived and/or modified sequence
atgggcgctcccgccgcctcccttctgctgttattacttctgttcgcgtgctgctgggccccaggcggcgccaacctgtcccaggatgatagccagccatggacatccgatgagacagtcgtagccggcgggactgttgtgctcaagtgtcaggtgaaggatcacgaagacagtagtctgcagtggtctaacccagcccaacaaaccctgtacttcggggagaaaagggcgttgagggataatagaatccagctagtgacttcaacccctcacgagctgtccatctcgatcagcaatgtggcactcgccgacgagggcgagtatacgtgtagcattttcaccatgcctgtgagaacggccaaaagtctggtcacggttctcggaatccctcagaagccgattatcactggatacaagagttcgttacgagagaaggacaccgccacccttaactgtcaatcctctgggagcaagccagcagcgcggctgacttggcgtaaaggggatcaggagctccatggtgaaccaaccagaattcaggaagaccctaacggtaagaccttcaccgtctccagcagcgtcactttccaggtgacacgggaggacgacggagctagcatcgtttgctccgttaatcatgaatccctgaagggtgccgaccgcagcactagtcagcggattgaggtgctgtatactcctaccgctatgatacgacccgatccaccccacccgagagagggccaaaaactgttactgcactgcgaagggagagggaacccggtacctcaacagtacctttgggagaaggagggctccgtgccacctctgaagatgactcaggaatccgcgctcatattcccattcctgaataagtcggatagcggaacttatggttgtacagctacaagtaacatggggagctataaagcttactacacattaaacgtgaacgaccctagccctgtaccatccagctccagtacctatcacgccattatcggaggcatcgtcgccttcatcgtgtttctgctgctgatcatgctgatttttctgggccattacctaattcgccacaaaggaacatatttaacacatgaggccaaaggttctgacgatgcacctgatgccgatactgcaattatcaatgcagaaggcggccagtccgggggcgacgataaaaaagagtatttcatttag

SEQ ID NO: 44342 - DNA, 705 bp, Artificial Sequence
  derived and/or modified sequence
atgggagcccctgccgccagcctgctactcctccttctcttgtttgcatgctgttgggcccccggcggcgccaaccttagccaggatgacagtcagccttggacctctgacgagacagtcgtggcgggaggcaccgtagtattaaagtgccaggtgaaggatcacgaggattcctccctgcaatggtccaatccagcccagcagactttgtatttcggggaaaaaagagcactgcgagacaatcgcattcagttagtgacatcaacacctcacgagctctccatatccatttcgaacgtagcactggccgatgaaggcgagtacacctgctctatcttcacaatgccagttcggactgcaaagagcctggtgactgtgcttggcatcccccaaaaacctattataaccggatataaatccagtctgcgtgagaaggacaccgccacgctaaactgtcagtctagtggctcaaaaccagccgcccgactgacttggcgcaaaggtgatcaggaactccatggtgagcccacacgaattcaagaggaccccaatgataccccaacagccatgatcagacctgaccctcctcatccccgggaaggacagaaattactgctgcattgtgagggtaggggcaacccagtgcctcagcagtatctgtgggagaaggaggggagtgtgcctcctctcaagatgacccagtag

SEQ ID NO: 44343 - DNA, 1197 bp, Artificial Sequence
  derived and/or modified sequence
atgggcgccccagctgccagcctgctgctgctgctgctgctgtttgcctgctgctgggcccctggaggagccaacctgagccaggatgacagccagccctggaccagtgatgaaacagtggtggccggcggcaccgtggtgctgaagtgccaggtgaaggaccacgaggacagcagcctgcagtggagcaacccagcccagcagaccctgtactttggagagaagagggccctgcgggacaaccgcatccagctggtgaccagcacccctcatgagctgagcatcagcatcagcaatgtggccctggctgatgaaggagagtacacctgcagcatcttcaccatgcctgtgaggacagccaagagcctggtgacagtgctgggcatcccccagaagcccatcatcaccggctacaagagcagcctgcgggagaaggacacagccaccctgaactgccagagcagcggcagcaagccagctgcccggctgacctggaggaaaggagaccaggagctgcatggagagcccacccgcatccaggaggaccccaacgggaagaccttcaccgtgagcagctctgtgaccttccaggtgaccagagaagatgatggagccagcatcgtgtgcagcgtgaaccacgagagcctgaagggagctgacaggagcaccagccagagaattgaggtgctgtacacccccacagccatgatccggccagaccccccccacccccgggagggccagaagctgctgctgcactgtgagggccggggcaaccctgtgccccagcagtacctgtgggagaaggagggctctgtgccccccctgaagatgacccaggagagcgccctgatcttccccttcctgaacaagagtgacagcggcacctacggctgcacagccaccagcaacatgggcagctacaaggcctactacaccctgaatgtgaatgaccccagccctgtgcccagcagcagcagcacctaccacgccatcattggaggcatcgtggccttcatcgtgttcctgctgctgatcatgctgatcttcctgggccactacctgatccgccacaagggcacctacctgacccatgaggccaagggcagtgatgatgccccagatgctgacacagccatcatcaatgctgagggcggccagagcggaggagatgacaagaaggagtacttcatctag

SEQ ID NO: 44344 - DNA, 705 bp, Artificial Sequence
  derived and/or modified sequence
atgggcgccccagctgccagcctgctgctgctgctgctgctgtttgcctgctgctgggcccctggaggagccaacctgagccaggatgacagccagccctggaccagtgatgaaacagtggtggccggcggcaccgtggtgctgaagtgccaggtgaaggaccacgaggacagcagcctgcagtggagcaacccagcccagcagaccctgtactttggagagaagagggccctgcgggacaaccgcatccagctggtgaccagcacccctcatgagctgagcatcagcatcagcaatgtggccctggctgatgaaggagagtacacctgcagcatcttcaccatgcctgtgaggacagccaagagcctggtgacagtgctgggcatcccccagaagcccatcatcaccggctacaagagcagcctgcgggagaaggacacagccaccctgaactgccagagcagcggcagcaagccagctgcccggctgacctggaggaaaggagaccaggagctgcatggagagcccacccgcatccaggaggaccccaatgacacccccacagccatgatccggccagaccccccccacccccgggagggccagaagctgctgctgcactgtgagggccggggcaaccctgtgccccagcagtacctgtgggagaaggagggctctgtgccccccctgaagatgacccagtag

SEQ ID NO: 44345 - DNA, 1197 bp, Artificial Sequence
  derived and/or modified sequence
atgggcgcccccgccgccagcctgctgctgctgctgctgctgttcgcttgttgttgggcacctggtggagctaatttgtcgcaggacgattcccaaccctggacgtccgatgagacagtggtggccgggggtaccgtcgttctcaagtgtcaagtgaaagaccacgaggacagctctctgcagtggtccaatccagctcagcagaccctctatttcggtgaaaagagggctctgagagataaccgcatccagctcgttacaagtacgccacatgaactgtccatctctatttccaacgtggctctggcagacgagggggaatatacgtgctccatttttacaatgcctgttcgcactgcaaagtccctggtaacggtgcttggaattcctcaaaagcccattattacaggttataagtcttccctgcgcgagaaagataccgccacacttaattgccagtcttccggttcaaagccggccgctaggctgacatggagaaagggcgatcaggagctgcacggcgaaccgactcgcatacaagaagatcccaacggcaagacctttaccgtctcctcttctgtaacgttccaggtgacgcgggaggacgacggcgcctctattgtgtgcagcgtgaaccatgaaagtttaaagggggccgaccgaagcacctcccaacgcatcgaggtgctgtatacccccactgccatgatcagacccgacccaccccaccctagagagggtcagaagttacttctgcactgcgagggtcgaggcaatccagtcccccagcaatacctgtgggagaaggagggatctgtcccgccacttaagatgacccaagagtcagcacttatcttcccgtttctaaataaatccgacagtggaacttacggatgcaccgctaccagtaacatgggctcttacaaggcctattataccctcaacgttaacgatcctagtcctgtacctagtagctcaagtacatatcacgccatcatcggcggtattgttgcattcatagtgttcttactgttgataatgctcatcttcttgggccactatttgatcaggcataaaggaacatacctgacccacgaggccaagggcagcgatgacgccccagatgccgatactgccataattaatgccgagggaggccagtctggtggcgacgataaaaaagagtatttcatctag

SEQ ID NO: 44346 - DNA, 705 bp, Artificial Sequence
  derived and/or modified sequence
atgggcgcccccgccgccagcctgctgctgctgctgctgctgttcgcatgttgttgggcgcctgggggcgcaaatctgagccaggacgactcacagccatggacctcagacgagaccgtggtggccggcggaaccgtggttttgaagtgccaggtgaaagatcacgaagattcgtccctccagtggtctaaccccgctcagcaaacactctactttggagaaaagcgggctttgagagataatcggatacagctggtgacttccacgccccacgagctgtctatctcgatttcaaatgttgcgctggccgatgagggagagtacacctgttctatctttaccatgcccgtgaggaccgcaaaatcactcgttaccgtgctgggtatccctcagaaacccattatcaccgggtataagtcttctctacgggagaaagataccgccaccttgaattgccagagttccggcagcaaaccagccgccagacttacatggcgcaagggagaccaggaactacacggcgaacccacacggatacaggaggatccaaacgatactcccaccgccatgattaggccagaccctccacacccgagggaagggcagaagctcttgctgcactgcgaggggaggggcaatcctgtgccccagcaatatctgtgggaaaaggaaggaagcgtgccacccttgaagatgacccaatag

SEQ ID NO: 44347 - DNA, 1197 bp, Artificial Sequence
  derived and/or modified sequence
atgggcgcacctgccgcttcactgctactactgctactcctgttcgcatgttgctgggcccctggcggagccaatctttcgcaggacgattctcagccatggacaagtgatgaaacagtcgtggccggaggaaccgtggtgctcaaatgtcaggtgaaagatcatgaggatagcagcctgcaatggtcaaaccctgcccagcaaactctctatttcggcgagaaaagggcattgcgcgacaaccgaattcagctagttacgtcaaccccacacgagctgtcgatctccatcagcaatgtggctctcgccgacgagggggaatatacttgctcaatcttcacaatgcccgtgcggaccgctaagagcctggtgaccgttctgggcatcccacagaaacctatcatcactggctacaagtcgtcactgcgggaaaaagatacggcgaccctgaattgtcagagtagcgggagcaaacctgccgcaagactgacttggaggaagggcgaccaagaacttcacggcgagcctacaaggatccaggaggacccaaacggaaagaccttcactgttagttcgtccgtaacctttcaggtgacacgcgaggacgacggagctagtattgtatgcagcgtgaatcacgagagtctgaaaggcgctgaccgcagtaccagccaaagaattgaagtcctctacacacctacagccatgatccggccagatccacctcatcccagggaaggccagaaattactcttgcactgcgaaggacggggaaaccccgtgcctcaacagtacttatgggaaaaggaaggatctgtgccgcctctgaagatgacccaagagtccgctttaatctttccatttctgaataaaagtgactctggaacttatggttgtacggcgacttcgaacatgggaagctacaaagcttattacacactcaacgtgaacgacccaagtccggtgccttcgtcctcctccacctatcacgctatcattggtggcatcgtggctttcattgttttccttctccttattatgctcatcttcttgggccactacctgatcagacacaaagggacctatctgactcacgaggccaagggatctgatgacgcgccagatgccgacacagccatcataaacgcagaagggggtcagagcggtggcgacgacaaaaaggagtattttatctag

SEQ ID NO: 44348 - DNA, 705 bp, Artificial Sequence
  derived and/or modified sequence
atgggagcaccagctgcgagtcttcttcttttactgctgctctttgcatgctgttgggcacccggaggagctaatctgtctcaggacgattctcagccatggacaagcgatgaaactgtcgtcgccggtggcaccgtggtcctgaagtgccaagtgaaagaccacgaggattcctcactgcagtggtcaaacccagcccagcagacactttatttcggtgagaaacgggcactgcgagataatcgcatccagttggtcacgtcgactccacacgagctcagcattagtatcagtaatgtggccctcgctgacgagggcgaatacacctgcagcatattcaccatgcctgtcaggaccgccaagtccctggtgacagtgctaggcattcctcagaaacccatcattacaggatacaagagctccctacgggagaaagacactgcaacactgaactgccagtcctcaggaagcaagcctgctgccagactcacctggaggaaaggagatcaagagctgcatggggagccgaccagaattcaagaagatccgaatgacacccctaccgcgatgatcaggccagacccacctcatcctagagagggacagaaactactgttacattgtgaaggcaggggtaatcccgttccacagcagtacctgtgggagaaagaaggatcagttccaccactcaaaatgacacagtag

SEQ ID NO: 44349 - DNA, 3745 bp, Artificial Sequence
  derived and/or modified sequence
agcgccggctccctcccggtccccacctcggccccgggctccgaagcggctcgggggcgccctttcggtcaacatcgtagtccaccccctccccatccccagcccccggggattcaggctcgccagcgcccagccagggagccggccgggaagcgcgatgggggccccagccgcctcgctcctgctcctgctcctgctgttcgcctgctgctgggcgcccggcggggccaacctctcccaggacgacagccagccctggacatctgatgaaacagtggtggctggtggcaccgtggtgctcaagtgccaagtgaaagatcacgaggactcatccctgcaatggtctaaccctgctcagcagactctctactttggggagaagagagcccttcgagataatcgaattcagctggttacctctacgccccacgagctcagcatcagcatcagcaatgtggccctggcagacgagggcgagtacacctgctcaatcttcactatgcctgtgcgaactgccaagtccctcgtcactgtgctaggaattccacagaagcccatcatcactggttataaatcttcattacgggaaaaagacacagccaccctaaactgtcagtcttctgggagcaagcctgcagcccggctcacctggagaaagggtgaccaagaactccacggagaaccaacccgcatacaggaagatcccaatggtaaaaccttcactgtcagcagctcggtgacattccaggttacccgggaggatgatggggcgagcatcgtgtgctctgtgaaccatgaatctctaaagggagctgacagatccacctctcaacgcattgaagttttatacacaccaactgcgatgattaggccagaccctccccatcctcgtgagggccagaagctgttgctacactgtgagggtcgcggcaatccagtcccccagcagtacctatgggagaaggagggcagtgtgccacccctgaagatgacccaggagagtgccctgatcttccctttcctcaacaagagtgacagtggcacctacggctgcacagccaccagcaacatgggcagctacaaggcctactacaccctcaatgttaatgaccccagtccggtgccctcctcctccagcacctaccacgccatcatcggtgggatcgtggctttcattgtcttcctgctgctcatcatgctcatcttccttggccactacttgatccggcacaaaggaacctacctgacacatgaggcaaaaggctccgacgatgctccagacgcggacacggccatcatcaatgcagaaggcgggcagtcaggaggggacgacaagaaggaatatttcatctagaggcgcctgcccacttcctgcgccccccaggggccctgtggggactgctggggccgtcaccaacccggacttgtacagagcaaccgcagggccgcccctcccgcttgctccccagcccacccacccccctgtacagaatgtctgctttgggtgcggttttgtactcggtttggaatggggagggaggagggcggggggaggggagggttgccctcagccctttccgtggcttctctgcatttgggttattattatttttgtaacaatcccaaatcaaatctgtctccaggctggagaggcaggagccctggggtgagaaaagcaaaaaacaaacaaaaaacaaaaccctggagtgttaggaggagagtgaaggtagaggggtgaggaagggtaaggggcagggctggtttcagctgggggctctcaccagccctcctttcagcctctacaacagagcagcttcccagacttctccaggaacccagaaacgggatggttgtcggcaaaggttgggagtggcttttcctctggtagccacacacctgagcactacggacagggaggcaggtgccaccttgacacctctcttccatagcaatgggaaagtgatgagtgcgggagtcctgaggagatgtggcctgcagacaacatgcagccatgcagggacccaggactgtaacctggggaggacgcgggtccctgcaaggaagagtagatttggagaggaaggatggaggtggactctcaccccattccccccggaaatgaacaaagccgggccctttccataggaactgcccttggagatagcagagtgtggctgcccctccttgctccagcagcagtgggagaggcactgctctggggcctgaactgcctctgcttccccccctgaggggcccctcactcttacccaagactctggattgttgcacggcaaccactcctcccatggcattgctcagcaactacttctcccttcccggccaccctgtgcccccttcctggtcccaacgccagcccttcatccttcctccctcagcagccaggcagacataacaacaaaactactaaaaggagcttcactgcagtgagctgtttcctgcccaaactaagggaataatgtgaactgtgtgcatgtgtgtggtgtgtatgcatgtgtgcatgtgtgtgtgtgtgtgtgcatgtgtgtgagtgagtgagaggcagagcgaggaactgaggaggagggctaagagccaggggtcctgggcaagtggacagggctgtgggacatgttggggaggctttgggaatggggtattcctagtcagggttcacacctcacctgggatgttgttccatgctggtatttcctctgccacccccaatgcccatcggtcttggagaaaggagtccccgggtgtgtgtttgcccagctgtccattctatctctcccttaaacacagagcattcagcccttccctggatttccctcctctgagccatggagtcagtgccacagcctttgctatgcacctctcaggcctctccttggcgttgaccctggaaagacctaccaccacctattttttcccatagtctgtacccagtgagttgaaggctgggtccccacccttccttttgatttcctgtcttccttctcgtggccccagctggttgctgtggagatgaggttcctggtcctccctgtcctggctggactgccccgcctcagatccaggatgcccttggcatcgctcccaccctcccccagcttttcctccctggtctgacaatgggcatgcaaaaaggggcagctgcaatctagcaggcctgcccacccccttcagttcaggtaatacagttgtgaatcttccagccgctggttagggccttgggcaccacaggcagcccctcacctaagccggggcctactcctcttacaacagcaagagagccctggggccccaggcctgttgagcttcttgtctcccagcacccgcttttgggaaaatgacttttcctcttcaagctgaaccactctgtccatattacacagaagccatatttgtacgggggggtgggagggagaggggctgttgtgctgtgtgtgtctgtccaggggtgggggggtgggggaagggagcagggaggggaccgtgtatctttataatctttctaactctcctgtgctaatctcagaggggtcaccctcaatatatctggattatccgtgtcattcagctgcctcctttctggtcctcttgctgctgctgggatgtgtgtatgtgagggtcttcttcccataccccttgcacctggtgcctggtgcctcaaaaggtggtgtgtcccttgccaggccactctcaagaatatctatgtacagcaacaatataactctacaaggga

SEQ ID NO: 44350 - DNA, 711 bp, Artificial Sequence
  derived and/or modified sequence
aagcgcgatgggggccccagccgcctcgctcctgctcctgctcctgctgttcgcctgctgctgggcgcccggcggggccaacctctcccaggacgacagccagccctggacatctgatgaaacagtggtggctggtggcaccgtggtgctcaagtgccaagtgaaagatcacgaggactcatccctgcaatggtctaaccctgctcagcagactctctactttggggagaagagagcccttcgagataatcgaattcagctggttacctctacgccccacgagctcagcatcagcatcagcaatgtggccctggcagacgagggcgagtacacctgctcaatcttcactatgcctgtgcgaactgccaagtccctcgtcactgtgctaggaattccacagaagcccatcatcactggttataaatcttcattacgggaaaaagacacagccaccctaaactgtcagtcttctgggagcaagcctgcagcccggctcacctggagaaagggtgaccaagaactccacggagaaccaacccgcatacaggaagatcccaatgacacaccaactgcgatgattaggccagaccctccccatcctcgtgagggccagaagctgttgctacactgtgagggtcgcggcaatccagtcccccagcagtacctatgggagaaggagggcagtgtgccacccctgaagatgacccagga

SEQ ID NO: 44351 - protein, 210 aa, Artificial Sequence
  derived and/or modified sequence
MAWGSKGIQGWENLAESSHLATTRESSPPESGTGSGSSRGSRLQEPQVSWKLRFQKREPLKNVFFILAERARDPSAKKRHMAMRNLGTMAYEAPDKVRKYKKIVLDLLVYGLYDPVNLEVIHESMKTLTVVLGKIQGKGLGSFFIDITLQTRTLLDDACKTTFQACSPYLKLKEEYSFQSEEDQRNTKLYQQLSHYHPEILQFFYANKIL

SEQ ID NO: 44352 - DNA, 633 bp, Artificial Sequence
  derived and/or modified sequence
atggcctgggggtcgaagggcatccaaggatgggaaaatctggccgagagcagccatttggccactactcgcgagtcgtctcctccagagtcaggcacaggtagcggctcttcccgagggtcacggctccaagagccccaggtaagttggaaattaagattccagaagcgcgaaccattgaaaaatgtatttttcatacttgctgaaagggcaagggacccatctgccaagaagaggcacatggccatgcggaatctgggcacaatggcttatgaggcgcccgacaaggtccgtaagtacaagaaaatagttctggatctgctcgtgtatggtctttatgatccggttaacctcgaggtgatccatgagtctatgaaaacccttaccgtggtcctggggaagattcagggcaagggcctgggttccttcttcattgatataactttgcaaacgcgaacactactggatgatgcctgtaagaccactttccaggcttgtagcccttatctcaagctcaaagaggaatactcttttcaaagcgaggaagatcagcgcaacacaaaactgtatcagcaactgtctcactaccacccggagatcctgcagttcttttacgcaaacaagatactgtag

SEQ ID NO: 44353 - DNA, 633 bp, Artificial Sequence
  derived and/or modified sequence
atggcctggggcagcaagggcatccagggctgggagaacctggccgagagcagccacctggccaccacccgggagagcagccccccagagagcggcactggaagtggcagcagccggggcagccggctgcaggagccccaggtgtcctggaagctgcgcttccagaagcgggagcccctgaagaatgtgttcttcatcctggccgagcgggcccgggaccccagcgccaagaagaggcacatggccatgaggaacctgggcaccatggcctatgaggccccagacaaggtgaggaagtacaagaagatcgtgctggacctgctggtgtatggcctgtatgaccctgtgaacctggaggtgatccacgagagcatgaagaccctgactgtggtgctgggcaagatccagggcaagggcctgggcagcttcttcatcgacatcaccctgcagaccaggaccctgctggatgatgcctgcaagaccaccttccaggcctgcagcccctacctgaagctgaaggaggagtacagcttccagagcgaggaggaccagaggaacaccaagctgtaccagcagctgagccactaccaccctgagatcctgcagttcttctacgccaacaagatcctgtag

SEQ ID NO: 44354 - DNA, 4998 bp, Artificial Sequence
  derived and/or modified sequence
aacgggccttggcagggaggttttgtttggtgcagaggaaaggtccccagaattgccatctgcagaatttctgcagaaagtgtcgaccaggctggcatgagggaagaaggaggggaaatcacagcaaggagaaggaaaaacacctcagcatggcgtggggaagcaaaggaattcagggctgggaaaatttagccgagtcatcacatttggctactacccgggaaagcagccctcccgagtcaggaacgggctccggttcatcacgtggcagccgcctgcaggagccgcaggtctcttggaaactgaggttccagaagcgggagcctctgaagaatgtgtttttcatcttggcagaaagagctcgggaccccagtgctaaaaagcgtcacatggcaatgagaaacttgggaaccatggcctatgaagcccctgacaaggtgagaaagtataagaaaattgtcctcgacctgctggtgtatggactgtatgaccctgtgaatttggaagtcatccatgagagtatgaagactctgaccgtcgttctgggcaagatccaggggaaaggtttgggttccttcttcatagatatcacccttcagaccaggactttattagatgacgcttgcaaaacaacatttcaagcctgttctccatatctgaaactaaaggaggaatacagcttccagagtgaagaagatcaaaggaacactaagctctaccagcagctgagccactatcatccagagatcctgcagttcttctacgcaaataaaattctgtaagcgcagagcagcagggaaatggttctgtatgagtgcattgctgagccatcatgttcccctgttttatctcactggatgcctcttctcactgcttgcctcttgggattgtaatgggaaagagggtgctgggagagcaatcaaaggcaaaaataatacatggaattgtatgattttatctaaagtaaaattctagactgctttcacttatttcatttcctccccatacaaatttgatgagcaggtacacactttctttaaaacattccaagtgtatatagattcagtgcttatttctcagctttttctttcttaagttcatctctgtcacctagcttttatttttaatactcaatttctgaggcttaggagaatacttgttaccttaagcgtttttttgtttttttgttgttgttgttttgtttttttttagtgtatttgctattgatactttgctattgatacctttacttgccaagatttatttaaagttggccaagataccaagaaggtggcttgcaggggcatctttggcttctcataattttaaacagtcattgctttcaagatcatgctaaacaagaattaatagagagaaaaaaatctataaagcatgtgttgaaaatcctcaggctcatgataacttacgggataacaatagtaggtaacaccgagtgcttacaattcagtgggcacggtcaaagtgctttttgtaagttctatttaatacttgcgacaaccctgagatagtaagtattattattgttctcattttatagatgagaaagctaacacatagggaaattaggtaactttccccagataactcagtaaacagtggagctggaattcaaacatgtacggtctgacttcttgagcccatactcaataatcatgccatcctgcctttccatggaataactgatggatggttagaaatgttaaaaacaaagcaaatgcaaacatctctgcttctgctcctctactaagcccagttaacttttgattttatatgtactaagtatacatttttattaatttatgtgagctgagtgtttttattaattactttttggctattaatgtcaattattttggtgatcaatcctagttatccaaggagtcacatcactcgtaaaaattacaagaaaaatctctaagtccctctcaccctccctctaaccagattgcatcccaagcttctatagaaactctggtaccacccctgaattcagtatccaggccacacccggagcgttttgttcaagacaatttaaaacacgggggattataaaagctatagctggatcttaagtggcattctgagaatgaggaactcaattttctgctgtagctcccagggacagggtggtgtgacacagatgcggggatgaggagagacctaggcgagatgaggatgtgggagatggcagacagagtggcaagtgccaggcaggaatggattttcttccttcctgttctgaatctgaagaacatgacagcaagagattttaggagggacacaggctcacgagcaaatgggtggttctgagctgtaagccccctgcccctccctagcacccactccccggatgctggcctctttgaaattttgttgcaaggttggtttaaacttgatgcagttccattaagtgatcagtgagtggtctgagaaatggctgcatgtggctggcattcaaaaaggtggggatagggtgagatgggtggggttacgtgctctggagtagaaaaacctatgcagttaatgtccctctgtcggttaaaattgtggaagatgcggttggattatttgactttaagattcaatggtaggcttttattttggtggcccccaatgagtcatgcctcctgatactcatgtctttatttagtcccttctgtttgaatctgggctgcctttgtgacttgctttaatcaggagattgtgataaatggcactgtgccgggcatagaaaccctggcagtttcctcgtttgaattgtgggggaagccagctgccacataaggagttgaactaccaggaacaaatgagagtgcctgagatcaccatgtgaaggagaacggagacacccaacccacagcagagtctgaggcccggacacatgacacaagttgtcccttccagccagacccgagctgttgaagctactccagctgacaccatacggaaaagagacgagcgtctccatcaagcctgtgtcagttgcagaagcatgaacaaagaatcaaatgattgttgttttaagtcattaacctttgggataatttgtcacactgcaataagtaaccagagaagattccttattattaactgttgtcttggctaattttgttttgctcttcataagtcctctttgagtttaaattctatttccagaaatttatgttatcatgaaatttggtggcaagagcaagggactatgtttttttgtttgtttgtttctgtttctcaccatacctaccacagagcctggccatgtgattaaggaacatttgctgaatgactaaatgattccaaattgtagagggaataaagtccaatgtccagtctgccatttcaggctttcaaccttcgttttcttctgttactctctttgcttcagacaagtttgggtcctttctcttctctcaacatgtcttgttctcctataccccctcacctttgctcagtctgctatttctgtgttgagtcccctccctgctcacctgtacacacccacctggaatcacatgcacacacacacacacacatttcacgtgtatctcttatctgtactccaatgcctaggtcaaagtcctgatccccccaatcaggggagagctcaagtctctgaattcccagaacattctagcaatattataccacttatatcttatctgaaaagtttttttttgtatatggctttatgtttttttttttatcctgttagattgaaactacagaaggcagggctgtatcttgtacatcattgtatctccccggtgactgcaaaagtactctgtaaatgaatgttgattagggggaaaaatgtcagaaagtcatctgaagctgtcattccttactgggaggagcccattttgacaaatgagggtcaccaatttcattccttataaccaatgtacaggttacttttatgcttgtgcatttcaagtttccccttccccacgtttatctgaatgccaacccaaaggtaatgttttgacatttcttaattttgaacattaattttgaaccttattgagcagttgaatgaaagaaagaaaaaaggaatgttcaagtgccccgaccctcatgctaagtgcccagggtagagctttgcttggtccctgtgtctctggtgctcatgagataggtctttctttctttatttttatttttgagatggagcctcactctgtcacccaggctggagtgcaatgacacgatctcggctcactgcaacctccacctcctgggttcaagcgattctcctgtctcagcctcctgagtagctgggattacaggtgcctgccaccatggctggctaatttttgtgtttttagtagagacggggtttcaccatgttggccaggctggtctcaaactcctgacctcaagtgatctgctcaccttggtctcccaaagtgctgggattacaggcgtgagccaccgctcctggctgagataggtctttcttaaaggggagagggaagtggtggagagagaggagagaaaatgacaaaggaggaggctgagaatctaacaggtgtgaccaattctgctactgaatgagagcagaagcctgtgaacttccagttaatagaccacttaattgggggaacgcttcacacgttataaaaaagcactagaatgttttgaaagcgagaaacaacagctgtgtagggtagctagcagttagtgttgtacagaagacagatatttgtgcatttctgcattttctaagtttgctgcaatgagcatgtattactttcatagttataaaacacatgcaaaatgcccttttaaaatgaaaaaaaagtccatgagtgtaagtgatatatatgctttggaaagcctgggacggtcattgtttactctcaatagtatgtgtttgcctttgtctttttgagacattttgttttaatctgttgatgacaataacctgttgataatataacttgataacaaataaaatgacttatgattgattatcatttt

SEQ ID NO: 44355 - DNA, 633 bp, Artificial Sequence
  derived and/or modified sequence
atggcctggggcagcaagggcatccagggctgggagaacctggccgagtctagtcacctggccacaacccgtgagtcatctccccctgagtcaggaaccggctccggcagcagccgcggaagtcggttgcaggaacctcaggtgtcttggaagctacggtttcaaaaaagagagcctctgaaaaatgtgttctttattctagcagagagggcacgtgacccaagcgccaaaaagagacacatggcaatgagaaatctcggaaccatggcatatgaggccccagacaaagtgcgcaagtacaaaaaaatcgtcctggacctgctcgtgtatggcctgtacgacccggtgaaccttgaagtcatccatgagtcaatgaagacccttactgtggtcctgggcaagatccaaggcaagggtcttgggtcattctttatcgacattactctccagacaaggacgctgcttgatgacgcatgcaaaactacatttcaggcgtgcagtccctatcttaagctaaaggaggagtacagcttccagtccgaggaagaccagcgtaacactaagctgtaccagcagctttcacattatcaccctgaaatcctccagttcttttatgccaataagattctatag

SEQ ID NO: 44356 - DNA, 633 bp, Artificial Sequence
  derived and/or modified sequence
atggcttggggttcgaaaggaatccagggctgggagaatttagcagagagctctcatctggctacaacacgggagtcaagcccacctgaatcagggaccgggagcgggtccagcaggggctcaaggctacaggagccgcaggtttcgtggaagcttcgttttcagaagcgcgagcctctaaaaaatgttttttttatcctagcggaacgggctagagacccctcagctaagaagcgccacatggccatgagaaacctcggtaccatggcctacgaggcccctgacaaggtccgtaagtataagaaaattgtgctggacttgcttgtatacgggctgtacgatccagtaaacttggaggtgatccacgagtccatgaagaccttaacagttgtgctgggcaaaatccaaggtaaggggttgggcagcttcttcatagacatcactcttcagactagaaccctgttggacgatgcgtgcaaaaccaccttccaggcgtgctccccctatctcaaattgaaggaagagtactccttccaatccgaggaggatcagaggaataccaagttgtatcaacagctctcccattatcaccctgagatcctccagtttttctacgccaacaaaatcctgtag

SEQ ID NO: 44357 - DNA, 633 bp, Artificial Sequence
  derived and/or modified sequence
atggcctggggcagcaagggcatccagggctgggagaacctggccgagagcagccacctggccaccaccagagagagcagcccccccgagagcggcaccggcagcggcagcagcagaggcagcagactgcaggagccccaggtgagctggaagctgagattccagaagagagagcccctgaagaacgtgttcttcatcctggccgagagagccagagaccccagcgccaagaagagacacatggccatgagaaacctgggcaccatggcctacgaggcccccgacaaggtgagaaagtacaagaagatcgtgctggacctgctggtgtacggcctgtacgaccccgtgaacctggaggtgatccacgagagcatgaagaccctgaccgtggtgctgggcaagatccagggcaagggcctgggcagcttcttcatcgacatcaccctgcagaccagaaccctgctggacgacgcctgcaagaccaccttccaggcctgcagcccctacctgaagctgaaggaggagtacagcttccagagcgaggaggaccagagaaacaccaagctgtaccagcagctgagccactaccaccccgagatcctgcagttcttctacgccaacaagatcctgtag

SEQ ID NO: 44358 - protein, 262 aa, Artificial Sequence
  derived and/or modified sequence
MAWGSKGIQGWENLAESSHLATTRESSPPESGTGSGSSRGSRLQEPQVSWKLRFQKREPLKNVFFILAERARDPSAKKRHMAMRNLGTMAYEAPDKVRKYKKIVLDLLVYGLYDPVNLEVIHESMKTLTVVLGKIQGKGLGSFFIDITLQTRTLLDDENDSLRYSAFVLFGQLAAFAGRKWKKFFTSQVKQTRDSLLIHLQDRNPQVAKACKTTFQACSPYLKLKEEYSFQSEEDQRNTKLYQQLSHYHPEILQFFYANKIL

SEQ ID NO: 44359 - DNA, 789 bp, Artificial Sequence
  derived and/or modified sequence
atggcatggggcagcaagggaatccagggatgggagaacctggccgagtcctctcacctggccaccacgcgggaatcctcacctccagagtcgggcactggctccggttcctcacgcggatcgaggctgcaggaaccacaggtctcatggaagctgcgctttcagaaacgggaaccgctcaaaaacgtgttttttattctcgcagaacgagcaagagacccatctgccaaaaaacgacacatggctatgcgcaaccttggtactatggcatacgaggcccccgacaaagtgaggaaatataaaaagatcgtgcttgacctgctggtgtatggcctgtatgacccagttaacctggaagtgattcatgagagtatgaaaacactgacggtggtcctgggaaaaatccagggcaagggattgggctccttcttcattgatatcacacttcaaaccagaaccctgctggacgacgagaacgactcccttcgatacagcgctttcgtcttgttcggacagctagccgcatttgccggcagaaagtggaagaaattctttacatctcaggtgaaacaaacccgtgacagtctactcatccacctccaggaccgcaacccgcaggtggctaaggcttgtaagaccactttccaggcatgtagcccatacttgaaactcaaggaggaatactcctttcagtcagaggaggatcagaggaatactaaactatatcagcagctaagccactaccaccctgagattttgcagtttttttacgctaataagatcctgtag

SEQ ID NO: 44360 - DNA, 789 bp, Artificial Sequence
  derived and/or modified sequence
atggcctggggcagcaagggcatccagggctgggagaacctggccgagagcagccacctggccaccacccgggagagcagccccccagagagcggcactggaagtggcagcagccggggcagccggctgcaggagccccaggtgtcctggaagctgcgcttccagaagcgggagcccctgaagaatgtgttcttcatcctggccgagcgggcccgggaccccagcgccaagaagaggcacatggccatgaggaacctgggcaccatggcctatgaggccccagacaaggtgaggaagtacaagaagatcgtgctggacctgctggtgtatggcctgtatgaccctgtgaacctggaggtgatccacgagagcatgaagaccctgactgtggtgctgggcaagatccagggcaagggcctgggcagcttcttcatcgacatcaccctgcagaccaggaccctgctggatgatgaaaatgacagcctgcgctacagcgcctttgtgctgtttggccagctggccgcctttgctggcaggaagtggaagaagttcttcaccagccaggtgaagcagacccgggacagcctgctgatccacctgcaggacaggaacccccaggtggccaaggcctgcaagaccaccttccaggcctgcagcccctacctgaagctgaaggaggagtacagcttccagagcgaggaggaccagaggaacaccaagctgtaccagcagctgagccactaccaccctgagatcctgcagttcttctacgccaacaagatcctgtag

SEQ ID NO: 44361 - DNA, 5154 bp, Artificial Sequence
  derived and/or modified sequence
aacgggccttggcagggaggttttgtttggtgcagaggaaaggtccccagaattgccatctgcagaatttctgcagaaagtgtcgaccaggctggcatgagggaagaaggaggggaaatcacagcaaggagaaggaaaaacacctcagcatggcgtggggaagcaaaggaattcagggctgggaaaatttagccgagtcatcacatttggctactacccgggaaagcagccctcccgagtcaggaacgggctccggttcatcacgtggcagccgcctgcaggagccgcaggtctcttggaaactgaggttccagaagcgggagcctctgaagaatgtgtttttcatcttggcagaaagagctcgggaccccagtgctaaaaagcgtcacatggcaatgagaaacttgggaaccatggcctatgaagcccctgacaaggtgagaaagtataagaaaattgtcctcgacctgctggtgtatggactgtatgaccctgtgaatttggaagtcatccatgagagtatgaagactctgaccgtcgttctgggcaagatccaggggaaaggtttgggttccttcttcatagatatcacccttcagaccaggactttattagatgacgagaacgacagtctgagatactcggcctttgttttgtttgggcaattggctgcctttgccgggaggaaatggaaaaaatttttcaccagtcaggttaagcagacacgagattccctcctgatccatttacaggacagaaatccccaggttgccaaggcttgcaaaacaacatttcaagcctgttctccatatctgaaactaaaggaggaatacagcttccagagtgaagaagatcaaaggaacactaagctctaccagcagctgagccactatcatccagagatcctgcagttcttctacgcaaataaaattctgtaagcgcagagcagcagggaaatggttctgtatgagtgcattgctgagccatcatgttcccctgttttatctcactggatgcctcttctcactgcttgcctcttgggattgtaatgggaaagagggtgctgggagagcaatcaaaggcaaaaataatacatggaattgtatgattttatctaaagtaaaattctagactgctttcacttatttcatttcctccccatacaaatttgatgagcaggtacacactttctttaaaacattccaagtgtatatagattcagtgcttatttctcagctttttctttcttaagttcatctctgtcacctagcttttatttttaatactcaatttctgaggcttaggagaatacttgttaccttaagcgtttttttgtttttttgttgttgttgttttgtttttttttagtgtatttgctattgatactttgctattgatacctttacttgccaagatttatttaaagttggccaagataccaagaaggtggcttgcaggggcatctttggcttctcataattttaaacagtcattgctttcaagatcatgctaaacaagaattaatagagagaaaaaaatctataaagcatgtgttgaaaatcctcaggctcatgataacttacgggataacaatagtaggtaacaccgagtgcttacaattcagtgggcacggtcaaagtgctttttgtaagttctatttaatacttgcgacaaccctgagatagtaagtattattattgttctcattttatagatgagaaagctaacacatagggaaattaggtaactttccccagataactcagtaaacagtggagctggaattcaaacatgtacggtctgacttcttgagcccatactcaataatcatgccatcctgcctttccatggaataactgatggatggttagaaatgttaaaaacaaagcaaatgcaaacatctctgcttctgctcctctactaagcccagttaacttttgattttatatgtactaagtatacatttttattaatttatgtgagctgagtgtttttattaattactttttggctattaatgtcaattattttggtgatcaatcctagttatccaaggagtcacatcactcgtaaaaattacaagaaaaatctctaagtccctctcaccctccctctaaccagattgcatcccaagcttctatagaaactctggtaccacccctgaattcagtatccaggccacacccggagcgttttgttcaagacaatttaaaacacgggggattataaaagctatagctggatcttaagtggcattctgagaatgaggaactcaattttctgctgtagctcccagggacagggtggtgtgacacagatgcggggatgaggagagacctaggcgagatgaggatgtgggagatggcagacagagtggcaagtgccaggcaggaatggattttcttccttcctgttctgaatctgaagaacatgacagcaagagattttaggagggacacaggctcacgagcaaatgggtggttctgagctgtaagccccctgcccctccctagcacccactccccggatgctggcctctttgaaattttgttgcaaggttggtttaaacttgatgcagttccattaagtgatcagtgagtggtctgagaaatggctgcatgtggctggcattcaaaaaggtggggatagggtgagatgggtggggttacgtgctctggagtagaaaaacctatgcagttaatgtccctctgtcggttaaaattgtggaagatgcggttggattatttgactttaagattcaatggtaggcttttattttggtggcccccaatgagtcatgcctcctgatactcatgtctttatttagtcccttctgtttgaatctgggctgcctttgtgacttgctttaatcaggagattgtgataaatggcactgtgccgggcatagaaaccctggcagtttcctcgtttgaattgtgggggaagccagctgccacataaggagttgaactaccaggaacaaatgagagtgcctgagatcaccatgtgaaggagaacggagacacccaacccacagcagagtctgaggcccggacacatgacacaagttgtcccttccagccagacccgagctgttgaagctactccagctgacaccatacggaaaagagacgagcgtctccatcaagcctgtgtcagttgcagaagcatgaacaaagaatcaaatgattgttgttttaagtcattaacctttgggataatttgtcacactgcaataagtaaccagagaagattccttattattaactgttgtcttggctaattttgttttgctcttcataagtcctctttgagtttaaattctatttccagaaatttatgttatcatgaaatttggtggcaagagcaagggactatgtttttttgtttgtttgtttctgtttctcaccatacctaccacagagcctggccatgtgattaaggaacatttgctgaatgactaaatgattccaaattgtagagggaataaagtccaatgtccagtctgccatttcaggctttcaaccttcgttttcttctgttactctctttgcttcagacaagtttgggtcctttctcttctctcaacatgtcttgttctcctataccccctcacctttgctcagtctgctatttctgtgttgagtcccctccctgctcacctgtacacacccacctggaatcacatgcacacacacacacacacatttcacgtgtatctcttatctgtactccaatgcctaggtcaaagtcctgatccccccaatcaggggagagctcaagtctctgaattcccagaacattctagcaatattataccacttatatcttatctgaaaagtttttttttgtatatggctttatgtttttttttttatcctgttagattgaaactacagaaggcagggctgtatcttgtacatcattgtatctccccggtgactgcaaaagtactctgtaaatgaatgttgattagggggaaaaatgtcagaaagtcatctgaagctgtcattccttactgggaggagcccattttgacaaatgagggtcaccaatttcattccttataaccaatgtacaggttacttttatgcttgtgcatttcaagtttccccttccccacgtttatctgaatgccaacccaaaggtaatgttttgacatttcttaattttgaacattaattttgaaccttattgagcagttgaatgaaagaaagaaaaaaggaatgttcaagtgccccgaccctcatgctaagtgcccagggtagagctttgcttggtccctgtgtctctggtgctcatgagataggtctttctttctttatttttatttttgagatggagcctcactctgtcacccaggctggagtgcaatgacacgatctcggctcactgcaacctccacctcctgggttcaagcgattctcctgtctcagcctcctgagtagctgggattacaggtgcctgccaccatggctggctaatttttgtgtttttagtagagacggggtttcaccatgttggccaggctggtctcaaactcctgacctcaagtgatctgctcaccttggtctcccaaagtgctgggattacaggcgtgagccaccgctcctggctgagataggtctttcttaaaggggagagggaagtggtggagagagaggagagaaaatgacaaaggaggaggctgagaatctaacaggtgtgaccaattctgctactgaatgagagcagaagcctgtgaacttccagttaatagaccacttaattgggggaacgcttcacacgttataaaaaagcactagaatgttttgaaagcgagaaacaacagctgtgtagggtagctagcagttagtgttgtacagaagacagatatttgtgcatttctgcattttctaagtttgctgcaatgagcatgtattactttcatagttataaaacacatgcaaaatgcccttttaaaatgaaaaaaaagtccatgagtgtaagtgatatatatgctttggaaagcctgggacggtcattgtttactctcaatagtatgtgtttgcctttgtctttttgagacattttgttttaatctgttgatgacaataacctgttgataatataacttgataacaaataaaatgacttatgattgattatcatttt

SEQ ID NO: 44362 - DNA, 789 bp, Artificial Sequence
  derived and/or modified sequence
atggcctggggcagcaagggcatccagggctgggagaacctggccgagagctcccatctggctactaccagggaatcctctccgcccgagtcaggaacaggatcaggctctagtcgtggatcccgtctgcaggagccacaggtttcttggaaactgcgctttcagaagagggagccgttgaaaaatgtcttttttattcttgccgagagagcccgcgatccctcagctaaaaagcgtcacatggctatgcgcaacctgggcacaatggcttacgaagcacccgataaggtgcgcaaatataagaagatcgtgcttgaccttctcgtgtatggcctgtacgatcctgtcaatctggaggttattcacgaatctatgaaaacactgactgtcgttctgggtaaaattcagggcaagggccttggatctttctttattgatatcactctgcagactcgaacattattggacgatgagaatgattccctgcggtacagcgctttcgtcctgtttgggcaattggcagctttcgccggccggaagtggaagaaattcttcacgagtcaggtaaagcagactcgcgactctctgctcatccacctgcaggaccgcaacccgcaggttgccaaagcttgcaagactacttttcaagcttgcagtccctacttgaagctcaaagaagaatacagtttccaatcagaagaggaccagcgtaatacgaagttataccagcagctgtcgcactatcaccccgagattctacaattcttttacgccaataaaatcctgtag

SEQ ID NO: 44363 - DNA, 789 bp, Artificial Sequence
  derived and/or modified sequence
atggcctggggatccaaaggtattcagggctgggaaaatctcgcagagtcctctcacctcgccactacccgggagtcatctccccctgaaagcgggactgggagcggaagctcaagaggtagccgattgcaagaaccccaggtctcttggaagctgaggttccagaagagggagcctctgaagaatgtgttcttcatattggccgagagagcacgggacccaagcgctaagaagaggcacatggccatgagaaacttaggcactatggcttatgaagccccagataaagtcaggaagtataagaagattgtcttggaccttctcgtttacggcctgtatgatcccgtgaatcttgaggtgattcacgaatctatgaagactctgactgtcgtgctcggcaagatccagggaaaggggctcggcagtttttttatagatatcaccctacagactcggacacttctcgacgacgaaaatgattccctcaggtatagcgcatttgttctgttcggtcaactcgctgcttttgctgggcgaaaatggaagaaattcttcacgtcccaggtcaaacagacgcgggattccctgctgatccacttacaggatagaaacccacaggttgctaaagcatgcaaaactaccttccaggcttgtagtccgtatcttaaactaaaagaggagtattctttccagtctgaagaggaccagagaaataccaaattatatcagcagctatcgcattatcacccagagatcctgcagttcttttacgcaaacaaaattctctag

SEQ ID NO: 44364 - DNA, 789 bp, Artificial Sequence
  derived and/or modified sequence
atggcctggggcagcaagggcatccagggctgggagaacctggccgagagcagccacctggccaccaccagagagagcagcccccccgagagcggcaccggcagcggcagcagcagaggcagcagactgcaggagccccaggtgagctggaagctgagattccagaagagagagcccctgaagaacgtgttcttcatcctggccgagagagccagagaccccagcgccaagaagagacacatggccatgagaaacctgggcaccatggcctacgaggcccccgacaaggtgagaaagtacaagaagatcgtgctggacctgctggtgtacggcctgtacgaccccgtgaacctggaggtgatccacgagagcatgaagaccctgaccgtggtgctgggcaagatccagggcaagggcctgggcagcttcttcatcgacatcaccctgcagaccagaaccctgctggacgacgagaacgacagcctgagatacagcgccttcgtgctgttcggccagctggccgccttcgccggcagaaagtggaagaagttcttcaccagccaggtgaagcagaccagagacagcctgctgatccacctgcaggacagaaacccccaggtggccaaggcctgcaagaccaccttccaggcctgcagcccctacctgaagctgaaggaggagtacagcttccagagcgaggaggaccagagaaacaccaagctgtaccagcagctgagccactaccaccccgagatcctgcagttcttctacgccaacaagatcctgtag

SEQ ID NO: 44365 - protein, 983 aa, Artificial Sequence
  derived and/or modified sequence
MRLGSGTFATCCVAIEVLGIAVFLRGFFPAPVRSSARAEHGAEPPAPEPSAGASSNWTTLPPPLFSKVVIVLIDALRDDFVFGSKGVKFMPYTTYLVEKGASHSFVAEAKPPTVTMPRIKALMTGSLPGFVDVIRNLNSPALLEDSVIRQAKAAGKRIVFYGDETWVKLFPKHFVEYDGTTSFFVSDYTEVDNNVTRHLDKVLKRGDWDILILHYLGLDHIGHISGPNSPLIGQKLSEMDSVLMKIHTSLQSKERETPLPNLLVLCGDHGMSETGSHGASSTEEVNTPLILISSAFERKPGDIRHPKHVQQTDVAATLAIALGLPIPKDSVGSLLFPVVEGRPMREQLRFLHLNTVQLSKLLQENVPSYEKDPGFEQFKMSERLHGNWIRLYLEEKHSEVLFNLGSKVLRQYLDALKTLSLSLSAQVAQYDIYSMMVGTVVVLEVLTLLLLSVPQALRRKAELEVPLSSPGFSLLFYLVILVLSAVHVIVCTSAESSCYFCGLSWLAAGGVMVLASALLCVIVSVLTNVLVGGNTPRKNPMHPSSRWSELDLLILLGTAGHVLSLGASSFVEEEHQTWYFLVNTLCLALSQETYRNYFLGDDGEPPCGLCVEQGHDGATAAWQDGPGCDVLERDKGHGSPSTSEVLRGREKWMVLASPWLILACCRLLRSLNQTGVQWAHRPDLGHWLTSSDHKAELSVLAALSLLVVFVLVQRGCSPVSKAALALGLLGVYCYRAAIGSVRFPWRPDSKDISKGIIEARFVYVFVLGILFTGTKDLLKSQVIAADFKLKTVGLWEIYSGLVLLAALLFRPHNLPVLAFSLLIQTLMTKFIWKPLRHDAAEITVMHYWFGQAFFYFQGNSNNIATVDISAGFVGLDTYVEIPAVLLTAFGTYAGPVLWASHLVHFLSSETRSGSALSHACFCYALICSIPVFTYIVLVTSLRYHLFIWSVFSPKLLYEGMHLLITAAVCVFFTAMDQTRLTQS

SEQ ID NO: 44366 - DNA, 2952 bp, Artificial Sequence
  derived and/or modified sequence
atgagactgggcagcggcaccttcgccacctgctgcgtggccatcgaggtgctgggcatcgccgtgttcctgagaggcttcttccccgcccccgtgagaagcagcgccagagccgagcacggcgccgagccccccgcccccgagcccagcgccggcgccagcagcaactggaccaccctgcccccccccctgttcagcaaggtggtgatcgtgctgatcgacgccctgagagacgacttcgtgttcggcagcaagggcgtgaagttcatgccctacaccacctacctggtggagaagggcgccagccacagcttcgtggccgaggccaagccccccaccgtgaccatgcccagaatcaaggccctgatgaccggcagcctgcccggcttcgtggacgtgatcagaaacctgaacagccccgccctgctggaggacagcgtgatcagacaggccaaggccgccggcaagagaatcgtgttctacggcgacgagacctgggtgaagctgttccccaagcacttcgtggagtacgacggcaccaccagcttcttcgtgagcgactacaccgaggtggacaacaacgtgaccagacacctggacaaggtgctgaagagaggcgactgggacatcctgatcctgcactacctgggcctggaccacatcggccacatcagcggccccaacagccccctgatcggccagaagctgagcgagatggacagcgtgctgatgaagatccacaccagcctgcagagcaaggagagagagacccccctgcccaacctgctggtgctgtgcggcgaccacggcatgagcgagaccggcagccacggcgccagcagcaccgaggaggtgaacacccccctgatcctgatcagcagcgccttcgagagaaagcccggcgacatcagacaccccaagcacgtgcagcagaccgacgtggccgccaccctggccatcgccctgggcctgcccatccccaaggacagcgtgggcagcctgctgttccccgtggtggagggcagacccatgagagagcagctgagattcctgcacctgaacaccgtgcagctgagcaagctgctgcaggagaacgtgcccagctacgagaaggaccccggcttcgagcagttcaagatgagcgagagactgcacggcaactggatcagactgtacctggaggagaagcacagcgaggtgctgttcaacctgggcagcaaggtgctgagacagtacctggacgccctgaagaccctgagcctgagcctgagcgcccaggtggcccagtacgacatctacagcatgatggtgggcaccgtggtggtgctggaggtgctgaccctgctgctgctgagcgtgccccaggccctgagaagaaaggccgagctggaggtgcccctgagcagccccggcttcagcctgctgttctacctggtgatcctggtgctgagcgccgtgcacgtgatcgtgtgcaccagcgccgagagcagctgctacttctgcggcctgagctggctggccgccggcggcgtgatggtgctggccagcgccctgctgtgcgtgatcgtgagcgtgctgaccaacgtgctggtgggcggcaacacccccagaaagaaccccatgcaccccagcagcagatggagcgagctggacctgctgatcctgctgggcaccgccggccacgtgctgagcctgggcgccagcagcttcgtggaggaggagcaccagacctggtacttcctggtgaacaccctgtgcctggccctgagccaggagacctacagaaactacttcctgggcgacgacggcgagcccccctgcggcctgtgcgtggagcagggccacgacggcgccaccgccgcctggcaggacggccccggctgcgacgtgctggagagagacaagggccacggcagccccagcaccagcgaggtgctgagaggcagagagaagtggatggtgctggccagcccctggctgatcctggcctgctgcagactgctgagaagcctgaaccagaccggcgtgcagtgggcccacagacccgacctgggccactggctgaccagcagcgaccacaaggccgagctgagcgtgctggccgccctgagcctgctggtggtgttcgtgctggtgcagagaggctgcagccccgtgagcaaggccgccctggccctgggcctgctgggcgtgtactgctacagagccgccatcggcagcgtgagattcccctggagacccgacagcaaggacatcagcaagggcatcatcgaggccagattcgtgtacgtgttcgtgctgggcatcctgttcaccggcaccaaggacctgctgaagagccaggtgatcgccgccgacttcaagctgaagaccgtgggcctgtgggagatctacagcggcctggtgctgctggccgccctgctgttcagaccccacaacctgcccgtgctggccttcagcctgctgatccagaccctgatgaccaagttcatctggaagcccctgagacacgacgccgccgagatcaccgtgatgcactactggttcggccaggccttcttctacttccagggcaacagcaacaacatcgccaccgtggacatcagcgccggcttcgtgggcctggacacctacgtggagatccccgccgtgctgctgaccgccttcggcacctacgccggccccgtgctgtgggccagccacctggtgcacttcctgagcagcgagaccagaagcggcagcgccctgagccacgcctgcttctgctacgccctgatctgcagcatccccgtgttcacctacatcgtgctggtgaccagcctgagataccacctgttcatctggagcgtgttcagccccaagctgctgtacgagggcatgcacctgctgatcaccgccgccgtgtgcgtgttcttcaccgccatggaccagaccagactgacccagagctag

SEQ ID NO: 44367 - DNA, 2952 bp, Artificial Sequence
  derived and/or modified sequence
atgagactaggctccggaacatttgctacctgctgtgtggccatcgaagttttaggtatcgccgtctttttgaggggcttcttcccagcgccagtccgaagttcagcacgcgcagagcacggggccgagcccccagctcccgagccgagcgcaggtgccagctccaactggactaccttacctccgccactcttctcaaaagtagtgatcgtattaatcgatgctcttcgagacgattttgttttcggctctaaaggggtcaagttcatgccttacaccacttacctagtcgagaaaggagcttcccattctttcgtcgcggaggccaaaccgcccaccgtgaccatgcctcggataaaggctctgatgaccggtagcctgcctgggtttgttgatgtgatcaggaacctcaatagtccggctctgctggaagatagcgtgatacggcaggcgaaagcagccggtaagcgtatcgtgttttacggagacgaaacttgggttaagctgtttccaaaacatttcgtcgagtatgatggaaccacgtccttctttgtctctgattacacagaagtggacaacaatgttacaagacatctagataaagttttaaagcggggcgactgggatatcctgattttacactatctgggtctggaccacattgggcacattagtggaccgaatagcccgctcatcgggcaaaagttaagtgagatggatagcgtgctgatgaaaatccatacaagcttgcaaagcaaggaaagggaaacgccactgccaaacctgctggtgctgtgtggggaccatggcatgtcagaaaccgggagtcacggcgcatcttctactgaggaggtaaacacccctctaattttgatttcttccgcctttgagaggaagccaggggacattcggcatccaaagcatgtgcagcagaccgatgtggccgcaacactagctatcgcactggggctccccatccccaaagattccgtgggttctctcttattccctgtggtggaaggcagaccaatgagagagcaactgaggtttctccacttgaacacggtacagctgtccaaactgcttcaagagaatgtgccgtcatacgagaaagatcctggatttgaacagttcaaaatgtccgagaggctgcacgggaattggattcgcctttatcttgaggaaaaacactcggaggttttattcaacctgggaagcaaggtgctgcggcagtacctggatgctctgaaaactctcagcttgtccttgtccgcccaggtcgctcaatatgacatatactctatgatggtcggaaccgtcgtcgttctggaggtcttaacactgctgttactatcggtgccccaagccctcagaaggaaggctgagttggaagtgccgttatcctctcctggctttagtctgctgttctatctcgtgattctagtgcttagtgccgtgcatgtgatagtttgtaccagcgcagagagctcttgttacttttgtggactgtcatggctagcagcaggtggggtcatggtcctggccagtgcccttctgtgcgtcatagttagcgtacttaccaatgtgctggtgggggggaataccccacgcaagaatcccatgcatccctcttccagatggtctgaattggatctcttgatcctcttgggaacagctggccatgtcctttccttgggggcctcctcctttgtggaagaggaacaccaaacctggtatttcctggtgaataccttgtgcctcgccctgtctcaggagacataccggaattacttcttgggggacgatggagaacctccttgcggcctgtgcgtggagcaaggacatgacggcgcaacggctgcttggcaggatggtccaggatgcgacgtgttggagcgggacaagggtcacggtagcccatcaacctctgaggtgctcagaggacgtgagaagtggatggtgctggcttccccttggttgattctggcatgttgccggcttctcaggtctttaaatcagacaggggttcagtgggcccacagacccgacctgggccactggctgacctcgtctgatcacaaggccgagctctcagtcctggccgctctttccctccttgtcgtctttgttctggtccagcgcggttgcagccccgtgtccaaggcagccctagctctaggccttctgggggtgtattgctacagggccgcaattggttcagttcgctttccgtggcgccccgatagcaaagacatcagcaaaggaattattgaggcaagattcgtctatgtctttgtactgggcatcttgttcactgggacaaaagatctcctgaagtctcaagtcatagctgccgactttaagctaaagaccgtcggcctctgggaaatctactctggtctggtgctcctggctgctctcctgttcaggccccacaacctgcctgtcctggccttttctctgttgatccaaacattgatgacaaaatttatttggaagccactgcggcacgacgccgccgaaatcacagtgatgcattactggtttggccaagcatttttctacttccaaggtaactcaaataatatcgcaacggtagacatctcagcaggttttgtgggactggacacctacgtggagataccagccgtcctcctgactgctttcggcacctacgcaggaccggttttatgggctagccacctggtccatttcctttcgtccgagacacgcagcggctccgccctatctcatgcctgcttttgctatgccctcatttgctccatcccggtgtttacctacatcgtgctggtgacatcgctgcgttatcacctctttatttggagcgtcttcagcccaaagttactctatgaagggatgcatctcctaatcactgcagctgtctgcgtgtttttcaccgcaatggatcaaactcgccttactcagagttag

SEQ ID NO: 44368 - DNA, 2952 bp, Artificial Sequence
  derived and/or modified sequence
atgaggctgggcagcggcacctttgccacctgctgcgtggccatcgaggtgctgggcattgctgtgttcctgcggggcttcttccctgcccctgtgcgcagcagcgcccgggcagagcacggggctgagcccccagcccctgagcccagcgctggggccagcagcaactggaccaccctgcccccacccctcttcagcaaggtggtgattgtgctgattgatgccctgagagatgactttgtgtttggcagcaaaggagtgaagttcatgccctacaccacctacctggtggagaagggggccagccacagctttgtggccgaggccaagcccccaacagtgaccatgccccgcatcaaggccctgatgacaggcagcctgcccggctttgtggatgtgatccggaacctgaacagccctgccctgctggaggacagcgtcatccggcaggccaaggccgccggcaagagaattgtgttctatggagatgagacctgggtgaagctgttccccaagcactttgtggagtatgatggcaccaccagcttctttgtgtctgactacacagaggtggacaacaacgtgaccaggcacctggacaaggtgctgaagagaggagactgggacatcctgatcctgcactacctgggcctggaccacatcggccacatcagcggccccaacagccccctcatcggccagaagctgtctgagatggattctgtgctgatgaagatccacaccagcctgcagagcaaggagcgggagacccccctgcccaacctgctggtgctgtgtggggaccacggcatgtctgagaccggcagccatggagccagcagcacagaggaggtgaacacccccctcatcctgatcagcagcgcctttgagaggaagccaggggacatccgccaccccaagcacgtgcagcagacagatgtggccgccaccctggccatcgccctgggcctgcccatccccaaggacagcgtgggcagcctgctcttccctgtggtggagggccggcccatgagggagcagctgcgcttcctgcacctgaacacagtgcagctgagcaagctgctgcaggagaatgtgcccagctatgagaaggaccccggctttgagcagttcaagatgtctgagcggctgcacggcaactggatccggctgtacctggaggagaagcacagcgaggtgctcttcaacctgggcagcaaggtgctgcggcagtacctggatgccctgaagaccctgagcctgagcctgagcgcccaggtggcccagtatgacatctacagcatgatggtgggcaccgtggtggtgctggaggtgctgaccctgctgctgctgtctgtgccccaggccctgcggaggaaggccgagctggaggtgcccctgagcagccctggcttcagcctgctcttctacctggtgatcctggtgctgtctgctgtgcacgtgattgtgtgcaccagcgctgagagcagctgctacttctgtggcctgtcctggctggccgccggcggcgtgatggtgctggccagcgccctgctgtgtgtgattgtgtctgtgctgaccaacgtgctggtgggcggcaacacccccaggaagaaccccatgcaccccagcagccgctggagcgagctggacctgctgatcctgctgggcacagctggccacgtgctgagcctgggcgccagcagctttgtggaggaggagcaccagacctggtacttcctggtgaacaccctgtgcctggccctgagccaggagacctacagaaactacttcctgggagatgatggagagcccccctgtggcctgtgtgtggagcagggccatgatggagccacagctgcctggcaggacggccctggctgtgatgtgctggagcgggacaagggccacggcagccccagcaccagcgaggtgctgcggggccgggagaagtggatggtgctggccagcccctggctgatcctggcctgctgccgcctgctgcggagcctgaaccagacaggagtgcagtgggcccacaggccagacctgggccactggctgaccagcagtgaccacaaggccgagctgtctgtgctggccgccctgagcctgctggtggtgtttgtgctggtgcagaggggctgcagccctgtgtccaaggccgccctggccctgggcctgctgggcgtgtactgctaccgggccgccatcggctctgtgcgcttcccctggaggccagacagcaaggacatcagcaagggcatcatcgaggccaggtttgtgtatgtgtttgtgctgggcatcctcttcaccggcaccaaggacctgctgaagagccaggtgattgctgctgacttcaagctgaagacagtgggcctgtgggagatctacagcggcctggtgctgctggccgccctgctcttccggccccacaacctgcctgtgctggccttcagcctgctgatccagaccctgatgaccaagttcatctggaagcccctgcggcatgatgctgctgagatcaccgtgatgcactactggtttggccaggccttcttctacttccagggcaacagcaacaacatcgccaccgtggacatctctgctggctttgtgggcctggacacctacgtggagatcccagctgtgctgctgacagccttcggcacctacgccggccctgtgctgtgggccagccacctggtgcacttcctgagcagcgagaccaggagcggcagcgccctgagccacgcctgcttctgctacgccctgatctgcagcatccctgtgttcacctacatcgtgctggtgaccagcctgcgctaccacctgttcatctggagcgtcttcagccccaagctgctgtatgagggcatgcacctgctgatcacagctgctgtgtgtgtgttcttcaccgccatggaccagacccggctgacccagagctag

SEQ ID NO: 44369 - DNA, 2952 bp, Artificial Sequence
  derived and/or modified sequence
atgcggctgggcagcggcaccttcgccacctgctgcgtggccatcgaagtgcttggtatcgcagtgtttctgcgagggttcttcccggcaccagttcgcagttctgcaagagcagagcacggggccgaaccacccgcacctgagccctctgcaggggcctcatcaaattggaccacactgcctccgcccttgttctcgaaggtggtgatcgttctcatcgacgcattacgcgatgacttcgtatttggctccaagggtgtcaaattcatgccctataccacgtatcttgtggaaaagggggccagtcactctttcgtggcagaggccaagccccccacagtcacaatgcctcggatcaaagccctgatgaccgggtctctcccgggattcgtggatgtgattagaaatctgaactccccggctctgctcgaagattcggtgatccgacaggcgaaagctgctggtaagaggattgtgttctatggcgacgagacatgggtgaaactgttcccgaaacatttcgttgagtacgacggtacgacaagcttttttgtgagtgattacacagaggttgataacaacgttactcggcacttggacaaggtccttaagcgcggtgattgggacatacttatccttcactatttgggcctcgaccacattgggcacatctcagggccaaactcccccttaatcgggcagaagctttctgaaatggattctgttctcatgaagattcatacaagtctgcagtccaaggagcgagagaccccccttccaaatcttttggtgctatgcggcgatcatggtatgagcgagacgggcagccatggtgcttcttctacagaagaggtgaatactcccttgatactgatctcatccgcctttgagcgtaagcccggggatatccggcacccaaaacatgttcagcagacagatgtggccgcgaccctggctatcgcacttgggctccctattccgaaagactcggtaggatctcttctattccctgtcgtggaagggaggcctatgagagagcaacttcggtttctgcatttaaatactgtacagttaagcaagctgctgcaggagaacgtccccagctacgagaaggaccccggcttcgagcagtttaaaatgagcgagcgcttgcatggaaactggatacggctgtatctggaggagaaacatagtgaggtgttattcaaccttgggagcaaagtgctacggcagtatttggatgcactgaagaccctgtcactgagccttagcgcccaggtcgcccagtacgatatatacagcatgatggttggcaccgttgtcgtgctcgaggtgctgaccctgttgcttctctccgtcccccaagccttgcggcggaaggcggagctcgaggtgcccctgtcatccccgggcttttcattattgttctaccttgtgattctggtactctcggctgtgcatgttattgtgtgtacctcggccgaatccagttgctatttttgcggcttaagttggctcgctgcaggcggcgtaatggtcttggcatctgccttattgtgcgtaatcgtgagtgtgttgacaaatgttttggtcggcggcaacaccccccgtaagaacccgatgcatcccagcagccgctggtctgagttggacttactgattctcctagggacagcagggcatgtcctctccctcggagcttccagctttgtagaggaggaacatcaaacatggtacttcttggtgaatactctgtgtctggccttgagtcaagagacctacagaaattacttcctcggcgatgacggggagccaccatgtggactgtgcgtggagcaggggcatgacggcgccaccgccgcctggcaagacgggccagggtgcgacgttttagagcgggacaaaggccacgggtccccatctacaagtgaagttctcagagggcgggagaagtggatggtcttggcttcaccttggcttattttagcatgctgcagactgctgcggagccttaaccagacaggcgttcaatgggctcacagaccagatctcgggcactggctgacaagttccgatcacaaggccgagctgtccgtgctggctgctctctccctcctggttgtatttgtcctagtgcagaggggctgttcccccgtctcaaaagccgctctggcactgggtctgcttggcgtttactgttatcgcgccgcaatcggctccgtgcgattcccctggcggccagactcaaaggatattagtaaggggatcatagaggctcggttcgtgtacgtcttcgtactggggatcctgttcacgggaacaaaggacctgctgaagtcccaggtcattgccgccgatttcaagctcaaaaccgttggactttgggaaatctactctggtctggtgcttctcgccgcccttttgtttaggccccataatctgccagtattggccttctctttactcatccagactctgatgacgaaattcatctggaagcccctgcgccatgatgccgctgaaatcaccgtgatgcactactggttcggtcaagcattcttttactttcaaggtaattcaaacaatattgctaccgtggatattagcgcaggctttgtcggactggacacctatgtcgagatcccagcagtgcttcttactgctttcggcacctacgctggccctgtgttgtgggcctctcatctggtccattttttgtcttctgagactaggagcgggtccgctctcagtcacgcttgcttttgttatgccttaatttgctccatcccagttttcacctatattgttcttgtaaccagtctgaggtaccatctgtttatttggtctgtgtttagtcctaagctgctgtacgaggggatgcacctcctgatcactgcggcagtctgcgtattcttcacagcaatggatcagactagattgacccaatcgtag

SEQ ID NO: 44370 - DNA, 3029 bp, Artificial Sequence
  derived and/or modified sequence
acgtgacgccactgtcgctgcgacgataaggcctggcgttattgcttagaggcggctacctggagccggaagcgcggctgcagcagggcgaggctccaggtggggtcggttccgcatccagcctagcgtgtccacgatgcggctgggctccgggactttcgctacctgttgcgtagcgatcgaggtgctagggatcgcggtcttccttcggggattcttcccggctcccgttcgttcctctgccagagcggaacacggagcggagcccccagcgcccgaaccctcggctggagccagttctaactggaccacgctgccaccacctctcttcagtaaagttgttattgttctgatagatgccttgagagatgattttgtgtttgggtcaaagggtgtgaaatttatgccctacacaacttaccttgtggaaaaaggagcatctcacagttttgtggctgaagcaaagccacctacagttactatgcctcgaatcaaggcattgatgacggggagccttcctggctttgtcgacgtcatcaggaacctcaattctcctgcactgctggaagacagtgtgataagacaagcaaaagcagctggaaaaagaatagtcttttatggagatgaaacctgggttaaattattcccaaagcattttgtggaatatgatggaacaacctcatttttcgtgtcagattacacagaggtggataataatgtcacgaggcatttggataaagtattaaaaagaggagattgggacatattaatcctccactacctggggctggaccacattggccacatttcagggcccaacagccccctgattgggcagaagctgagcgagatggacagcgtgctgatgaagatccacacctcactgcagtcgaaggagagagagacgcctttacccaatttgctggttctttgtggtgaccatggcatgtctgaaacaggaagtcacggggcctcctccaccgaggaggtgaatacacctctgattttaatcagttctgcgtttgaaaggaaacccggtgatatccgacatccaaagcacgtccaacagacggatgtggctgcgacactggcgatagcacttggcttaccgattccaaaagacagtgtagggagcctcctattcccagttgtggaaggaagaccaatgagagagcagttgagatttttacatttgaatacagtgcagcttagtaaactgttgcaagagaatgtgccgtcatatgaaaaaggttctcaccctgctcctgctcagcgtcccacaggcactgcgcagaaaggctgagctggaagtcccactgtcatctcctgggttttctctgctcttttatttggtgatcctggttctttcggccgttcacgtcattgtgtgcacctcagctgaaagttcgtgctacttctgtggcctctcgtggctggcggcaggtggggtgatggtgctggcctcggcgctgctgtgtgtgattgtgtctgttctgaccaacgtgctcgtgggtggaaacaccccaaggaagaaccccatgcatcccagctcaaggtggtcagagctagaccttcttattctgttggggacggcgggccacgtcttgagcctgggcgccagcagcttcgtggaggaggagcaccagacctggtacttccttgtgaacaccctgtgtctagctctgagccaagaaacctacagaaactactttctgggagatgacggtgagcctccgtgtggcctctgtgtggaacaagggcatgacggggccacagcagcgtggcaggacgggcctggctgtgatgtcctggagcgagacaaaggccacggaagcccctctacctccgaagtgctcagaggccgcgagaagtggatggtgctggccagtccgtggctaatactggcctgctgccggctgctgcgctccctaaaccagacaggtgtgcagtgggctcaccggcctgacctcggccactggctcaccagctctgaccacaaagccgagctctctgtcctggctgccctctccctcctcgtagtttttgtgctggtgcagagggggtgctcccctgtgtccaaggctgccctggcgctggggctgctgggcgtctactgctaccgggcggccatcgggagtgtccggttcccgtggcggccggacagcaaggacatttccaagggtattattgaagctcgttttgtttatgtctttgtccttggcattctgttcacgggcaccaaagacttacttaaatctcaagtcattgctgcagacttcaaactcaagactgtaggtttatgggagatatatagtggattagttcttctggcagccttgctctttagaccacataatcttccggtcttagcatttagcctcttgattcagactctaatgactaaattcatctggaagcccctgagacacgatgcagctgagattactgtgatgcattattggtttggtcaagcattcttctattttcagggcaactccaacaacattgccaccgtggacatctccgcaggcttcgtgggcttagacacctacgtggaaatcccagccgtgctcctgacagcgtttgggacgtacgcagggcctgtgctgtgggccagccacttagtgcacttcctgagctcagaaacacgcagtggttcagcactgagtcatgcttgcttctgctacgcactgatttgttctattccagttttcacgtacatcgttttggtgacatctctgcgttatcatttatttatatggagtgtattttctccaaaacttctctacgagggaatgcacctgctcattacagctgctgtctgtgtattcttcacggcaatggatcaaaccagactcacacagtcttagactaagctgaacactggaaaaataatacatgcttaaagtctgctgttattctaaaatgaaagatatgaattcaacaaagttgatggataactttctttgactgctctacctgaatttagactaagcagtaaatagtttaataaaagatcactttaatat

SEQ ID NO: 44371 - DNA, 3218 bp, Artificial Sequence
  derived and/or modified sequence
gcctggcgttattgcttagaggcggctacctggagccggaagcgcggctgcagcagggcgaggctccaggtggggtcggttccgcatccagcctagcgtgtccacgatgcggctgggctccgggactttcgctacctgttgcgtagcgatcgaggtgctagggatcgcggtcttccttcggggattcttcccggctcccgttcgttcctctgccagagcggaacacggagcggagcccccagcgcccgaaccctcggctggagccagttctaactggaccacgctgccaccacctctcttcagtaaagttgttattgttctgatagatgccttgagagatgattttgtgtttgggtcaaagggtgtgaaatttatgccctacacaacttaccttgtggaaaaaggagcatctcacagttttgtggctgaagcaaagccacctacagttactatgcctcgaatcaaggcattgatgacggggagccttcctggctttgtcgacgtcatcaggaacctcaattctcctgcactgctggaagacagtgtgataagacaagcaaaagcagctggaaaaagaatagtcttttatggagatgaaacctgggttaaattattcccaaagcattttgtggaatatgatggaacaacctcatttttcgtgtcagattacacagaggtggataataatgtcacgaggcatttggataaagtattaaaaagaggagattgggacatattaatcctccactacctggggctggaccacattggccacatttcagggcccaacagccccctgattgggcagaagctgagcgagatggacagcgtgctgatgaagatccacacctcactgcagtcgaaggagagagagacgcctttacccaatttgctggttctttgtggtgaccatggcatgtctgaaacaggaagtcacggggcctcctccaccgaggaggtgaatacacctctgattttaatcagttctgcgtttgaaaggaaacccggtgatatccgacatccaaagcacgtccaacagacggatgtggctgcgacactggcgatagcacttggcttaccgattccaaaagacagtgtagggagcctcctattcccagttgtggaaggaagaccaatgagagagcagttgagatttttacatttgaatacagtgcagcttagtaaactgttgcaagagaatgtgccgtcatatgaaaaagatcctgggtttgagcagtttaaaatgtcagaaagattgcatgggaactggatcagactgtacttggaggaaaagcattcagaagtcctattcaacctgggctccaaggttctcaggcagtacctggatgctctgaagacgctgagcttgtccctgagtgcacaagtggcccagtacgacatctattcgatgatggtggggactgtcgtggttttggaggttctcaccctgctcctgctcagcgtcccacaggcactgcgcagaaaggctgagctggaagtcccactgtcatctcctgggttttctctgctcttttatttggtgatcctggttctttcggccgttcacgtcattgtgtgcacctcagctgaaagttcgtgctacttctgtggcctctcgtggctggcggcaggtggggtgatggtgctggcctcggcgctgctgtgtgtgattgtgtctgttctgaccaacgtgctcgtgggtggaaacaccccaaggaagaaccccatgcatcccagctcaaggtggtcagagctagaccttcttattctgttggggacggcgggccacgtcttgagcctgggcgccagcagcttcgtggaggaggagcaccagacctggtacttccttgtgaacaccctgtgtctagctctgagccaagaaacctacagaaactactttctgggagatgacggtgagcctccgtgtggcctctgtgtggaacaagggcatgacggggccacagcagcgtggcaggacgggcctggctgtgatgtcctggagcgagacaaaggccacggaagcccctctacctccgaagtgctcagaggccgcgagaagtggatggtgctggccagtccgtggctaatactggcctgctgccggctgctgcgctccctaaaccagacaggtgtgcagtgggctcaccggcctgacctcggccactggctcaccagctctgaccacaaagccgagctctctgtcctggctgccctctccctcctcgtagtttttgtgctggtgcagagggggtgctcccctgtgtccaaggctgccctggcgctggggctgctgggcgtctactgctaccgggcggccatcgggagtgtccggttcccgtggcggccggacagcaaggacatttccaagggtattattgaagctcgttttgtttatgtctttgtccttggcattctgttcacgggcaccaaagacttacttaaatctcaagtcattgctgcagacttcaaactcaagactgtaggtttatgggagatatatagtggattagttcttctggcagccttgctctttagaccacataatcttccggtcttagcatttagcctcttgattcagactctaatgactaaattcatctggaagcccctgagacacgatgcagctgagattactgtgatgcattattggtttggtcaagcattcttctattttcagggcaactccaacaacattgccaccgtggacatctccgcaggcttcgtgggcttagacacctacgtggaaatcccagccgtgctcctgacagcgtttgggacgtacgcagggcctgtgctgtgggccagccacttagtgcacttcctgagctcagaaacacgcagtggttcagcactgagtcatgcttgcttctgctacgcactgatttgttctattccagttttcacgtacatcgttttggtgacatctctgcgttatcatttatttatatggagtgtattttctccaaaacttctctacgagggaatgcacctgctcattacagctgctgtctgtgtattcttcacggcaatggatcaaaccagactcacacagtcttagactaagctgaacactggaaaaataatacatgcttaaagtctgctgttattctaaaatgaaagatatgaattcaacaaagttgatggataactttctttgactgctctacctgaatttagactaagcagtaaatagtttaataaaagatcactttaatata

SEQ ID NO: 44372 - DNA, 2007 bp, Artificial Sequence
  derived and/or modified sequence
ccgtcatatgaaaaagatcctgggtttgagcagtttaaaatgtcagaaagattgcatgggaactggatcagactgtacttggaggaaaagcattcagaagtcctattcaacctgggctccaaggttctcaggcagtacctggatgctctgaagacgctgagcttgtccctgagtgcacaagtggcccagtacgacatctattcgatgatggtggggactgtcgtggttttggaggttctcaccctgctcctgctcagcgtcccacaggcactgcgcagaaaggctgagctggaagtcccactgtcatctcctgggttttctctgctcttttatttggtgatcctggttctttcggccgttcacgtcattgtgtgcacctcagctgaaagttcgtgctacttctgtggcctctcgtggctggcggcaggtggggtgatggtgctggcctcggcgctgctgtgtgtgattgtgtctgttctgaccaacgtgctcgtgggtggaaacaccccaaggaagaaccccatgcatcccagctcaaggtggtcagagctagaccttcttattctgttggggacggcgggccacgtcttgagcctgggcgccagcagcttcgtggaggaggagcaccagacctggtacttccttgtgaacaccctgtgtctagctctgagccaagaaacctacagaaactactttctgggagatgacggtgagcctccgtgtggcctctgtgtggaacaagggcatgacggggccacagcagcgtggcaggacgggcctggctgtgatgtcctggagcgagacaaaggccacggaagcccctctacctccgaagtgctcagaggccgcgagaagtggatggtgctggccagtccgtggctaatactggcctgctgccggctgctgcgctccctaaaccagacaggtgtgcagtgggctcaccggcctgacctcggccactggctcaccagctctgaccacaaagccgagctctctgtcctggctgccctctccctcctcgtagtttttgtgctggtgcagagggggtgctcccctgtgtccaaggctgccctggcgctggggctgctgggcgtctactgctaccgggcggccatcgggagtgtccggttcccgtggcggccggacagcaaggacatttccaagggtattattgaagctcgttttgtttatgtctttgtccttggcattctgttcacgggcaccaaagacttacttaaatctcaagtcattgctgcagacttcaaactcaagactgtaggtttatgggagatatatagtggattagttcttctggcagccttgctctttagaccacataatcttccggtcttagcatttagcctcttgattcagactctaatgactaaattcatctggaagcccctgagacacgatgcagctgagattactgtgatgcattattggtttggtcaagcattcttctattttcagggcaactccaacaacattgccaccgtggacatctccgcaggcttcgtgggcttagacacctacgtggaaatcccagccgtgctcctgacagcgtttgggacgtacgcagggcctgtgctgtgggccagccacttagtgcacttcctgagctcagaaacacgcagtggttcagcactgagtcatgcttgcttctgctacgcactgatttgttctattccagttttcacgtacatcgttttggtgacatctctgcgttatcatttatttatatggagtgtattttctccaaaacttctctacgagggaatgcacctgctcattacagctgctgtctgtgtattcttcacgtggatcaaaccagactcacacagtcttagactaagctgaacactggaaaaataatacatgcttaaagtctgctgttattctaaaatgaaagatatgaattcaacaaagttgatggataactttctttgactgctctacctgaatttagactaagcagtaaatagtttaataaaagatcactttaat

SEQ ID NO: 44373 - DNA, 2952 bp, Artificial Sequence
  derived and/or modified sequence
atgcggcttgggagtgggaccttcgctacctgctgtgtggccatcgaagtgttgggaattgcagtgttcttgaggggtttctttcctgctcccgtaaggtcgtcagccagagctgaacacggagccgagccccctgcgccagagcctagtgcaggtgcctcgtctaattggacaacgctgccacctccactattctcgaaggtggtaattgtgcttatcgacgcactgcgcgatgatttcgtctttggcagcaagggtgtcaagttcatgccatacaccacctatctcgtggagaagggagcttcgcacagcttcgttgctgaggcgaagcccccaacagtgacgatgccacgtatcaaagcgctgatgacaggcagcctgcctggctttgttgacgttatccgtaacttgaactctccagcactgctggaggatagtgtgatccggcaggccaaagcggcaggcaaacgcattgttttttacggtgatgaaacctgggtgaagctgttcccaaagcacttcgttgagtatgacggcaccacgagcttttttgtcagcgattacacggaagttgataacaacgtgacaagacacctggataaagtgcttaaaagaggcgactgggacatcctaatcctgcattatctggggttggaccacataggccacatctctgggccaaattcccccctaattgggcaaaaactgtccgagatggacagcgtgctgatgaagatccatacaagtctgcagagtaaggagcgcgaaaccccgcttccaaacctcctcgtgctgtgcggtgatcacggaatgagcgagaccgggagtcatggcgcttcctcgaccgaagaggttaatacaccccttatacttatatctagcgcttttgagcgcaaaccaggagacataagacatcccaagcatgtgcagcagacggacgtggccgctactctggcaattgcactgggcctccctatccctaaagactcagtgggaagtttactattcccggtggtggagggtcgtcccatgcgggaacaactccgctttctccacctgaataccgttcagctgtccaaacttctgcaggaaaatgtgccttcttacgaaaaagatccagggttcgagcagttcaagatgtccgagagactgcacggtaactggataaggctataccttgaggagaaacacagtgaagtgctctttaatctcggttcgaaagtactccggcaatatctggatgccctcaagaccctgagcctgtcgctctctgctcaagtggcccaatatgacatatactcgatgatggttggaacggtggtggtgctggaggtactcaccctactgctcttatccgtgccacaggccctgaggcgcaaggccgaactggaagtgccacttagttcaccagggttttcactgctgttttacctggtgatcctggttctgtctgcagtacacgttattgtgtgcacttctgctgagtcttcctgctacttctgcggactgagctggttggcagccggaggcgtgatggtcctggcctctgcactgctgtgcgtcatcgtcagcgtgctgacaaatgtcctagtgggcggaaatacgccccgtaagaatcccatgcatcccagctctcgctggtccgagctcgaccttttgattttactcggtactgcaggtcacgttctgagtcttggcgcaagctcatttgtcgaggaagaacaccagacctggtatttcctcgtcaacactttatgcttggccttgtcacaagagacctatcgcaattactttctaggagatgacggggaacccccttgtggcctatgcgtggagcagggccatgatggagctactgccgcttggcaggatggaccaggctgtgatgtgctggagagggataaaggtcacgggagtccatcaacatccgaggtccttagaggcagggaaaaatggatggtgctggcttccccttggctcattctcgcttgctgccgcttactgagaagcctaaatcagaccggcgtccagtgggctcatcgcccagatctaggccactggttgaccagctctgaccataaggcggaactctccgttctggctgctctgtccctcctggttgtttttgtgctagtccagcgaggatgttcccccgttagtaaggcagctctcgccctagggctcctgggggtgtattgctacagagccgctataggttcagtgagatttccttggcgtcctgactcaaaggacataagcaaaggtatcattgaggcacgctttgtatacgtcttcgtcctggggatcctctttacaggcacaaaggacttgttgaaaagccaggtcattgccgcagactttaagctaaaaacggttggcctgtgggagatctactccgggctcgtgcttttagcggcactgttattccgtccacacaacttgccagtgctggctttctctctgttaattcagaccctgatgacgaaatttatttggaagcctctgaggcatgatgcggctgagattacggtcatgcattattggtttggtcaggccttcttttacttccagggcaacagtaataacattgctacagtggacatctctgccggtttcgtgggcttggacacttacgtcgagattccggctgttctcctgacagcgttcggaacttacgctggccctgttttgtgggcatcacatctagttcacttcttatcctccgaaacccgaagcgggtctgcactttcacatgcgtgcttctgctatgccttgatctgtagtatccctgtattcacttatatcgtgcttgttacaagcctcaggtatcacctctttatttggagtgtcttttcacctaagctgctgtatgaagggatgcacctccttataaccgccgcagtgtgtgtgttttttactgctatggatcagacccgccttacccaatcctag

SEQ ID NO: 44374 - protein, 1202 aa, Artificial Sequence
  derived and/or modified sequence
ALLQKGDHVWMDLRLGQEFDVPIGAVVKLCDSGQVQVVDDEDNEHWISPQNATHIKPMHPTSVHGVEDMIRLGDLNEAGILRNLLIRYRDHLIYTYTGSILVAVNPYQLLSIYSPEHIRQYTNKKIGEMPPHIFAIADNCYFNMKRNSRDQCCIISGESGAGKTESTKLILQFLAAISGQHSWIEQQVLEATPILEAFGNAKTIRNDNSSRFGKYIDIHFNKRGAIEGAKIEQYLLEKSRVCRQALDERNYHVFYCMLEGMSEDQKKKLGLGQASDYNYLAMGNCITCEGRVDSQEYANIRSAMKVLMFTDTENWEISKLLAAILHLGNLQYEARTFENLDACEVLFSPSLATAASLLEVNPPDLMSCLTSRTLITRGETVSTPLSREQALDVRDAFVKGIYGRLFVWIVDKINAAIYKPPSQDVKNSRRSIGLLDIFGFENFAVNSFEQLCINFANEHLQQFFVRHVFKLEQEEYDLESIDWLHIEFTDNQDALDMIANKPMNIISLIDEESKFPKGTDTTMLHKLNSQHKLNANYIPPKNNHETQFGINHFAGIVYYETQGFLEKNRDTLHGDIIQLVHSSRNKFIKQIFQADVAMGAETRKRSPTLSSQFKRSLELLMRTLGACQPFFVRCIKPNEFKKPMLFDRHLCVRQLRYSGMMETIRIRRAGYPIRYSFVEFVERYRVLLPGVKPAYKQGDLRGTCQRMAEAVLGTHDDWQIGKTKIFLKDHHDMLLEVERDKAITDRVILLQKVIRGFKDRSNFLKLKNAATLIQRHWRGHNCRKNYGLMRLGFLRLQALHRSRKLHQQYRLARQRIIQFQARCRAYLVRKAFRHRLWAVLTVQAYARGMIARRLHQRLRAEYLWRLEAEKMRLAEEEKLRKEMSAKKAKEEAERKHQERLAQLAREDAERELKEKEAARRKKELLEQMERARHEPVNHSDMVDKMFGFLGTSGGLPGQEGQAPSGFEDLERGRREMVEEDLDAALPLPDEDEEDLSEYKFAKFAATYFQGTTTHSYTRRPLKQPLLYHDDEGDQLAALAVWITILRFMGDLPEPKYHTAMSDGSEKIPVMTKIYETLGKKTYKRELQALQGEGEVLQAQLPEGQKKSSVRHKLVHLTLKKKSKLTEEVTKRLHDGESTVQGNSMLEDRPTSNLEKLHFIIGNGILRPALRSVPPESLLVAEWCLCQPSKRLSQAPGFGFAAS

SEQ ID NO: 44375 - protein, 1178 aa, Artificial Sequence
  derived and/or modified sequence
MVILQQGDHVWMDLRLGQEFDVPIGAVVKLCDSGQVQVVDDEDNEHWISPQNATHIKPMHPTSVHGVEDMIRLGDLNEAGILRNLLIRYRDHLIYTYTGSILVAVNPYQLLSIYSPEHIRQYTNKKIGEMPPHIFAIADNCYFNMKRNSRDQCCIISGESGAGKTESTKLILQFLAAISGQHSWIEQQVLEATPILEAFGNAKTIRNDNSSRFGKYIDIHFNKRGAIEGAKIEQYLLEKSRVCRQALDERNYHVFYCMLEGMSEDQKKKLGLGQASDYNYLAMGNCITCEGRVDSQEYANIRSAMKVLMFTDTENWEISKLLAAILHLGNLQYEARTFENLDACEVLFSPSLATAASLLEVNPPDLMSCLTSRTLITRGETVSTPLSREQALDVRDAFVKGIYGRLFVWIVDKINAAIYKPPSQDVKNSRRSIGLLDIFGFENFAVNSFEQLCINFANEHLQQFFVRHVFKLEQEEYDLESIDWLHIEFTDNQDALDMIANKPMNIISLIDEESKFPKGTDTTMLHKLNSQHKLNANYIPPKNNHETQFGINHFAGIVYYETQGFLEKNRDTLHGDIIQLVHSSRNKFIKQIFQADVAMGAETRKRSPTLSSQFKRSLELLMRTLGACQPFFVRCIKPNEFKKPMLFDRHLCVRQLRYSGMMETIRIRRAGYPIRYSFVEFVERYRVLLPGVKPAYKQGDLRGTCQRMAEAVLGTHDDWQIGKTKIFLKDHHDMLLEVERDKAITDRVILLQKVIRGFKDRSNFLKLKNAATLIQRHWRGHNCRKNYGLMRLGFLRLQALHRSRKLHQQYRLARQRIIQFQARCRAYLVRKAFRHRLWAVLTVQAYARGMIARRLHQRLRAEYLWRLEAEKMRLAEEEKLRKEMSAKKAKEEAERKHQERLAQLAREDAERELKEKEAARRKKELLEQMERARHEPVNHSDMVDKMFGFLGTSGGLPGQEGQAPSGFEDLERGRREMVEEDLDAALPLPDEDEEDLSEYKFAKFAATYFQGTTTHSYTRRPLKQPLLYHDDEGDQLAALAVWITILRFMGDLPEPKYHTAMSDGSEKIPVMTKIYETLGKKTYKRELQALQGEGEAQLPEGQKKSSVRHKLVHLTLKKKSKLTEEVTKRLHDGESTVQGNSMLEDRPTSNLEKLHFIIGNGILRPALRSVPGGGDTRA

SEQ ID NO: 44376 - DNA, 3609 bp, Artificial Sequence
  derived and/or modified sequence
gcactgctgcaaaagggcgaccatgtgtggatggacctgaggctggggcaggaatttgatgtgcctatcggagccgtggtgaagctgtgtgactcaggccaggtgcaggtggtcgacgacgaagacaatgaacattggatctcaccgcaaaatgcgacgcacatcaagcctatgcaccccacctccgtgcatggcgtcgaagatatgataaggctgggtgatctgaatgaagctggcatcctgcgcaatcttctgatcagatacagggaccatttaatttacacctacaccggtagtatcctagtggccgtcaatccgtaccagcttctcagtatttactccccggagcatatacggcagtatactaataagaagattggcgaaatgccgccgcatattttcgctatagctgacaattgttacttcaatatgaagaggaacagccgagaccaatgctgcatcatctcaggagaatccggtgcaggtaagactgaatcgacaaagctcattttacagttcctggctgccattagtggccaacatagttggattgaacagcaggttttagaagccacacccattctggaggcatttgggaatgcaaagaccattcggaacgataactcctctcggttcggaaagtacatcgacatccattttaataaacggggtgcgattgagggtgccaagatcgagcagtatttactggaaaaatccagagtctgcagacaggccctggatgaaagaaattatcacgttttctattgtatgctggaggggatgagcgaagaccagaagaaaaaacttggactcggccaagcctcagactataattacttagcaatgggcaattgtattacatgtgaggggagagtggattcccaggagtacgcaaacatccgctccgctatgaaagtcctgatgttcacagacacagaaaactgggaaatctccaaattactcgccgccattctacatctggggaatttgcaatatgaagcacggaccttcgaaaatttagatgcctgtgaggtgctgttcagcccatccttagccaccgcagcatctcttcttgaggttaatccgcccgacctgatgtcctgtcttacaagccgcacactcataacacgaggcgaaacggtgtcaactcctttaagccgcgaacaggccctagacgtgcgtgatgcgtttgtaaagggtatttacggcaggttattcgtttggattgtggacaaaattaacgccgctatttacaagccgccctcacaggatgtcaaaaactccaggaggagtatcgggctgctggatatattcggattcgaaaatttcgcagtcaactcattcgagcagctgtgtattaatttcgccaacgagcatctgcagcaatttttcgtacgccacgtcttcaagctcgagcaggaggagtacgacctggagagcatagactggttgcatattgaatttaccgataatcaggacgctttggatatgattgccaacaaacccatgaatatcatcagtctgattgacgaagaatccaagttcccaaaaggaacggacaccactatgctccataaactgaactcccagcataaacttaacgcgaactatatccctcctaaaaataatcacgaaacacagttcggcattaaccactttgctggcatcgtctactatgaaacgcagggattcctggagaaaaacagagacactctccacggagatatcattcagctcgtccattcctccagaaacaaatttatcaaacagattttccaagccgatgtcgctatgggagctgagacaaggaaaagatcccctactctgtcctcccagtttaagagatctctcgagctactaatgcgcactttgggtgcttgccagccatttttcgtccgttgcataaagccgaacgagttcaaaaaacccatgctgtttgatagacacctttgcgttaggcagctcagatatagcgggatgatggagacaattcgcatccgaagggcgggataccccatcaggtatagctttgtcgagttcgtagagcggtacagggtgctactgcccggcgttaagcctgcatacaagcagggagatctgagaggcacttgtcagcgcatggccgaggccgtgctcggcactcatgatgactggcagatcgggaaaacaaaaattttcttgaaggatcatcatgatatgttgttggaggtggaaagagacaaggctattaccgacagggtcattcttctccaaaaggtgattaggggcttcaaagacaggtcgaatttcctgaaactgaagaacgctgcaaccctcatccagcggcactggcgcggacataattgtcgcaaaaattacggactgatgcggctggggttcttgcgactacaggccctccacaggagcaggaaactgcatcagcagtatcggttggctcggcagagaatcatccagtttcaagctcgctgcagggcttacctggtgcgcaaggcatttcggcaccggctgtgggccgtgctgactgttcaagcctatgctcgcggaatgatcgcgaggcgcctgcatcaacgcctcagagccgagtacttatggcggcttgaggccgagaagatgaggcttgccgaggaagagaagttaaggaaggaaatgtctgccaaaaaagccaaggaggaagccgagcgaaagcaccaggagcgcctagcacagctggcaagagaggacgcagagcgggaactgaaagaaaaggaggccgcccgacggaaaaaggagcttctggagcagatggagcgtgcgaggcacgaaccggtgaatcactcagacatggtggataaaatgttcgggtttttagggacctctggcggcttaccagggcaggagggccaagctccatcaggctttgaagacttggaacgggggcgaagagaaatggtggaggaggatttggatgctgctctgcctcttcccgacgaggatgaagaggatttgtcggaatataagtttgccaaattcgccgccacttactttcaggggacaactactcattcatatactcggcgacctcttaagcagcctctgctttaccatgacgatgaaggtgaccagctagccgccctggctgtttggataactatattgcgatttatgggcgatctgcccgagccaaagtatcatactgccatgtctgacggaagtgaaaagataccggtcatgacaaagatatacgagactctcgggaaaaagacctacaaacgcgagttacaggcactgcagggagagggcgaggtcctgcaggcacagttgcctgaagggcagaagaaatcttcagtgcgacacaaattagtccatctgacactcaaaaaaaagtcaaagctcacagaggaggttacaaagagactccacgatggagagtccaccgtccaggggaatagtatgctcgaagatagaccgacgagcaacctggagaaactgcatttcatcatcggcaacggcatcttacggcccgctcttcgctcagtccccccggagtcccttttagtggccgaatggtgcctgtgtcaaccttcaaaacggctgtcgcaagcccccggatttggattcgcagcttcttag

SEQ ID NO: 44377 - DNA, 3537 bp, Artificial Sequence
  derived and/or modified sequence
atggtcatccttcagcaaggcgatcacgtatggatggacctcagattgggacaggaatttgatgtgcccatcggagcagtggtgaaactatgcgattcaggacaagtccaggtagtggacgacgaggacaacgagcattggatcagcccccagaacgccacacacatcaagcctatgcacccgacatctgttcacggtgtggaagacatgatccggcttggtgaccttaacgaggccggtatcctgaggaatcttctcatccgatatagagaccatctgatctatacatacacaggctctatccttgtggcagtcaacccatatcagttactgtcaatctactcacctgaacacatccgtcaatacactaacaagaaaataggggagatgcccccccatatcttcgccattgcagacaattgctattttaacatgaagcgcaactcaagggaccagtgctgcattatttcgggagagagcggagcagggaagactgaatcaaccaagttaattctacagtttctggccgctatctccgggcagcattcctggatagagcagcaggtacttgaagcgacaccaatactggaagcttttggtaatgcaaaaacaatacggaatgacaacagttcccgcttcggcaaatatatcgatatccatttcaataagcgaggagccatagagggcgcaaaaatagaacagtatctgctcgaaaagtcgagggtctgccgacaggctcttgatgaaagaaactaccacgtattctattgcatgcttgaaggcatgtctgaggaccagaagaagaagctgggtttaggccaagccagcgactataactacctggcaatggggaattgcatcacatgtgagggccgagttgattcccaggaatacgctaacattaggtccgccatgaaggttctgatgttcacagataccgaaaactgggagatttccaagctgctggctgctattctgcacttggggaatctgcaatacgaagcacgcacatttgagaaccttgatgcatgcgaggttctcttctctccatcattggcaactgccgcctctctgttggaagtgaacccacccgacctcatgagctgtctgactagccggaccctcatcacccggggggagaccgtgtccacacctctaagccgggagcaggccctggacgtccgggacgccttcgtaaaaggcatttatggccggctgttcgtgtggattgtagataagataaacgcggctatttacaagcccccctcccaagacgtgaagaactcaaggcgctctatagggctactggacatctttggctttgaaaatttcgctgtgaatagtttcgagcaactgtgcataaacttcgccaatgaacacctgcaacagttctttgtgagacacgttttcaagctggagcaagaggagtacgatctagagtctatcgattggctacacattgagttcacggacaatcaggatgccctcgacatgatcgcgaacaaacctatgaacataatttccctcattgacgaggagagcaaattcccaaaggggacggataccaccatgctgcacaaactcaatagccagcacaagctgaacgctaactatattccccccaaaaacaatcacgagacccaattcgggataaaccactttgctggcattgtctattacgagactcagggatttctcgaaaagaatagggacaccttgcacggggacattatccagttagtccacagcagtaggaataagtttattaagcaaatcttccaggcagacgtagccatgggcgccgagaccaggaaacgctcaccaacactgtctagccaattcaaaagatcgctggaactgttgatgcgaacactgggggcatgccagcccttcttcgtaagatgcatcaagcctaacgagttcaaaaaacccatgctgtttgaccggcacctgtgcgtgcggcaattgcggtactccggaatgatggaaacgattaggattcgcagggccgggtacccaatcaggtactcatttgtcgagtttgtcgagcgctacagggttttattgcctggtgtgaagccagcctacaagcaaggcgacctgcggggcacatgccaacgtatggcagaagcggtcctcggtacgcacgatgattggcagatagggaagactaagatcttccttaaagaccatcacgatatgctgctggaagtggaaagagataaagccatcactgacagggtgatactgctccagaaagtgatccgcggctttaaggataggtctaacttcctgaagctgaagaacgccgctacgttgattcagcggcattggcggggccataattgccgcaaaaattacggactcatgagactgggattcctcaggttacaggccctgcaccgctcaagaaaactgcaccagcagtatcggctcgccagacagaggattattcaattccaggcaaggtgccgcgcctacctggtgcgaaaagctttccgccacagactctgggcggttttaaccgtgcaagcttacgcccggggcatgatcgctcgtcgactgcatcagcggcttcgagccgagtacttgtggcgtttggaagccgaaaagatgcggctggccgaagaagagaagctaaggaaagaaatgtcagccaagaaggccaaggaggaggcagaacgaaagcaccaggaacggctggcacaacttgccagggaggatgcggagagggagctcaaagaaaaagaggccgctaggagaaaaaaggagctgctggaacagatggagcgcgcccggcacgagcccgtcaaccatagtgacatggttgacaagatgtttggtttcctgggtacttcgggcgggctgcccggacaggaagggcaggcgccgtccggtttcgaggacttagagcgagggcgccgcgagatggttgaggaggacctggacgccgcgcttccactaccagatgaggatgaagaagatttatccgagtataagttcgccaagtttgcagctacgtactttcagggtacgacaacgcactcttacacaagaagacctctgaagcagccactgctctatcatgatgacgagggcgaccagttggccgctctggcagtgtggatcacaattctcagatttatgggcgatctccctgagcctaagtaccacaccgctatgagcgatgggagcgagaagatacctgtgatgaccaagatttatgagactctcggcaagaaaacctacaagcgggaactgcaagcattacagggtgagggtgaagcacaactgcctgagggccagaagaagtccagcgtgaggcacaaactggtacacctcacgctcaagaaaaagtctaagctgaccgaggaggtgactaagcggcttcacgatggagagagtacagtacagggcaactcaatgctggaggacagacctacttctaacctggagaagctacacttcattatcggaaacggtattctgagacccgcactcagatccgtccccggcggaggggacactcgggcctag

SEQ ID NO: 44378 - DNA, 3609 bp, Artificial Sequence
  derived and/or modified sequence
gccctgctgcagaagggggaccacgtgtggatggacctgcggctgggccaggagtttgatgtgcccatcggggctgtggtgaagctgtgtgacagcggccaggtgcaggtggtggatgatgaagataatgagcactggatcagcccccagaatgccacccacatcaagcccatgcaccccacctctgtgcacggcgtggaggacatgatccggctgggggacctgaatgaggccggcatcctgaggaacctgctgatccgctacagagaccacctgatctacacctacacaggcagcatcctggtggccgtgaacccctaccagctgctgagcatctacagccctgagcacatccggcagtacaccaacaagaagatcggggagatgccaccccacatctttgccatcgctgacaactgctacttcaacatgaagaggaacagccgggaccagtgctgcatcatcagcggggagagcggggccggcaagacagagagcaccaagctgatcctgcagttcctggccgccatcagcggccagcacagctggattgagcagcaggtgctggaggccacccccatcctggaggcctttggaaatgccaagaccatcagaaatgacaacagcagcagatttgggaagtacatcgacatccacttcaacaagagaggagccatcgagggcgccaagattgagcagtacctgctggagaagagccgggtgtgccggcaggccctggatgaaagaaactaccacgtgttctactgcatgctggagggcatgtctgaggaccagaagaagaagctgggcctgggccaggccagtgactacaactacctggccatgggcaactgcatcacctgtgagggccgggtggacagccaggagtatgccaacatccgcagcgccatgaaggtgctgatgttcacagacacagagaactgggagatcagcaagctgctggccgccatcctgcacctgggcaacctgcagtatgaggcccggacctttgagaacctggatgcctgtgaggtgctcttcagccccagcctggccacagctgccagcctgctggaggtgaaccccccagacctgatgagctgcctgaccagcaggaccctcatcaccagaggagagaccgtgtccacccccctgagccgggagcaggccctggatgtgagagatgcctttgtgaagggcatctacggccgcctgtttgtgtggatcgtggacaagatcaatgctgccatctacaagccacccagccaggatgtgaagaacagcagaagaagcatcggcctgctggacatcttcggctttgaaaattttgctgtgaacagctttgagcagctgtgcatcaactttgccaatgagcacctgcagcagttctttgtgagacatgtgttcaagctggagcaggaggagtatgacctggagagcattgactggctgcacatcgagttcacagacaaccaggatgccctggacatgattgccaacaagcccatgaacatcatcagcctgattgatgaggagagcaagttccccaagggcacagacaccaccatgctgcacaagctgaacagccagcacaagctgaatgccaactacatcccccccaagaacaaccacgagacccagtttggcatcaaccactttgctggcatcgtgtactatgagacccagggcttcctggagaagaacagagacaccctgcatggagacatcatccagctggtgcacagcagcaggaacaagttcatcaagcagatcttccaggctgatgtggccatgggcgctgagaccaggaagaggagccccaccctgagcagccagttcaagaggagcctggagctgctgatgaggaccctgggcgcctgccagcccttctttgtgcgctgcatcaagcccaatgagttcaagaagcccatgctgtttgacagacacctgtgtgtgcggcagctgcgctacagcggcatgatggagaccatccgcatcagaagagctggctaccccatccgctacagctttgtggagtttgtggagcgctacagagtgctgctgcccggggtgaagccagcctacaagcagggcgacctgcggggcacctgccagaggatggccgaggccgtgctgggcacccatgatgactggcagatcggcaagaccaagatcttcctgaaggaccaccacgacatgctgctggaggtggagcgggacaaggccatcacagacagagtcatcctgctgcagaaggtgatccggggcttcaaggacaggagcaacttcctgaagctgaagaatgctgccaccctcatccagaggcactggaggggccacaactgcaggaagaactacggcctgatgaggctgggcttcctgcggctgcaggccctgcacaggagcaggaagctgcaccagcagtaccgcctggcccggcagaggatcatccagttccaggcccgctgccgggcctacctggtgaggaaggccttccgccaccggctgtgggccgtgctgactgtgcaggcctatgcccggggcatgattgcccggcggctgcaccagaggctgcgggcagagtacctgtggaggctggaggccgagaagatgaggctggccgaggaggagaagctgaggaaggagatgtctgccaagaaggccaaggaggaggccgagaggaagcaccaggagcggctggcccagctggcccgggaggatgctgagcgggagctgaaggagaaggaggccgcccggaggaagaaggagctgctggagcagatggagcgggcccggcatgagcctgtgaaccacagcgacatggtggacaagatgtttggcttcctgggcaccagcggcggcctgcccggccaggagggccaggcccccagcggctttgaggacctggagcggggcagaagagagatggtggaggaggacctggatgctgccctgcccctgcctgatgaagatgaggaggacctgtctgagtacaagtttgccaagtttgctgccacctacttccagggcaccaccacccacagctacacccggcggcccctgaagcagcccctgctgtaccatgatgatgaaggagaccagctggccgccctggccgtgtggatcaccatcctgcgcttcatgggagacctgcctgagcccaagtaccacacagccatgtctgatggcagcgagaagatccctgtgatgaccaagatctatgagaccctgggcaagaagacctacaagcgggagctgcaggccctgcagggcgagggggaggtgctgcaggcccagctgcctgagggccagaagaagagctctgtgcgccacaagctggtgcacctgaccctgaagaagaagagcaagctgacagaggaggtgaccaagaggctgcatgatggagagagcacagtgcagggcaacagcatgctggaggaccggcccaccagcaacctggagaagctgcacttcatcattggaaatggcatcctgcggcctgccctgcggtctgtgcccccagagagcctgctggtggccgagtggtgcctgtgccagcccagcaagaggctgagccaggcccctggctttggatttgctgccagctag

SEQ ID NO: 44379 - DNA, 3537 bp, Artificial Sequence
  derived and/or modified sequence
atggtgatcctgcagcagggcgaccacgtgtggatggacctgcggctgggccaggagtttgatgtgcccatcggggctgtggtgaagctgtgtgacagcggccaggtgcaggtggtggatgatgaggacaatgagcactggatcagcccccagaatgccacccacatcaagcccatgcaccccacctctgtgcatggagtggaggacatgatccggctgggggacctgaatgaagctggcatcctgaggaacctgctgatccgctacagagaccacctgatctacacctacacaggcagcatcctggtggccgtgaacccctaccagctgctgagcatctacagccctgagcacatccggcagtacaccaacaagaagattggagagatgccaccccacatctttgccatcgctgacaactgctacttcaacatgaagaggaacagccgggaccagtgctgcatcatctctggagagagcggggccggcaagacagagagcaccaagctgatcctgcagttcctggccgccatcagcggccagcacagctggattgagcagcaggtgctggaggccacccccatcctggaggcctttggaaatgccaagaccatcagaaatgacaacagcagcagatttgggaagtacatcgacatccacttcaacaagagaggagccattgaaggagccaagattgagcagtacctgctggagaagagccgggtgtgccggcaggccctggatgagaggaactaccacgtgttctactgcatgctggagggcatgtctgaggaccagaagaagaagctgggcctgggccaggccagtgactacaactacctggccatgggcaactgcatcacctgtgagggccgggtggacagccaggagtatgccaacatccgcagcgccatgaaggtgctgatgttcacagacacagagaactgggagatcagcaagctgctggccgccatcctgcacctgggcaacctgcagtatgaggcccggacctttgagaacctggatgcctgtgaggtgctcttcagccccagcctggccacagctgccagcctgctggaggtgaaccccccagacctgatgagctgcctgaccagcaggaccctcatcaccagaggagaaacagtgtccacccccctgagccgggagcaggccctggatgtgagagatgcctttgtgaagggcatctacggccgcctgtttgtgtggatcgtggacaagatcaatgctgccatctacaagccacccagccaggatgtgaagaacagccgccgcagcatcggcctgctggacatctttggatttgagaactttgctgtgaacagctttgagcagctgtgcatcaactttgccaatgagcacctgcagcagttctttgtgcgccacgtgttcaagctggagcaggaggagtatgacctggagagcattgactggctgcacatcgagttcacagacaaccaggatgccctggacatgattgccaacaagcccatgaacatcatcagcctgattgatgaggagagcaagttccccaagggcacagacaccaccatgctgcacaagctgaacagccagcacaagctgaatgccaactacatcccccccaagaacaaccacgagacccagtttggcatcaaccactttgctggcatcgtgtactatgagacccagggcttcctggagaagaacagagacaccctgcacggggacatcatccagctggtgcacagcagcaggaacaagttcatcaagcagatcttccaggctgatgtggccatgggcgctgagaccaggaagaggagccccaccctgagcagccagttcaagaggagcctggagctgctgatgaggaccctgggcgcctgccagcccttctttgtgcgctgcatcaagcccaatgagttcaagaagcccatgctgtttgacagacacctgtgtgtgcggcagctgcgctacagcggcatgatggagaccatccgcatccggcgggccggctaccccatccgctacagctttgtggagtttgtggagcgctacagagtgctgctgcccggggtgaagccagcctacaagcagggcgacctgcggggcacctgccagaggatggccgaggccgtgctgggcacccatgatgactggcagatcggcaagaccaagatcttcctgaaggaccaccacgacatgctgctggaggtggagcgggacaaggccatcacagacagagtcatcctgctgcagaaggtgatccggggcttcaaggacaggagcaacttcctgaagctgaagaatgctgccaccctcatccagaggcactggaggggccacaactgcaggaagaactacggcctgatgaggctgggcttcctgcggctgcaggccctgcacaggagcaggaagctgcaccagcagtaccgcctggcccggcagaggatcatccagttccaggcccgctgccgggcctacctggtgaggaaggccttccgccaccggctgtgggccgtgctgactgtgcaggcctatgcccggggcatgattgcccggcggctgcaccagaggctgcgggcagagtacctgtggaggctggaggccgagaagatgaggctggccgaggaggagaagctgaggaaggagatgtctgccaagaaggccaaggaggaggccgagaggaagcaccaggagcggctggcccagctggccagagaagatgctgagcgggagctgaaggagaaggaggccgcccggaggaagaaggagctgctggagcagatggagcgggcccggcatgagcctgtgaaccacagcgacatggtggacaagatgtttggcttcctgggcaccagcggcggcctgcccggccaggagggccaggcccccagcggctttgaggacctggagcggggccggcgggagatggtggaggaggacctggatgctgccctgcccctgcctgatgaagatgaggaggacctgtctgagtacaagtttgccaagtttgctgccacctacttccagggcaccaccacccacagctacacccggcggcccctgaagcagcccctgctgtaccatgatgatgaaggagaccagctggccgccctggccgtgtggatcaccatcctgcgcttcatgggagacctgcctgagcccaagtaccacacagccatgtctgatggcagcgagaagatccctgtgatgaccaagatctatgagaccctgggcaagaagacctacaagcgggagctgcaggccctgcagggcgagggggaggcccagctgcctgagggccagaagaagagctctgtgcgccacaagctggtgcacctgaccctgaagaagaagagcaagctgacagaggaggtgaccaagaggctgcatgatggagagagcacagtgcagggcaacagcatgctggaggaccggcccaccagcaacctggagaagctgcacttcatcattggaaatggcatcctgcggcctgccctgcggtctgtgcctgggggcggggacacccgggcctag

SEQ ID NO: 44380 - DNA, 3609 bp, Artificial Sequence
  derived and/or modified sequence
gcactgctccagaagggggaccatgtgtggatggacctgagattggggcaggagttcgacgtgcccatcggggcggtggtgaagctctgcgactctgggcaggtccaggtggtggatgatgaagacaatgaacactggatctctccgcagaacgcaacgcacatcaagcctatgcaccccacgtcggtccacggcgtggaggacatgatccgcctgggggacctcaacgaggcgggcatcttgcgcaacctgcttatccgctaccgggaccacctcatctacacgtatacgggctccatcctggtggctgtgaacccctaccagctgctctccatctactcgccagagcacatccgccagtataccaacaagaagattggggagatgcccccccacatctttgccattgctgacaactgctacttcaacatgaaacgcaacagccgagaccagtgctgcatcatcagtggggaatctggggccgggaagacggagagcacaaagctgatcctgcagttcctggcagccatcagtgggcagcactcgtggattgagcagcaggtcttggaggccacccccattctggaagcatttgggaatgccaagaccatccgcaatgacaactcaagccgtttcggaaagtacatcgacatccacttcaacaagcggggcgccatcgagggcgcgaagattgagcagtacctgctggaaaagtcacgtgtctgtcgccaggccctggatgaaaggaactaccacgtgttctactgcatgctggagggtatgagtgaggatcagaagaagaagctgggcttgggccaggcctctgactacaactacttggccatgggtaactgcataacctgtgagggccgggtggacagccaggagtacgccaacatccgctccgccatgaaggtgctcatgttcactgacaccgagaactgggagatctcgaagctcctggctgccatcctgcacctgggcaacctgcagtatgaggcacgcacatttgaaaacctggatgcctgtgaggttctcttctccccatcgctggccacagctgcatccctgcttgaggtgaaccccccagacctgatgagctgcctgactagccgcaccctcatcacccgcggggagacggtgtccaccccactgagcagggaacaggcactggacgtgcgcgacgccttcgtaaaggggatctacgggcggctgttcgtgtggattgtggacaagatcaacgcagcaatttacaagcctccctcccaggatgtgaagaactctcgcaggtccatcggcctcctggacatctttgggtttgagaactttgctgtgaacagctttgagcagctctgcatcaacttcgccaatgagcacctgcagcagttctttgtgcggcacgtgttcaagctggagcaggaggaatatgacctggagagcattgactggctgcacatcgagttcactgacaaccaggatgccctggacatgattgccaacaagcccatgaacatcatctccctcatcgatgaggagagcaagttccccaagggcacagacaccaccatgttacacaagctgaactcccagcacaagctcaacgccaactacatcccccccaagaacaaccatgagacccagtttggcatcaaccattttgcaggcatcgtctactatgagacccaaggcttcctggagaagaaccgagacaccctgcatggggacattatccagctggtccactcctccaggaacaagttcatcaagcagatcttccaggccgatgtcgccatgggcgccgagaccaggaagcgctcgcccacacttagcagccagttcaagcggtcactggagctgctgatgcgcacgctgggtgcctgccagcccttctttgtgcgatgcatcaagcccaatgagttcaagaagcccatgctgttcgaccggcacctgtgcgtgcgccagctgcggtactcaggaatgatggagaccatccgaatccgccgagctggctaccccatccgctacagcttcgtagagtttgtggagcggtaccgtgtgctgctgccaggtgtgaagccggcctacaagcagggcgacctccgcgggacttgccagcgcatggctgaggctgtgctgggcacccacgatgactggcagataggcaaaaccaagatctttctgaaggaccaccatgacatgctgctggaagtggagcgggacaaagccatcaccgacagagtcatcctccttcagaaagtcatccggggattcaaagacaggtctaactttctgaagctgaagaacgctgccacactgatccagaggcactggcggggtcacaactgtaggaagaactacgggctgatgcgtctgggcttcctgcggctgcaggccctgcaccgctcccggaagctgcaccagcagtaccgcctggcccgccagcgcatcatccagttccaggcccgctgccgcgcctatctggtgcgcaaggccttccgccaccgcctctgggctgtgctcaccgtgcaggcctatgcccggggcatgatcgcccgcaggctgcaccaacgcctcagggctgagtatctgtggcgcctcgaggctgagaaaatgcggctggcggaggaagagaagcttcggaaggagatgagcgccaagaaggccaaggaggaggccgagcgcaagcatcaggagcgcctggcccagctggctcgtgaggacgctgagcgggagctgaaggagaaggaggccgctcggcggaagaaggagctcctggagcagatggaaagggcccgccatgagcctgtcaatcactcagacatggtggacaagatgtttggcttcctggggacttcaggtggcctgccaggccaggagggccaggcacctagtggctttgaggacctggagcgagggcggagggagatggtggaggaggacctggatgcagccctgcccctgcctgacgaggatgaggaggacctctctgagtataaatttgccaagttcgcggccacctacttccaggggacaaccacgcactcctacacccggcggccactcaaacagccactgctctaccatgacgacgagggtgaccagctggcagccctggcggtctggatcaccatcctccgcttcatgggggacctccctgagcccaagtaccacacagccatgagtgatggcagtgagaagatccctgtgatgaccaagatttatgagaccctgggcaagaagacgtacaagagggagctgcaggccctgcagggcgagggcgaggtcctgcaggcccagctccccgagggccagaagaagagcagtgtgaggcacaagctggtgcatttgactctgaaaaagaagtccaagctcacagaggaggtgaccaagaggctgcatgacggggagtccacagtgcagggcaacagcatgctggaggaccggcccacctccaacctggagaagctgcacttcatcatcggcaatggcatcctgcggccagcactccggtcagtgccgcctgaaagtcttttggtggctgagtggtgcctctgtcaacctagcaagagattaagccaagcacctgggtttggcttcgctgctagctag

SEQ ID NO: 44381 - DNA, 4050 bp, Artificial Sequence
  derived and/or modified sequence
ggcaggagagagagggagagacaagagacacacacagagagacggcgaggaagggaaagacccagagggacgcctagaacgagacttggagccagacagaggaagaggggacgtgtgtttgcagactggctgggcccgtgacccagcttcctgagtcctccgtgcaggtggcagctgtaccaggctggcaggtcactgagagtgggcagctgggccccagaactgtgcctggcccagtgggcagcaggagctcctgacttgggaccatggtgattcttcagcagggggaccatgtgtggatggacctgagattggggcaggagttcgacgtgcccatcggggcggtggtgaagctctgcgactctgggcaggtccaggtggtggatgatgaagacaatgaacactggatctctccgcagaacgcaacgcacatcaagcctatgcaccccacgtcggtccacggcgtggaggacatgatccgcctgggggacctcaacgaggcgggcatcttgcgcaacctgcttatccgctaccgggaccacctcatctacacgtatacgggctccatcctggtggctgtgaacccctaccagctgctctccatctactcgccagagcacatccgccagtataccaacaagaagattggggagatgcccccccacatctttgccattgctgacaactgctacttcaacatgaaacgcaacagccgagaccagtgctgcatcatcagtggggaatctggggccgggaagacggagagcacaaagctgatcctgcagttcctggcagccatcagtgggcagcactcgtggattgagcagcaggtcttggaggccacccccattctggaagcatttgggaatgccaagaccatccgcaatgacaactcaagccgtttcggaaagtacatcgacatccacttcaacaagcggggcgccatcgagggcgcgaagattgagcagtacctgctggaaaagtcacgtgtctgtcgccaggccctggatgaaaggaactaccacgtgttctactgcatgctggagggtatgagtgaggatcagaagaagaagctgggcttgggccaggcctctgactacaactacttggccatgggtaactgcataacctgtgagggccgggtggacagccaggagtacgccaacatccgctccgccatgaaggtgctcatgttcactgacaccgagaactgggagatctcgaagctcctggctgccatcctgcacctgggcaacctgcagtatgaggcacgcacatttgaaaacctggatgcctgtgaggttctcttctccccatcgctggccacagctgcatccctgcttgaggtgaaccccccagacctgatgagctgcctgactagccgcaccctcatcacccgcggggagacggtgtccaccccactgagcagggaacaggcactggacgtgcgcgacgccttcgtaaaggggatctacgggcggctgttcgtgtggattgtggacaagatcaacgcagcaatttacaagcctccctcccaggatgtgaagaactctcgcaggtccatcggcctcctggacatctttgggtttgagaactttgctgtgaacagctttgagcagctctgcatcaacttcgccaatgagcacctgcagcagttctttgtgcggcacgtgttcaagctggagcaggaggaatatgacctggagagcattgactggctgcacatcgagttcactgacaaccaggatgccctggacatgattgccaacaagcccatgaacatcatctccctcatcgatgaggagagcaagttccccaagggcacagacaccaccatgttacacaagctgaactcccagcacaagctcaacgccaactacatcccccccaagaacaaccatgagacccagtttggcatcaaccattttgcaggcatcgtctactatgagacccaaggcttcctggagaagaaccgagacaccctgcatggggacattatccagctggtccactcctccaggaacaagttcatcaagcagatcttccaggccgatgtcgccatgggcgccgagaccaggaagcgctcgcccacacttagcagccagttcaagcggtcactggagctgctgatgcgcacgctgggtgcctgccagcccttctttgtgcgatgcatcaagcccaatgagttcaagaagcccatgctgttcgaccggcacctgtgcgtgcgccagctgcggtactcaggaatgatggagaccatccgaatccgccgagctggctaccccatccgctacagcttcgtagagtttgtggagcggtaccgtgtgctgctgccaggtgtgaagccggcctacaagcagggcgacctccgcgggacttgccagcgcatggctgaggctgtgctgggcacccacgatgactggcagataggcaaaaccaagatctttctgaaggaccaccatgacatgctgctggaagtggagcgggacaaagccatcaccgacagagtcatcctccttcagaaagtcatccggggattcaaagacaggtctaactttctgaagctgaagaacgctgccacactgatccagaggcactggcggggtcacaactgtaggaagaactacgggctgatgcgtctgggcttcctgcggctgcaggccctgcaccgctcccggaagctgcaccagcagtaccgcctggcccgccagcgcatcatccagttccaggcccgctgccgcgcctatctggtgcgcaaggccttccgccaccgcctctgggctgtgctcaccgtgcaggcctatgcccggggcatgatcgcccgcaggctgcaccaacgcctcagggctgagtatctgtggcgcctcgaggctgagaaaatgcggctggcggaggaagagaagcttcggaaggagatgagcgccaagaaggccaaggaggaggccgagcgcaagcatcaggagcgcctggcccagctggctcgtgaggacgctgagcgggagctgaaggagaaggaggccgctcggcggaagaaggagctcctggagcagatggaaagggcccgccatgagcctgtcaatcactcagacatggtggacaagatgtttggcttcctggggacttcaggtggcctgccaggccaggagggccaggcacctagtggctttgaggacctggagcgagggcggagggagatggtggaggaggacctggatgcagccctgcccctgcctgacgaggatgaggaggacctctctgagtataaatttgccaagttcgcggccacctacttccaggggacaaccacgcactcctacacccggcggccactcaaacagccactgctctaccatgacgacgagggtgaccagctggcagccctggcggtctggatcaccatcctccgcttcatgggggacctccctgagcccaagtaccacacagccatgagtgatggcagtgagaagatccctgtgatgaccaagatttatgagaccctgggcaagaagacgtacaagagggagctgcaggccctgcagggcgagggcgaggcccagctccccgagggccagaagaagagcagtgtgaggcacaagctggtgcatttgactctgaaaaagaagtccaagctcacagaggaggtgaccaagaggctgcatgacggggagtccacagtgcagggcaacagcatgctggaggaccggcccacctccaacctggagaagctgcacttcatcatcggcaatggcatcctgcggccagcactccggtcagtgccgggaggcggggacaccagggcctgaaagtcttttggtggctgagtggtgcctctgtcaacctagcaagagattaagccaagcaggcctgggtttggcttcgctgctagctagttggtggagttaggaccttggtggagttatttcatctttctaagcctctgattccttgtctgtaaagggggaatcctaaaacaggcatcccttggagatattgcaggttcagttgaaggccacagaaataaatatcacaataaagagagctgcagaaata

SEQ ID NO: 44382 - DNA, 3609 bp, Artificial Sequence
  derived and/or modified sequence
gccctgctgcagaagggcgaccacgtgtggatggacctgcggctggggcaggaattcgacgtgccaatcggcgctgtggttaagctgtgtgattcgggtcaggtacaggtggttgatgatgaagacaatgagcattggatctcaccgcagaacgcaacccacattaagcccatgcatcccacttcggtccatggggtggaggacatgatacggttaggcgacctgaacgaggccggtatattgcgtaacctactaattcgctatagggatcatctgatctatacatataccggctccattctcgtcgctgtgaatccatatcagctgctgagtatttactcccccgagcacattagacaatatactaacaagaaaatcggagagatgccaccacacatatttgccatcgccgacaattgctatttcaacatgaaacgaaattcacgcgatcagtgttgtatcatctctggggaaagcggagcagggaaaaccgagtcaacaaaactgattttgcagtttctggccgccattagcggacagcacagctggattgagcagcaggtgctcgaggccactcccattttggaagctttcggtaatgccaaaaccattaggaatgataattctagccgtttcggaaaatacatagatatccactttaataaacgcggagcgattgaaggcgccaaaatcgagcagtatctactggagaagagtcgtgtgtgcagacaggccctggacgaaaggaactaccacgtgttttactgcatgctggaggggatgtccgaggatcagaagaagaaattaggtttggggcaggcttcagactacaattacctcgctatgggtaattgtattacgtgcgaagggcgagtggattctcaggagtacgccaatatcaggtccgcaatgaaggttctgatgttcactgacacggagaactgggagatatccaagctcctcgccgcaatcctgcacctgggtaacctgcagtatgaagctaggacttttgagaatttggacgcatgtgaggtactgttctcaccttccctggcaaccgcagcctcactgctggaggtaaaccctcctgatctgatgtcttgcctcacaagtcgaactctgattactcgcggagaaaccgtatcgaccccactgtcccgggaacaggccctggatgtgagagatgccttcgtgaagggaatttatggaagattgtttgtttggatagtggataaaattaatgccgccatttacaagcctcccagccaggacgttaagaacagcaggaggagcattggccttttagacatatttggatttgaaaattttgctgtgaacagttttgagcaactctgtatcaatttcgctaacgaacacctgcagcagttcttcgtgcgccacgttttcaaattagagcaagaagaatatgacctcgagagtattgactggctccacattgagttcacagacaatcaggatgccttggatatgattgcaaataaacccatgaatatcatttcattgatcgacgaagaaagtaaatttccaaaaggtactgacactaccatgctgcacaaattgaatagccagcacaagttgaacgcgaactacattcctccaaaaaataaccacgagacccagtttggaattaatcatttcgctggaattgtatattacgagactcagggctttctcgaaaagaatagagatacacttcacggcgacatcatacagctagtccattccagccggaataagtttatcaaacagatttttcaagcagatgttgccatgggggccgagactagaaaacggagtcctaccctgagcagtcagttcaagagaagtttagagttgttgatgaggaccctcggtgcctgtcagccattcttcgtccgctgcataaagcccaacgagttcaaaaagcctatgctgttcgataggcacctatgcgttagacagctgcggtactcaggaatgatggagacaattcggatcagaagagccggctaccccataagatactcattcgtcgaatttgtcgagcgctacagagtgctactgcctggcgttaagcctgcctataaacagggagacctcagaggaacttgccaaaggatggctgaggccgtgcttggcacccatgatgattggcagataggaaagactaagatcttcttaaaggaccaccatgatatgctgctagaagtagaacgcgacaaggcaattacagacagggtgattctgttacagaaggttattagggggttcaaagatcggtctaactttctgaagctgaagaatgcagctaccttgattcaaagacactggcggggtcacaattgtcgtaagaactatggactcatgaggcttggcttcttgcgcctgcaggctctgcacaggtcgcgtaagctgcaccagcagtacaggctggccagacagagaattatacagtttcaggccagatgccgggcttatctggtacgaaaagcttttagacataggctgtgggctgtgttgacagtgcaggcctatgcccgcgggatgatagctcgaaggttgcatcaaagacttagagccgagtacctttggcggttggaagccgaaaagatgcgtctggcggaggaagagaagctgcggaaggagatgtcagccaaaaaggcaaaagaggaagccgagaggaagcaccaggaacggttagcacagctcgctagggaggatgccgagcgagaactcaaggaaaaggaagctgctagacgcaaaaaggaactgctcgaacagatggaacgagcgaggcatgagccagtcaatcacagcgatatggtggataagatgtttgggttcctgggaacaagcggcgggttgcctgggcaagaaggtcaggccccgtcggggtttgaagatttggagaggggaagacgtgagatggtggaggaggacctagacgctgcactgcccttacctgatgaggacgaagaggatctaagtgaatataaatttgccaagttcgccgccacctatttccaggggacaacaactcactcatacaccagaagacctctgaagcagccactgctgtatcacgatgacgagggggatcagctagctgccctcgccgtttggatcaccattctcaggttcatgggagacttacccgagcctaagtaccacaccgccatgtctgacggatctgaaaagatccccgtcatgaccaaaatctacgaaacgctggggaagaaaacttacaaacgtgagctgcaagccctgcagggggagggggaagtgttacaggctcagttgccagaaggacagaaaaaatcctccgtgcggcacaaactggttcatctcactctaaaaaagaagtctaagcttactgaagaggtaacgaagagacttcacgatggggaatctacagtgcagggcaacagcatgttggaggaccggcctacctccaatctggagaagctgcatttcataatcggaaacggtatccttagacccgccctgagaagcgttccgcctgagagtctacttgttgctgaatggtgcctgtgccagcccagcaaacgtctgtcccaggcacctggctttgggttcgccgcttcatag

SEQ ID NO: 44383 - DNA, 3537 bp, Artificial Sequence
  derived and/or modified sequence
atggtgatcctgcagcagggcgaccacgtgtggatggacctgcggcttgggcaggagtttgatgtgcctatcggggccgtggtgaaactttgcgacagcggccaagttcaagttgtcgatgatgaggacaacgaacactggatcagccctcaaaacgcaacccacatcaagccaatgcacccaacatcagtgcatggggttgaggacatgattcgcctcggtgacctgaatgaggcggggatcttgaggaatctgctcatccggtatagggaccacttaatctacacctataccggcagcattctggtcgcagttaatccttaccagctgctgtcaatctattcacccgaacatatacgccagtacacaaataaaaagataggcgaaatgccaccccatattttcgctatcgctgataactgttacttcaacatgaagagaaactctcgggaccaatgctgtatcatctccggagagagcggcgcaggaaaaacagaatcgaccaaacttatactgcagtttctcgcagctatctccggccagcacagctggattgaacagcaggtgcttgaggctaccccaatactggaggcatttggcaatgccaagactatccgtaacgacaattcatcccgattcgggaagtacattgacatccatttcaataagaggggcgctatcgagggggcaaagatcgaacagtatctcctggaaaagtctagggtctgtcggcaggcacttgacgagaggaattaccacgttttctattgtatgctggaagggatgtccgaagaccagaaaaagaagctcggcctaggacaagcaagtgattataattatctggccatgggcaattgtataacttgtgaaggaagagtcgactcccaagaatatgcgaacatccgcagcgccatgaaagtcctgatgttcactgataccgaaaactgggagatcagcaagctgctcgccgccattctccatctgggcaatctccagtacgaggcccgtacattcgagaacttggacgcttgcgaggttctcttctcacccagtttagccactgcggcctctctactggaggtgaatccgccagatttgatgtcatgtcttacatctagaacgctgattacccggggagagaccgtgtctacccccctttccagggagcaggctctggacgtccgtgacgcttttgtgaaaggcatatacggcagattattcgtgtggatcgttgacaagatcaatgccgctatttacaagccgccctctcaggacgttaagaactcacgacgcagcatcggactgctcgacatattcgggtttgagaacttcgccgtaaatagtttcgagcagctgtgcatcaatttcgccaatgagcacctccagcaattttttgttcggcacgtgttcaaacttgagcaagaggagtatgacctggaaagtatcgactggctgcacatcgaatttactgacaatcaagacgccctggatatgatcgcaaataagcctatgaatattatctctttgatcgacgaagagtccaagttcccaaaggggaccgacacaactatgcttcataaactgaactcacagcataaattgaacgccaattacatccctcctaagaacaaccacgagacacagttcggaatcaaccacttcgccggcatagtgtactatgagacccaggggttcttggagaagaatcgagatacactgcacggtgacataatccagcttgtccatagtagtagaaacaagtttataaagcaaattttccaagccgatgtggctatgggagcggaaaccagaaaacggtctcccacactctcgtcccagtttaagaggtctctggagctactcatgagaacccttggggcctgccagcccttttttgtgcgctgcatcaaacctaatgagtttaagaaaccaatgctctttgaccgccatctctgcgtgcggcagctgagatatagcggtatgatggagactatccggataaggagggcggggtacccaataagatatagcttcgtcgagttcgtggagcggtacagggtgttactgccaggggtgaagccagcttacaagcaaggggacctgaggggaacctgccagcgcatggccgaagcagtgcttggcacacacgacgattggcaaatcggcaagacaaaaatattcctgaaagaccaccacgatatgttgctggaggtggaacgagacaaagctatcaccgatcgagtcattctgctgcagaaggtgatccgcgggttcaaagatcgcagtaactttctgaaattgaagaatgctgcaacactgatccagaggcactggagaggccacaactgccgaaaaaattacggtttgatgcggctcgggttcctcaggttacaggcgttacacaggagcaggaagttgcatcaacaatatcgcctcgcaagacaacgcatcatccagtttcaagcacgttgccgagcctatcttgtccgcaaggccttcaggcaccggttgtgggctgtgctcaccgttcaggcgtacgctcgtggaatgatcgcccgccggctgcaccagagattgcgggcagaatacctctggagattagaggccgagaagatgcgtctggcagaggaggagaagctccggaaggaaatgagtgccaagaaagccaaggaggaagctgaacgcaagcatcaagagcggctggcgcagctggcgcgagaggacgccgagagggagttaaaagaaaaggaagccgctcgcaggaaaaaggagctgctcgaacaaatggaacgtgcgagacatgaacctgtgaaccactctgatatggtcgataaaatgttcggtttccttgggacatcgggcggtttgcctgggcaggaaggtcaggcccccagcggcttcgaggaccttgaaaggggccgcagagagatggtggaagaagacctggacgctgcgctccccctgccagacgaagatgaggaggatctttctgaatataagttcgccaaatttgccgccacatattttcaggggactacaacccactcctacactcgccggccgctgaaacagcctctcctctatcatgacgatgagggcgaccagctggcggctctggcagtgtggattacgatcttgcgattcatgggggatttgcccgagcccaaatatcacactgccatgtccgatgggagcgagaagatccccgtcatgaccaaaatttacgaaacccttggtaaaaagacttacaagcgggaactccaggccttgcagggcgagggagaagcccagctcccggaaggccaaaagaagagttccgtcagacataagctggtgcacctcacactgaaaaagaagtcaaagctgaccgaggaagtcactaagcgcctgcacgacggtgagtccacagtgcaagggaattccatgcttgaggaccggcctacatctaatctggaaaaactgcatttcattattggaaacggaattctccgcccggctctgaggagcgtccccggaggcggagatacccgggcctag

SEQ ID NO: 44384 - DNA, 3609 bp, Artificial Sequence
  derived and/or modified sequence
gctctgctgcagaaaggggaccatgtctggatggacctgcggcttggccaggagttcgatgtgcctattggcgctgtggttaaactctgcgattcaggccaggtgcaagtggtggacgacgaggacaacgaacattggatctcccctcagaatgctacccacatcaagccaatgcatcctaccagcgttcatggagtggaagatatgatacgactaggggacctcaacgaggccggaatcttgcggaatttgctaattcgctatcgcgaccatcttatatacacatatacaggtagcatactggtagcagtgaatccataccagctgcttagcatttacagcccagaacatattaggcagtataccaataagaaaatcggtgagatgcctccgcatattttcgctatcgctgacaattgctattttaacatgaaacgcaacagtagggatcagtgctgtatcataagcggtgaatctggcgcagggaaaactgaaagtaccaagctaatcttgcagttcctggcagccatatctggccagcacagctggatcgaacagcaggtattggaagctacaccaatcctcgaggccttcggtaatgccaagactattaggaacgacaactcatctaggttcggaaaatacattgatattcatttcaataaaaggggggcaattgaaggagccaagattgaacagtatcttttggagaagagtcgagtgtgtagacaggcacttgatgagcgaaactaccacgtcttctactgtatgcttgaagggatgtcggaagatcagaagaaaaagttggggctagggcaggcctcggactacaactacctagcaatggggaactgcatcacctgcgagggcagagtcgattcccaggaatacgcgaacattcgcagcgctatgaaagtcctgatgttcactgacacagaaaactgggaaatatccaaactcttggctgccattcttcacctcggaaacctgcaatatgaggcacgaacatttgagaatctggacgcttgcgaggtgctgttttcaccctctctggcaaccgctgcaagtcttctggaggtgaatcccccagatctgatgtcgtgcctgacctcaagaacactcatcactagaggcgagactgtaagtacacctttatccagagagcaggcattggatgtgcgcgatgcattcgtaaaggggatttatggcaggctgttcgtttggattgtggataagatcaatgcggctatctataagccaccatctcaggatgtgaagaacagtaggcgatccatcggactcttggatattttcggatttgaaaatttcgccgtcaattcctttgaacaactgtgtatcaattttgctaatgaacacctgcagcagttcttcgtgcgccacgtttttaagttagaacaggaggagtacgacctcgaaagcattgactggctgcacatcgaattcaccgataatcaggacgctttagatatgatagccaacaagccaatgaacattatctcactgatagatgaagagtctaagttccccaaagggacagatacgactatgctgcacaagctgaactcccagcacaaactgaacgccaattatattcctccgaaaaacaaccatgaaactcagtttggcatcaaccacttcgctgggatcgtgtattatgagactcaagggtttctcgagaaaaatcgggacactttacatggcgacattattcaacttgtgcactctagccgcaataagttcataaagcagattttccaggccgacgtagccatgggcgcagagaccaggaagaggtccccaacactatcatcgcaatttaagagaagcctggaactgctaatgcgcaccctcggcgcttgccagccgttcttcgtgagatgcataaagcccaacgagttcaaaaagcccatgctgtttgaccggcacctgtgcgtgcggcagctgaggtactctggaatgatggagaccatcaggatacgaagagcgggttatcctatccgctattccttcgtggaatttgtggagaggtaccgagttctgctccccggagttaaacccgcttataagcagggggatttacgtggaacttgccaacggatggcagaagcagtgctgggtacccatgatgattggcaaattggtaagacaaagatcttccttaaagaccaccacgatatgctcctggaagtggagagggataaggctatcacggaccgcgtcatactgctacaaaaggtcatccggggtttcaaggatagatccaacttcctaaagctcaagaatgccgctaccctgattcagcgccattggcggggtcacaactgtaggaagaattacgggctcatgagattggggtttctacggctgcaagccctgcaccgatcccggaagctacaccagcaataccggctcgcacggcagcgcatcatacagttccaggctcgctgtcgagcttatctggtgaggaaagcctttcgccaccggctctgggcagtcctgactgtccaggcgtacgctcgagggatgatcgcacgtcggttgcaccagcgcctgagggccgagtacctgtggaggttagaggccgaaaaaatgcgccttgccgaagaggagaaactaagaaaggaaatgtcagctaagaaggccaaagaagaagcagaacggaaacaccaggagcggttggcccagcttgctcgcgaagatgccgaaagagaactgaaggaaaaggaggcagctcgcagaaagaaggaactccttgaacagatggagagagcgagacacgagcctgttaatcactctgacatggttgataaaatgttcggatttctaggtacctcaggtggtctgcccggtcaggaggggcaggcgccaagcggatttgaggatctcgagcgcggacgcagagagatggtggaggaagatctcgacgcagcactgccactccccgatgaggacgaggaagacctgtcggagtacaaatttgcaaagtttgcagctacatacttccaagggactactacccattcttacactagacgcccattaaagcagccactcctgtatcatgatgacgaaggcgaccagttggcagctctcgcagtgtggatcacaattcttagatttatgggtgaccttccggagccaaagtaccacacagcaatgagcgacggcagcgaaaaaattcccgtgatgactaaaatctatgaaacacttgggaagaagacctataaaagagaactccaggccctgcagggtgagggcgaagtcctgcaagcacaactgccggagggacagaagaagtcgtccgtcagacacaagctggtacatctgactttgaaaaaaaaatcaaaattgacggaagaagtcactaaaagactgcatgatggcgaatctaccgtccagggtaatagcatgttggaagaccggcctacctccaacctggaaaagctccactttatcatcggcaacgggatcttgagacccgctctgaggtcggtcccccctgagtccttactggtggccgagtggtgcctatgtcagcctagcaaacgcctgtcacaggccccaggcttcggcttcgccgcatcttag

SEQ ID NO: 44385 - DNA, 3537 bp, Artificial Sequence
  derived and/or modified sequence
atggtgatcctacaacagggagaccacgtgtggatggatttgcggctgggacaggaattcgacgtccctattggagccgtggtgaaactgtgtgattctgggcaggtacaggtggtcgacgacgaggataatgaacactggatctctccccaaaatgcgacccatatcaagccgatgcatccgacttccgtgcatggggtagaggacatgatacgtctcggcgaccttaacgaagctggcatcctcaggaacctgctgatccgctatagagaccacctcatttatacatatacaggaagcatccttgttgcagtgaacccgtatcagctactgtccatctatagtcctgagcacattcgtcagtatactaacaagaaaattggcgagatgccgcctcatatctttgccatcgcggacaactgttatttcaatatgaagcgcaatagtagagatcagtgctgtattatctccggagagtccggtgctggaaagacggaatcaaccaagctgatcctgcagtttctggccgcaatttctggccagcacagctggatcgagcagcaagtcctcgaggccacaccaattttggaggcatttggtaacgcgaagactatccggaacgacaactctagccggtttgggaaatacattgacatccactttaacaagcgcggagcaatagaaggagccaagattgaacagtacttgcttgaaaagtcacgggtgtgccgacaagccctcgatgagagaaactaccacgtgttttactgcatgttggagggaatgtctgaggatcaaaagaagaaactgggcctgggacaggcctcagattataactatctagcaatggggaattgtatcacctgtgagggccgagtcgactcacaagaatacgccaatatcaggtccgcaatgaaggtgcttatgtttacagacacggagaattgggagatttccaagttgctcgccgctatcctacacttagggaacctccagtatgaggccaggacattcgaaaaccttgacgcgtgtgaagtgctcttttcgccttccctcgccacagccgctagcttattggaggtgaatccccctgaccttatgtcatgcctgacgtcccggacattgatcacgcgtggagagacagtctctactcccctcagtcgcgagcaggctctggatgtgagggatgctttcgtgaaaggcatttatggacgactgtttgtgtggattgtggataaaatcaacgccgcaatttacaaacccccatctcaggatgtcaaaaactcccggcgtagtatcgggctgctagatatcttcggctttgagaacttcgctgttaactccttcgagcagttatgcataaacttcgctaatgaacatctccagcaattttttgtgaggcatgtctttaaactggaacaggaagaatacgatctggagagtatcgactggctccacattgaatttacagacaaccaggacgcactggacatgatcgccaataagcctatgaacatcataagcctgatcgacgaggagtcaaagtttccaaagggcactgatactaccatgcttcacaagctcaactcgcaacacaagctaaacgccaactacatcccgccaaagaataatcatgaaactcaatttggaattaaccattttgctgggatagtgtattacgaaacccaagggttcttggagaagaatagagacactctccatggtgacattattcagctcgtccacagctctcgaaacaaatttatcaagcagatctttcaagcggatgtggcaatgggcgctgagactaggaaaagaagcccgaccctgtcatcacaattcaaacggtctttagagctgctgatgaggactctgggggcatgccaacctttttttgttcgctgcattaaaccaaacgagttcaaaaagccaatgctcttcgaccgtcacctgtgtgtgcggcagctccgctactcagggatgatggagacgatccgaattcggcgagccggataccctattcgctactcttttgtggagttcgttgaacgatatcgcgtcctcctgcctggggttaagcccgcttataagcagggcgacctgcgcggtacttgccagcgaatggccgaagcggtccttggcacccacgacgattggcaaataggcaaaacaaagatctttctgaaggaccaccacgatatgttactcgaggtagaacgcgataaggcaattactgatcgcgtgatcctccttcagaaggtaattcggggtttcaaagacaggtccaacttcctgaaattgaagaacgccgctactctaattcagcggcattggcgaggccacaattgccggaagaattatgggctcatgcgtctaggcttcctaagattacaggcattacacagaagtagaaagttgcaccagcagtacagacttgccagacagcgcataattcaatttcaagcacgatgtcgagcctatctggtgcggaaggccttcaggcataggctgtgggccgtgctgacggtgcaggcttatgcaagagggatgatagccaggagactgcatcaaaggttacgggctgaatatttatggcgactagaggcagagaaaatgcggctggccgaagaggagaagctgagaaaagaaatgtctgccaagaaggcgaaagaggaggctgagcggaaacaccaagaacgcctcgcgcaactggcaagagaggatgctgagcgagaattgaaggaaaaagaagccgctaggcggaaaaaggaactgctagagcaaatggaaagagctcggcacgagcctgtgaatcatagcgatatggtagataaaatgtttggattccttgggacctcaggtggtctgcctggccaagagggtcaggctccttcaggttttgaggaccttgaacgcggtagacgggaaatggttgaggaggacttggacgccgctctgcccctgcctgacgaagacgaagaagacctctccgaatacaaatttgctaaattcgccgcaacttattttcagggcacgactacacacagctacacaagaagacccttgaagcagccactgttgtaccatgacgatgaaggcgaccaactagctgctctcgccgtgtggattactattctacgttttatgggcgaccttcccgaaccaaagtaccacacggctatgtcagacggcagcgagaagatacccgtcatgactaagatctatgagacactgggaaagaaaacttacaaacgggaacttcaggcactgcagggagagggcgaagcccagttacccgaaggacaaaagaaaagtagtgtcagacataaactagtacacctgaccctcaaaaaaaaatctaaactgactgaagaagttaccaagagactgcacgacggcgagagcacggtgcaaggcaactcgatgctggaggaccgtcccacgagcaatcttgagaagctgcatttcatcattggaaatgggattctcagaccagccctgaggtccgtgcccggaggaggggacaccagagcgtag

SEQ ID NO: 44386 - DNA, 3609 bp, Artificial Sequence
  derived and/or modified sequence
gccctgctgcagaagggcgaccacgtgtggatggacctgagactgggccaggagttcgacgtgcccatcggcgccgtggtgaagctgtgcgacagcggccaggtgcaggtggtggacgacgaggacaacgagcactggatcagcccccagaacgccacccacatcaagcccatgcaccccaccagcgtgcacggcgtggaggacatgatcagactgggcgacctgaacgaggccggcatcctgagaaacctgctgatcagatacagagaccacctgatctacacctacaccggcagcatcctggtggccgtgaacccctaccagctgctgagcatctacagccccgagcacatcagacagtacaccaacaagaagatcggcgagatgcccccccacatcttcgccatcgccgacaactgctacttcaacatgaagagaaacagcagagaccagtgctgcatcatcagcggcgagagcggcgccggcaagaccgagagcaccaagctgatcctgcagttcctggccgccatcagcggccagcacagctggatcgagcagcaggtgctggaggccacccccatcctggaggccttcggcaacgccaagaccatcagaaacgacaacagcagcagattcggcaagtacatcgacatccacttcaacaagagaggcgccatcgagggcgccaagatcgagcagtacctgctggagaagagcagagtgtgcagacaggccctggacgagagaaactaccacgtgttctactgcatgctggagggcatgagcgaggaccagaagaagaagctgggcctgggccaggccagcgactacaactacctggccatgggcaactgcatcacctgcgagggcagagtggacagccaggagtacgccaacatcagaagcgccatgaaggtgctgatgttcaccgacaccgagaactgggagatcagcaagctgctggccgccatcctgcacctgggcaacctgcagtacgaggccagaaccttcgagaacctggacgcctgcgaggtgctgttcagccccagcctggccaccgccgccagcctgctggaggtgaacccccccgacctgatgagctgcctgaccagcagaaccctgatcaccagaggcgagaccgtgagcacccccctgagcagagagcaggccctggacgtgagagacgccttcgtgaagggcatctacggcagactgttcgtgtggatcgtggacaagatcaacgccgccatctacaagccccccagccaggacgtgaagaacagcagaagaagcatcggcctgctggacatcttcggcttcgagaacttcgccgtgaacagcttcgagcagctgtgcatcaacttcgccaacgagcacctgcagcagttcttcgtgagacacgtgttcaagctggagcaggaggagtacgacctggagagcatcgactggctgcacatcgagttcaccgacaaccaggacgccctggacatgatcgccaacaagcccatgaacatcatcagcctgatcgacgaggagagcaagttccccaagggcaccgacaccaccatgctgcacaagctgaacagccagcacaagctgaacgccaactacatcccccccaagaacaaccacgagacccagttcggcatcaaccacttcgccggcatcgtgtactacgagacccagggcttcctggagaagaacagagacaccctgcacggcgacatcatccagctggtgcacagcagcagaaacaagttcatcaagcagatcttccaggccgacgtggccatgggcgccgagaccagaaagagaagccccaccctgagcagccagttcaagagaagcctggagctgctgatgagaaccctgggcgcctgccagcccttcttcgtgagatgcatcaagcccaacgagttcaagaagcccatgctgttcgacagacacctgtgcgtgagacagctgagatacagcggcatgatggagaccatcagaatcagaagagccggctaccccatcagatacagcttcgtggagttcgtggagagatacagagtgctgctgcccggcgtgaagcccgcctacaagcagggcgacctgagaggcacctgccagagaatggccgaggccgtgctgggcacccacgacgactggcagatcggcaagaccaagatcttcctgaaggaccaccacgacatgctgctggaggtggagagagacaaggccatcaccgacagagtgatcctgctgcagaaggtgatcagaggcttcaaggacagaagcaacttcctgaagctgaagaacgccgccaccctgatccagagacactggagaggccacaactgcagaaagaactacggcctgatgagactgggcttcctgagactgcaggccctgcacagaagcagaaagctgcaccagcagtacagactggccagacagagaatcatccagttccaggccagatgcagagcctacctggtgagaaaggccttcagacacagactgtgggccgtgctgaccgtgcaggcctacgccagaggcatgatcgccagaagactgcaccagagactgagagccgagtacctgtggagactggaggccgagaagatgagactggccgaggaggagaagctgagaaaggagatgagcgccaagaaggccaaggaggaggccgagagaaagcaccaggagagactggcccagctggccagagaggacgccgagagagagctgaaggagaaggaggccgccagaagaaagaaggagctgctggagcagatggagagagccagacacgagcccgtgaaccacagcgacatggtggacaagatgttcggcttcctgggcaccagcggcggcctgcccggccaggagggccaggcccccagcggcttcgaggacctggagagaggcagaagagagatggtggaggaggacctggacgccgccctgcccctgcccgacgaggacgaggaggacctgagcgagtacaagttcgccaagttcgccgccacctacttccagggcaccaccacccacagctacaccagaagacccctgaagcagcccctgctgtaccacgacgacgagggcgaccagctggccgccctggccgtgtggatcaccatcctgagattcatgggcgacctgcccgagcccaagtaccacaccgccatgagcgacggcagcgagaagatccccgtgatgaccaagatctacgagaccctgggcaagaagacctacaagagagagctgcaggccctgcagggcgagggcgaggtgctgcaggcccagctgcccgagggccagaagaagagcagcgtgagacacaagctggtgcacctgaccctgaagaagaagagcaagctgaccgaggaggtgaccaagagactgcacgacggcgagagcaccgtgcagggcaacagcatgctggaggacagacccaccagcaacctggagaagctgcacttcatcatcggcaacggcatcctgagacccgccctgagaagcgtgccccccgagagcctgctggtggccgagtggtgcctgtgccagcccagcaagagactgagccaggcccccggcttcggcttcgccgccagctag

SEQ ID NO: 44387 - DNA, 3537 bp, Artificial Sequence
  derived and/or modified sequence
atggtgatcctgcagcagggcgaccacgtgtggatggacctgagactgggccaggagttcgacgtgcccatcggcgccgtggtgaagctgtgcgacagcggccaggtgcaggtggtggacgacgaggacaacgagcactggatcagcccccagaacgccacccacatcaagcccatgcaccccaccagcgtgcacggcgtggaggacatgatcagactgggcgacctgaacgaggccggcatcctgagaaacctgctgatcagatacagagaccacctgatctacacctacaccggcagcatcctggtggccgtgaacccctaccagctgctgagcatctacagccccgagcacatcagacagtacaccaacaagaagatcggcgagatgcccccccacatcttcgccatcgccgacaactgctacttcaacatgaagagaaacagcagagaccagtgctgcatcatcagcggcgagagcggcgccggcaagaccgagagcaccaagctgatcctgcagttcctggccgccatcagcggccagcacagctggatcgagcagcaggtgctggaggccacccccatcctggaggccttcggcaacgccaagaccatcagaaacgacaacagcagcagattcggcaagtacatcgacatccacttcaacaagagaggcgccatcgagggcgccaagatcgagcagtacctgctggagaagagcagagtgtgcagacaggccctggacgagagaaactaccacgtgttctactgcatgctggagggcatgagcgaggaccagaagaagaagctgggcctgggccaggccagcgactacaactacctggccatgggcaactgcatcacctgcgagggcagagtggacagccaggagtacgccaacatcagaagcgccatgaaggtgctgatgttcaccgacaccgagaactgggagatcagcaagctgctggccgccatcctgcacctgggcaacctgcagtacgaggccagaaccttcgagaacctggacgcctgcgaggtgctgttcagccccagcctggccaccgccgccagcctgctggaggtgaacccccccgacctgatgagctgcctgaccagcagaaccctgatcaccagaggcgagaccgtgagcacccccctgagcagagagcaggccctggacgtgagagacgccttcgtgaagggcatctacggcagactgttcgtgtggatcgtggacaagatcaacgccgccatctacaagccccccagccaggacgtgaagaacagcagaagaagcatcggcctgctggacatcttcggcttcgagaacttcgccgtgaacagcttcgagcagctgtgcatcaacttcgccaacgagcacctgcagcagttcttcgtgagacacgtgttcaagctggagcaggaggagtacgacctggagagcatcgactggctgcacatcgagttcaccgacaaccaggacgccctggacatgatcgccaacaagcccatgaacatcatcagcctgatcgacgaggagagcaagttccccaagggcaccgacaccaccatgctgcacaagctgaacagccagcacaagctgaacgccaactacatcccccccaagaacaaccacgagacccagttcggcatcaaccacttcgccggcatcgtgtactacgagacccagggcttcctggagaagaacagagacaccctgcacggcgacatcatccagctggtgcacagcagcagaaacaagttcatcaagcagatcttccaggccgacgtggccatgggcgccgagaccagaaagagaagccccaccctgagcagccagttcaagagaagcctggagctgctgatgagaaccctgggcgcctgccagcccttcttcgtgagatgcatcaagcccaacgagttcaagaagcccatgctgttcgacagacacctgtgcgtgagacagctgagatacagcggcatgatggagaccatcagaatcagaagagccggctaccccatcagatacagcttcgtggagttcgtggagagatacagagtgctgctgcccggcgtgaagcccgcctacaagcagggcgacctgagaggcacctgccagagaatggccgaggccgtgctgggcacccacgacgactggcagatcggcaagaccaagatcttcctgaaggaccaccacgacatgctgctggaggtggagagagacaaggccatcaccgacagagtgatcctgctgcagaaggtgatcagaggcttcaaggacagaagcaacttcctgaagctgaagaacgccgccaccctgatccagagacactggagaggccacaactgcagaaagaactacggcctgatgagactgggcttcctgagactgcaggccctgcacagaagcagaaagctgcaccagcagtacagactggccagacagagaatcatccagttccaggccagatgcagagcctacctggtgagaaaggccttcagacacagactgtgggccgtgctgaccgtgcaggcctacgccagaggcatgatcgccagaagactgcaccagagactgagagccgagtacctgtggagactggaggccgagaagatgagactggccgaggaggagaagctgagaaaggagatgagcgccaagaaggccaaggaggaggccgagagaaagcaccaggagagactggcccagctggccagagaggacgccgagagagagctgaaggagaaggaggccgccagaagaaagaaggagctgctggagcagatggagagagccagacacgagcccgtgaaccacagcgacatggtggacaagatgttcggcttcctgggcaccagcggcggcctgcccggccaggagggccaggcccccagcggcttcgaggacctggagagaggcagaagagagatggtggaggaggacctggacgccgccctgcccctgcccgacgaggacgaggaggacctgagcgagtacaagttcgccaagttcgccgccacctacttccagggcaccaccacccacagctacaccagaagacccctgaagcagcccctgctgtaccacgacgacgagggcgaccagctggccgccctggccgtgtggatcaccatcctgagattcatgggcgacctgcccgagcccaagtaccacaccgccatgagcgacggcagcgagaagatccccgtgatgaccaagatctacgagaccctgggcaagaagacctacaagagagagctgcaggccctgcagggcgagggcgaggcccagctgcccgagggccagaagaagagcagcgtgagacacaagctggtgcacctgaccctgaagaagaagagcaagctgaccgaggaggtgaccaagagactgcacgacggcgagagcaccgtgcagggcaacagcatgctggaggacagacccaccagcaacctggagaagctgcacttcatcatcggcaacggcatcctgagacccgccctgagaagcgtgcccggcggcggcgacaccagagcctag

SEQ ID NO: 44388 - protein, 2175 aa, Artificial Sequence
  derived and/or modified sequence
MVILQQGDHVWMDLRLGQEFDVPIGAVVKLCDSGQVQVVDDEDNEHWISPQNATHIKPMHPTSVHGVEDMIRLGDLNEAGILRNLLIRYRDHLIYTYTGSILVAVNPYQLLSIYSPEHIRQYTNKKIGEMPPHIFAIADNCYFNMKRNSRDQCCIISGESGAGKTESTKLILQFLAAISGQHSWIEQQVLEATPILEAFGNAKTIRNDNSSRFGKYIDIHFNKRGAIEGAKIEQYLLEKSRVCRQALDERNYHVFYCMLEGMSEDQKKKLGLGQASDYNYLAMGNCITCEGRVDSQEYANIRSAMKVLMFTDTENWEISKLLAAILHLGNLQYEARTFENLDACEVLFSPSLATAASLLEVNPPDLMSCLTSRTLITRGETVSTPLSREQALDVRDAFVKGIYGRLFVWIVDKINAAIYKPPSQDVKNSRRSIGLLDIFGFENFAVNSFEQLCINFANEHLQQFFVRHVFKLEQEEYDLESIDWLHIEFTDNQDALDMIANKPMNIISLIDEESKFPKGTDTTMLHKLNSQHKLNANYIPPKNNHETQFGINHFAGIVYYETQGFLEKNRDTLHGDIIQLVHSSRNKFIKQIFQADVAMGAETRKRSPTLSSQFKRSLELLMRTLGACQPFFVRCIKPNEFKKPMLFDRHLCVRQLRYSGMMETIRIRRAGYPIRYSFVEFVERYRVLLPGVKPAYKQGDLRGTCQRMAEAVLGTHDDWQIGKTKIFLKDHHDMLLEVERDKAITDRVILLQKVIRGFKDRSNFLKLKNAATLIQRHWRGHNCRKNYGLMRLGFLRLQALHRSRKLHQQYRLARQRIIQFQARCRAYLVRKAFRHRLWAVLTVQAYARGMIARRLHQRLRAEYLWRLEAEKMRLAEEEKLRKEMSAKKAKEEAERKHQERLAQLAREDAERELKEKEAARRKKELLEQMERARHEPVNHSDMVDKMFGFLGTSGGLPGQEGQAPSGFEDLERGRREMVEEDLDAALPLPDEDEEDLSEYKFAKFAATYFQGTTTHSYTRRPLKQPLLYHDDEGDQLAALAVWITILRFMGDLPEPKYHTAMSDGSEKIPVMTKIYETLGKKTYKRELQALQGEGEAQLPEGQKKSSVRHKLVHLTLKKKSKLTEEVTKRLHDGESTVQGNSMLEDRPTSNLEKLHFIIGNGILRPALRDEIYCQISKQLTHNPSKSSYARGWILVSLCVGCFAPSEKFVKYLRNFIHGGPPGYAPYCEERLRRTFVNGTRTQPPSWLELQATKSKKPIMLPVTFMDGTTKTLLTDSATTAKELCNALADKISLKDRFGFSLYIALFDKVSSLGSGSDHVMDAISQCEQYAKEQGAQERNAPWRLFFRKEVFTPWHSPSEDNVATNLIYQQVVRGVKFGEYRCEKEDDLAELASQQYFVDYGSEMILERLLNLVPTYIPDREITPLKTLEKWAQLAIAAHKKGIYAQRRTDAQKVKEDVVSYARFKWPLLFSRFYEAYKFSGPSLPKNDVIVAVNWTGVYFVDEQEQVLLELSFPEIMAVSSSRGAKTTAPSFTLATIKGDEYTFTSSNAEDIRDLVVTFLEGLRKRSKYVVALQDNPNPAGEESGFLSFAKGDLIILDHDTGEQVMNSGWANGINERTKQRGDFPTDSVYVMPTVTMPPREIVALVTMTPDQRQDVVRLLQLRTAEPEVRAKPYTLEEFSYDYFRPPPKHTLSRVMVSKARGKDRLWSHTREPLKQALLKKLLGSEELSQEACLAFIAVLKYMGDYPSKRTRSVNELTDQIFEGPLKAEPLKDEAYVQILKQLTDNHIRYSEERGWELLWLCTGLFPPSNILLPHVQRFLQSRKHCPLAIDCLQRLQKALRNGSRKYPPHLVEVEAIQHKTTQIFHKVYFPDDTDEAFEVESSTKAKDFCQNIATRLLLKSSEGFSLFVKIADKVLSVPENDFFFDFVRHLTDWIKKARPIKDGIVPSLTYQVFFMKKLWTTTVPGKDPMADSIFHYYQELPKYLRGYHKCTREEVLQLGALIYRVKFEEDKSYFPSIPKLLRELVPQDLIRQVSPDDWKRSIVAYFNKHAGKSKEEAKLAFLKLIFKWPTFGSAFFEQTTEPNFPEILLIAINKYGVSLIDPKTKDILTTHPFTKISNWSSGNTYFHITIGNLVRGSKLLCETSLGYKMDDLLTSYISQMLTAMSKQRGSRSGK

SEQ ID NO: 44389 - DNA, 6528 bp, Artificial Sequence
  derived and/or modified sequence
atggtgatacttcaacagggcgatcacgtctggatggatctaagacttgggcaggagttcgacgtgcccattggtgccgttgtgaagctctgcgatagtgggcaggttcaggtggtagacgatgaagacaatgagcattggatctctcctcagaatgcgacgcacatcaagcccatgcacccaacttctgttcatggggtggaagacatgatcagactgggcgacctgaatgaagccggaattttgcgcaacctgctaattcgttacagggatcatctaatctacacatacaccggcagcatcctggtagcggttaacccgtatcagctgctcagcatatactcccctgagcacatcagacagtatacgaacaaaaagatcggcgagatgccaccccacatctttgcgatcgccgacaattgctatttcaatatgaaaagaaattctcgggatcagtgttgcattatttccggggagtccggcgctggaaagacagagtctactaagcttatcttgcaattcctggctgctatctctggacagcactcttggatcgagcaacaagtgctggaggcaacaccgattctggaagctttcggcaacgccaagaccattcgaaatgacaacagctccaggttcggtaagtatatagatatacactttaataaacggggcgctatcgagggagctaagatagagcagtatttgctagagaagtcccgcgtgtgtcgccaggcactcgacgaaagaaattaccacgttttctactgcatgctagaaggcatgtctgaagatcagaaaaaaaagctcggacttgggcaggcatcagattacaactaccttgcaatggggaattgcattacctgtgagggaagagtagactcgcaggagtacgcaaatatccggtctgccatgaaggtgctgatgtttactgacaccgaaaactgggaaatttccaaactcttggccgccattttgcacctgggaaatttgcagtatgaggccagaaccttcgaaaaccttgatgcctgtgaggtcttattctctccatctctggcaaccgctgcgtctctgttggaggtcaacccccccgatctcatgagttgtctaaccagcaggaccctgattacccgtggtgaaactgtgtcgacgccactctccagagaacaagcacttgacgttcgagatgcgtttgtgaaaggaatatacgggagactgttcgtgtggattgtggacaagatcaatgcagcaatttacaaaccgccgagccaggacgttaagaactccaggcggagcatcggactgttggacatttttgggtttgaaaatttcgccgtgaattccttcgagcagttatgcatcaactttgctaacgaacacttgcaacagttctttgtacggcacgtatttaagctggaacaggaggagtacgatctggagtccatagattggcttcacatcgaatttacagacaaccaggatgcgttagatatgatcgcaaacaagccaatgaatattatctcactcattgacgaagaatctaagttccccaaaggcacggatacgaccatgctgcacaaactgaactctcaacacaagctgaacgcaaattatatcccacctaaaaacaatcatgagacacaattcgggattaatcactttgcgggcattgtgtactacgaaactcaaggttttttggaaaagaacagagatacgttacatggtgatatcatccagctggtccacagctctagaaataaattcatcaaacagatctttcaggcggatgtggctatgggggctgaaacccgaaagagatcacccacactgtcctcccaatttaaacgcagtctggaattgttgatgcgcacccttggtgcttgccagccattcttcgtacgctgcattaagcccaatgagttcaagaaacctatgttatttgatagacacctgtgcgtacggcaactccgctactctggtatgatggaaactatacggataaggagagcaggctatcctatccgatattcctttgtagaatttgttgagcggtacagggtccttttgccgggcgtgaagcccgcttataaacagggggatctcaggggaacatgccagaggatggctgaggccgtgctgggcactcacgatgactggcaaattggcaagaccaagattttcctgaaggatcaccacgatatgcttctggaagtggagagggacaaggcaataacggaccgcgtaatcttattgcagaaggtaataaggggtttcaaagatcggtcaaatttcctgaaattgaagaacgccgctacactcatacaaaggcattggagggggcacaactgtcgcaagaactatgggcttatgagactagggttcctgagattacaggctcttcatcgctctcggaagctacaccaacagtaccggctggctaggcagcgaattatccagttccaggcacggtgtcgggcctacttggtccggaaagcgtttaggcaccgcctgtgggctgtgctcaccgtgcaggcttacgccagaggcatgattgcccggagactgcaccagcgcctccgagcagagtatctctggcggctggaggcggagaaaatgcgacttgctgaggaagaaaaattacgtaaggagatgagcgccaagaaggcaaaagaggaggccgaacgaaagcaccaggagcgcctggcccagctcgctcgcgaggatgccgagcgggagcttaaagagaaagaagctgccagacgcaagaaagagttgctcgagcagatggaaagagctagacatgagccagtcaaccatagcgacatggtggacaaaatgtttggctttttagggacttccggcggcctccccggccaggagggccaggctccgtcaggctttgaagacctggagagggggaggcgcgagatggttgaggaagacctcgacgcagctttgcctctccccgatgaggacgaggaggatttgagcgaatataaattcgccaaattcgctgctacatacttccaggggactactacccacagttacactaggcgacctctaaagcaacccctgctttatcacgacgatgagggggatcaactagctgcgctggctgtgtggattaccatcctgaggtttatgggagacctgcccgagcctaagtaccacaccgctatgtcggacggttcagaaaaaatccccgtgatgaccaagatttacgaaactctggggaagaaaacatataagcgcgagctccaggctctgcagggggagggcgaggcacagctgcccgaagggcaaaaaaaatcttctgtgcggcataagctggtacatcttacccttaaaaagaaatcgaagctcacagaggaggtgacgaaacggttacacgacggagaatccaccgtgcaaggcaactccatgctggaggacagacccacttctaacttggaaaagctgcactttatcattggaaacggcattttgcggccggccctcagagatgagatttactgtcagatttccaagcagctgacccataacccgagtaaaagttcatatgcgcgcggatggatcctcgtaagtctttgcgtcgggtgcttcgccccaagtgagaaatttgtgaagtacctccggaactttattcacggaggaccccccggttatgccccctactgtgaagagcgcctgcgaagaacttttgttaacggcacacggactcagccaccctcatggctcgagctgcaggccactaaatctaagaaaccaataatgctgcctgtaaccttcatggacgggaccaccaaaaccctccttactgatagcgcaacaacggccaaggagctttgtaatgcactggctgataagatatcactgaaggaccgctttgggtttagcctttacatcgctttgtttgacaaagtaagcagcctgggaagcggttcagaccatgtaatggatgccatttcacagtgtgagcagtatgccaaggagcagggcgctcaggagcgaaacgccccatggagactgtttttcagaaaggaggttttcactccttggcactcccccagcgaggacaatgttgcgacgaatctcatctaccagcaggtggttcggggggttaagtttggagagtacaggtgcgagaaagaagacgatttagcagagctagcaagtcagcagtacttcgtggactatgggtctgagatgattctcgaacgcctactgaacctcgtgccgacctatatccccgatcgtgaaattactcccctaaaaacactggagaaatgggctcagctggccattgcagcccacaaaaagggcatctacgcccaaaggcggaccgacgcacagaaggtgaaagaggacgtggtgtcatatgccaggttcaagtggccactgctcttttcaagattctacgaagcttacaaattttctgggccaagtctaccaaaaaacgatgtcatcgtggctgtcaactggacaggagtatatttcgtcgacgaacaggagcaggtactgttagagttgagctttcccgagattatggctgtgtctagctcacggggcgctaagaccaccgccccttccttcactctagctaccattaagggggacgaatataccttcacttcatctaatgccgaggacataagagacttagtggtgacctttctggaaggcctccgtaagcgcagtaagtacgtcgttgctctgcaagataaccctaaccctgccggcgaggagtctgggttcctctccttcgctaagggcgatctaattatcctagatcacgatacaggcgagcaggtcatgaattcagggtgggcgaatggcatcaacgaacggacaaagcagaggggagattttccgaccgattcggtctacgtcatgcctacggttactatgcctccacgcgagatcgtggccctagtaacaatgacacccgaccaaagacaagatgttgtccggctactgcaactgaggactgccgagccggaggtgcgagcgaagccctataccctcgaggagttttcatatgactatttccgcccacctcctaagcatacgctgtcaagagtgatggtgtccaaggcgcgagggaaggatcgcctttggtctcacacccgcgagccattgaaacaagcattacttaaaaaactccttggctcagaggagctttcccaagaggcctgtcttgcctttatcgcggtgctcaaatacatgggagattaccccagtaagcggacaagaagtgttaatgaactcacggatcagatttttgagggccccctgaaggctgaaccactcaaagatgaggcctatgtgcaaatactgaaacagctgacagacaaccatatcagatactctgaggagcggggctgggagctcctgtggttgtgcactggcctatttccaccttctaacatcctgctgcctcatgtacagcgctttttgcagagtcgtaaacattgtcccctcgcgatcgactgcctgcaaaggttgcagaaggcacttcgcaacgggtcgcgcaaatatcccccccacttggtggaggtagaagcaatacaacacaaaaccacccagatttttcacaaggtttatttccccgacgatacagacgaagctttcgaggtggaatcttctacaaaggctaaggacttctgtcagaacatcgccactaggctgcttctgaagtcctccgaagggttctccctctttgtaaaaattgccgataaagtactgagtgtccccgagaatgatttcttttttgatttcgtccggcacctcaccgattggattaaaaaggctcgacccattaaagacggcattgtgccctctctgacatatcaggtcttttttatgaaaaagctctggacaactaccgtgccgggcaaagaccctatggctgattccatcttccactactaccaagagctgcctaagtacctgcgcggatatcataagtgtactcgcgaagaggtgctgcagctcggcgctctgatttacagagtcaaattcgaggaagacaaaagctacttcccgtccatccctaagcttctccgtgagctggttccccaggacctgattagacaggtcagccccgatgactggaaaaggagtattgttgcttacttcaataagcatgccggcaaatcgaaggaagaggctaaacttgcgttcttgaagttgatctttaagtggccgacttttgggtcagcctttttcgaacagacaacagagccaaacttcccagagattctgttgatcgccattaataaatatggggtcagccttatcgatccaaaaacaaaagatatactgactacccacccctttaccaagatttcgaactggagtagtggcaatacctactttcacatcacaatagggaatctcgtccgggggagtaagctgctttgcgagacctccctaggatataaaatggatgatctgctgacatcctatatctcccagatgcttacagcgatgagtaaacaacggggttccagaagcggtaagtag

SEQ ID NO: 44390 - DNA, 6528 bp, Artificial Sequence
  derived and/or modified sequence
atggtgatcctgcagcagggcgaccacgtgtggatggacctgcggctgggccaggagtttgatgtgcccatcggggctgtggtgaagctgtgtgacagcggccaggtgcaggtggtggatgatgaggacaatgagcactggatcagcccccagaatgccacccacatcaagcccatgcaccccacctctgtgcatggagtggaggacatgatccggctgggggacctgaatgaagctggcatcctgaggaacctgctgatccgctacagagaccacctgatctacacctacacaggcagcatcctggtggccgtgaacccctaccagctgctgagcatctacagccctgagcacatccggcagtacaccaacaagaagattggagagatgccaccccacatctttgccatcgctgacaactgctacttcaacatgaagaggaacagccgggaccagtgctgcatcatctctggagagagcggggccggcaagacagagagcaccaagctgatcctgcagttcctggccgccatcagcggccagcacagctggattgagcagcaggtgctggaggccacccccatcctggaggcctttggaaatgccaagaccatcagaaatgacaacagcagcagatttgggaagtacatcgacatccacttcaacaagagaggagccattgaaggagccaagattgagcagtacctgctggagaagagccgggtgtgccggcaggccctggatgagaggaactaccacgtgttctactgcatgctggagggcatgtctgaggaccagaagaagaagctgggcctgggccaggccagtgactacaactacctggccatgggcaactgcatcacctgtgagggccgggtggacagccaggagtatgccaacatccgcagcgccatgaaggtgctgatgttcacagacacagagaactgggagatcagcaagctgctggccgccatcctgcacctgggcaacctgcagtatgaggcccggacctttgagaacctggatgcctgtgaggtgctcttcagccccagcctggccacagctgccagcctgctggaggtgaaccccccagacctgatgagctgcctgaccagcaggaccctcatcaccagaggagaaacagtgtccacccccctgagccgggagcaggccctggatgtgagagatgcctttgtgaagggcatctacggccgcctgtttgtgtggatcgtggacaagatcaatgctgccatctacaagccacccagccaggatgtgaagaacagccgccgcagcatcggcctgctggacatctttggatttgagaactttgctgtgaacagctttgagcagctgtgcatcaactttgccaatgagcacctgcagcagttctttgtgcgccacgtgttcaagctggagcaggaggagtatgacctggagagcattgactggctgcacatcgagttcacagacaaccaggatgccctggacatgattgccaacaagcccatgaacatcatcagcctgattgatgaggagagcaagttccccaagggcacagacaccaccatgctgcacaagctgaacagccagcacaagctgaatgccaactacatcccccccaagaacaaccacgagacccagtttggcatcaaccactttgctggcatcgtgtactatgagacccagggcttcctggagaagaacagagacaccctgcacggggacatcatccagctggtgcacagcagcaggaacaagttcatcaagcagatcttccaggctgatgtggccatgggcgctgagaccaggaagaggagccccaccctgagcagccagttcaagaggagcctggagctgctgatgaggaccctgggcgcctgccagcccttctttgtgcgctgcatcaagcccaatgagttcaagaagcccatgctgtttgacagacacctgtgtgtgcggcagctgcgctacagcggcatgatggagaccatccgcatccggcgggccggctaccccatccgctacagctttgtggagtttgtggagcgctacagagtgctgctgcccggggtgaagccagcctacaagcagggcgacctgcggggcacctgccagaggatggccgaggccgtgctgggcacccatgatgactggcagatcggcaagaccaagatcttcctgaaggaccaccacgacatgctgctggaggtggagcgggacaaggccatcacagacagagtcatcctgctgcagaaggtgatccggggcttcaaggacaggagcaacttcctgaagctgaagaatgctgccaccctcatccagaggcactggaggggccacaactgcaggaagaactacggcctgatgaggctgggcttcctgcggctgcaggccctgcacaggagcaggaagctgcaccagcagtaccgcctggcccggcagaggatcatccagttccaggcccgctgccgggcctacctggtgaggaaggccttccgccaccggctgtgggccgtgctgactgtgcaggcctatgcccggggcatgattgcccggcggctgcaccagaggctgcgggcagagtacctgtggaggctggaggccgagaagatgaggctggccgaggaggagaagctgaggaaggagatgtctgccaagaaggccaaggaggaggccgagaggaagcaccaggagcggctggcccagctggccagagaagatgctgagcgggagctgaaggagaaggaggccgcccggaggaagaaggagctgctggagcagatggagcgggcccggcatgagcctgtgaaccacagcgacatggtggacaagatgtttggcttcctgggcaccagcggcggcctgcccggccaggagggccaggcccccagcggctttgaggacctggagcggggccggcgggagatggtggaggaggacctggatgctgccctgcccctgcctgatgaagatgaggaggacctgtctgagtacaagtttgccaagtttgctgccacctacttccagggcaccaccacccacagctacacccggcggcccctgaagcagcccctgctgtaccatgatgatgaaggagaccagctggccgccctggccgtgtggatcaccatcctgcgcttcatgggagacctgcctgagcccaagtaccacacagccatgtctgatggcagcgagaagatccctgtgatgaccaagatctatgagaccctgggcaagaagacctacaagcgggagctgcaggccctgcagggcgagggggaggcccagctgcctgagggccagaagaagagctctgtgcgccacaagctggtgcacctgaccctgaagaagaagagcaagctgacagaggaggtgaccaagaggctgcatgatggagagagcacagtgcagggcaacagcatgctggaggaccggcccaccagcaacctggagaagctgcacttcatcattggaaatggcatcctgcggcctgccctgagagatgagatctactgccagatcagcaagcagctgacccacaaccccagcaagagcagctatgcccggggctggatcctggtgtccctgtgtgtgggctgctttgcccccagcgagaagtttgtgaagtacctgaggaacttcatccatggaggccccccaggctacgccccctactgtgaggagcggctgcggaggacctttgtgaatggcaccaggacccagcccccatcctggctggagctgcaggccaccaagagcaagaagcccatcatgctgcctgtgaccttcatggatggcaccaccaagaccctgctgacagacagcgccaccacagccaaggagctgtgcaatgccctggccgacaagatcagcctgaaggacagatttggcttcagcctgtacatcgccctgtttgacaaggtgagcagcctgggcagcggcagtgaccacgtgatggatgccatcagccagtgtgagcagtatgccaaggagcagggcgcccaggagagaaatgccccctggaggctcttcttcaggaaggaggtgttcaccccctggcacagccccagtgaagataatgtggccaccaacctgatctaccagcaggtggtgcggggcgtgaagtttggagagtaccgctgtgagaaggaggatgacctggccgagctggccagccagcagtactttgtggactatggcagcgagatgatcctggagcggctgctgaacctggtgcccacctacatcccagaccgggagatcacccccctgaagaccctggagaagtgggcccagctggccatcgccgcccacaagaagggcatctatgcccagaggagaacagatgcccagaaggtgaaggaggatgtggtgtcctatgcccgcttcaagtggcccctgctcttcagccgcttctatgaggcctacaagttcagcggccccagcctgcccaagaatgatgtgattgtggccgtgaactggacaggagtgtactttgtggatgagcaggagcaggtgctgctggagctgtccttccctgagatcatggctgtgagcagcagcagaggagccaagaccacagcccccagcttcaccctggccaccatcaagggagatgagtacaccttcaccagcagcaatgctgaggacatccgggacctggtggtgaccttcctggagggcctgaggaagaggagcaaatatgtggtggccctgcaggacaaccccaacccagctggggaggagagcggcttcctgagctttgccaagggggacctgatcatcctggaccatgacacaggagagcaggtgatgaacagcggctgggccaacggcatcaatgaaagaaccaagcagagaggagacttccccacagacagcgtgtatgtgatgcccaccgtgaccatgccaccccgggagatcgtggccctggtgaccatgaccccagaccagaggcaggatgtggtgcggctgctgcagctgaggacagctgagcctgaggtgcgggccaagccctacaccctggaggagttctcctatgactacttccggcccccacccaagcacaccctgagccgggtgatggtgtccaaggcccggggcaaggaccggctgtggagccacacccgggagcccctgaagcaggccctgctgaagaagctgctgggcagcgaggagctgagccaggaggcctgcctggccttcatcgctgtgctgaagtacatgggagactaccccagcaagaggaccaggtctgtgaatgagctgacagaccagatctttgagggccccctgaaggccgagcccctgaaggatgaggcctacgtgcagatcctgaagcagctgacagacaaccacatccgctacagcgaggagcggggctgggagctgctgtggctgtgcaccggcctcttcccccccagcaacatcctgctgccccacgtgcagcgcttcctgcagagcaggaagcactgccccctggccatcgactgcctgcagaggctgcagaaggccctgagaaatggcagcaggaagtacccaccccacctggtggaggtggaggccatccagcacaagaccacccagatcttccacaaggtgtacttcccagatgacacagatgaggcctttgaggtggagagcagcaccaaggccaaggacttctgccagaacatcgccacccggctgctgctgaagagcagcgagggcttcagcctgtttgtgaagattgctgacaaggtgctgtctgtgcctgaaaatgacttcttctttgattttgtgcgccacctgacagactggatcaagaaggcccggcccatcaaggatggcatcgtgcccagcctgacctaccaggtgttcttcatgaagaagctgtggaccaccaccgtgcctgggaaggaccccatggctgacagcatcttccactactaccaggagctgcccaagtacctgcggggctaccacaagtgcacccgggaggaggtgctgcagctgggcgccctgatctacagagtgaagtttgaggaggacaagagctacttccccagcatccccaagctgctgcgggagctggtgccccaggacctgatccggcaggtgtccccagatgactggaagaggagcatcgtggcctacttcaacaagcatgctgggaagagcaaggaggaggccaagctggccttcctgaagctgatcttcaagtggcccaccttcggcagcgccttctttgagcagaccacagagcccaacttccctgagatcctgctgattgccatcaacaagtatggagtgtccctgattgaccccaagaccaaggacatcctgaccacccaccccttcaccaagatcagcaactggagcagcggcaacacctacttccacatcaccatcggcaacctggtgcggggcagcaagctgctgtgtgagaccagcctgggctacaagatggatgacctgctgaccagctacatcagccagatgctgacagccatgagcaagcagaggggcagccgcagcggcaagtag

SEQ ID NO: 44391 - DNA, 7336 bp, Artificial Sequence
  derived and/or modified sequence
ggcaggagagagagggagagacaagagacacacacagagagacggcgaggaagggaaagacccagagggacgcctagaacgagacttggagccagacagaggaagaggggacgtgtgtttgcagactggctgggcccgtgacccagcttcctgagtcctccgtgcaggtggcagctgtaccaggctggcaggtcactgagagtgggcagctgggccccagaactgtgcctggcccagtgggcagcaggagctcctgacttgggaccatggtgattcttcagcagggggaccatgtgtggatggacctgagattggggcaggagttcgacgtgcccatcggggcggtggtgaagctctgcgactctgggcaggtccaggtggtggatgatgaagacaatgaacactggatctctccgcagaacgcaacgcacatcaagcctatgcaccccacgtcggtccacggcgtggaggacatgatccgcctgggggacctcaacgaggcgggcatcttgcgcaacctgcttatccgctaccgggaccacctcatctacacgtatacgggctccatcctggtggctgtgaacccctaccagctgctctccatctactcgccagagcacatccgccagtataccaacaagaagattggggagatgcccccccacatctttgccattgctgacaactgctacttcaacatgaaacgcaacagccgagaccagtgctgcatcatcagtggggaatctggggccgggaagacggagagcacaaagctgatcctgcagttcctggcagccatcagtgggcagcactcgtggattgagcagcaggtcttggaggccacccccattctggaagcatttgggaatgccaagaccatccgcaatgacaactcaagccgtttcggaaagtacatcgacatccacttcaacaagcggggcgccatcgagggcgcgaagattgagcagtacctgctggaaaagtcacgtgtctgtcgccaggccctggatgaaaggaactaccacgtgttctactgcatgctggagggtatgagtgaggatcagaagaagaagctgggcttgggccaggcctctgactacaactacttggccatgggtaactgcataacctgtgagggccgggtggacagccaggagtacgccaacatccgctccgccatgaaggtgctcatgttcactgacaccgagaactgggagatctcgaagctcctggctgccatcctgcacctgggcaacctgcagtatgaggcacgcacatttgaaaacctggatgcctgtgaggttctcttctccccatcgctggccacagctgcatccctgcttgaggtgaaccccccagacctgatgagctgcctgactagccgcaccctcatcacccgcggggagacggtgtccaccccactgagcagggaacaggcactggacgtgcgcgacgccttcgtaaaggggatctacgggcggctgttcgtgtggattgtggacaagatcaacgcagcaatttacaagcctccctcccaggatgtgaagaactctcgcaggtccatcggcctcctggacatctttgggtttgagaactttgctgtgaacagctttgagcagctctgcatcaacttcgccaatgagcacctgcagcagttctttgtgcggcacgtgttcaagctggagcaggaggaatatgacctggagagcattgactggctgcacatcgagttcactgacaaccaggatgccctggacatgattgccaacaagcccatgaacatcatctccctcatcgatgaggagagcaagttccccaagggcacagacaccaccatgttacacaagctgaactcccagcacaagctcaacgccaactacatcccccccaagaacaaccatgagacccagtttggcatcaaccattttgcaggcatcgtctactatgagacccaaggcttcctggagaagaaccgagacaccctgcatggggacattatccagctggtccactcctccaggaacaagttcatcaagcagatcttccaggccgatgtcgccatgggcgccgagaccaggaagcgctcgcccacacttagcagccagttcaagcggtcactggagctgctgatgcgcacgctgggtgcctgccagcccttctttgtgcgatgcatcaagcccaatgagttcaagaagcccatgctgttcgaccggcacctgtgcgtgcgccagctgcggtactcaggaatgatggagaccatccgaatccgccgagctggctaccccatccgctacagcttcgtagagtttgtggagcggtaccgtgtgctgctgccaggtgtgaagccggcctacaagcagggcgacctccgcgggacttgccagcgcatggctgaggctgtgctgggcacccacgatgactggcagataggcaaaaccaagatctttctgaaggaccaccatgacatgctgctggaagtggagcgggacaaagccatcaccgacagagtcatcctccttcagaaagtcatccggggattcaaagacaggtctaactttctgaagctgaagaacgctgccacactgatccagaggcactggcggggtcacaactgtaggaagaactacgggctgatgcgtctgggcttcctgcggctgcaggccctgcaccgctcccggaagctgcaccagcagtaccgcctggcccgccagcgcatcatccagttccaggcccgctgccgcgcctatctggtgcgcaaggccttccgccaccgcctctgggctgtgctcaccgtgcaggcctatgcccggggcatgatcgcccgcaggctgcaccaacgcctcagggctgagtatctgtggcgcctcgaggctgagaaaatgcggctggcggaggaagagaagcttcggaaggagatgagcgccaagaaggccaaggaggaggccgagcgcaagcatcaggagcgcctggcccagctggctcgtgaggacgctgagcgggagctgaaggagaaggaggccgctcggcggaagaaggagctcctggagcagatggaaagggcccgccatgagcctgtcaatcactcagacatggtggacaagatgtttggcttcctggggacttcaggtggcctgccaggccaggagggccaggcacctagtggctttgaggacctggagcgagggcggagggagatggtggaggaggacctggatgcagccctgcccctgcctgacgaggatgaggaggacctctctgagtataaatttgccaagttcgcggccacctacttccaggggacaaccacgcactcctacacccggcggccactcaaacagccactgctctaccatgacgacgagggtgaccagctggcagccctggcggtctggatcaccatcctccgcttcatgggggacctccctgagcccaagtaccacacagccatgagtgatggcagtgagaagatccctgtgatgaccaagatttatgagaccctgggcaagaagacgtacaagagggagctgcaggccctgcagggcgagggcgaggcccagctccccgagggccagaagaagagcagtgtgaggcacaagctggtgcatttgactctgaaaaagaagtccaagctcacagaggaggtgaccaagaggctgcatgacggggagtccacagtgcagggcaacagcatgctggaggaccggcccacctccaacctggagaagctgcacttcatcatcggcaatggcatcctgcggccagcactccgggacgagatctactgccagatcagcaagcagctgacccacaacccctccaagagcagctatgcccggggctggattctcgtgtctctctgcgtgggctgtttcgccccctccgagaagtttgtcaagtacctgcggaacttcatccacgggggcccgcccggctacgccccgtactgtgaggagcgcctgagaaggacctttgtcaatgggacacggacacagccgcccagctggctggagctgcaggccaccaagtccaagaagccaatcatgttgcccgtgacattcatggatgggaccaccaagaccctgctgacggactcggcaaccacggccaaggagctctgcaacgcgctggccgacaagatctctctcaaggaccggttcgggttctccctctacattgccctgtttgacaaggtgtcctccctgggcagcggcagtgaccacgtcatggacgccatctcccagtgcgagcagtacgccaaggagcagggcgcccaggagcgcaacgccccctggaggctcttcttccgcaaagaggtcttcacgccctggcacagcccctccgaggacaacgtggccaccaacctcatctaccagcaggtggtgcgaggagtcaagtttggggagtacaggtgtgagaaggaggacgacctggctgagctggcctcccagcagtactttgtagactatggctctgagatgatcctggagcgcctcctgaacctcgtgcccacctacatccccgaccgcgagatcacgcccctgaagacgctggagaagtgggcccagctggccatcgccgcccacaagaaggggatttatgcccagaggagaactgatgcccagaaggtcaaagaggatgtggtcagttatgcccgcttcaagtggcccttgctcttctccaggttttatgaagcctacaaattctcaggccccagtctccccaagaacgacgtcatcgtggccgtcaactggacgggtgtgtactttgtggatgagcaggagcaggtacttctggagctgtccttcccagagatcatggccgtgtccagcagcaggggagcgaaaacgacggcccccagcttcacgctggccaccatcaagggggacgaatacaccttcacctccagcaatgctgaggacattcgtgacctggtggtcaccttcctagaggggctccggaagagatctaagtatgttgtggccctgcaggataaccccaaccccgcaggcgaggagtcaggcttcctcagctttgccaagggagacctcatcatcctggaccatgacacgggcgagcaggtcatgaactcgggctgggccaacggcatcaatgagaggaccaagcagcgtggggacttccccaccgacagtgtgtacgtcatgcccactgtcaccatgccaccgcgggagattgtggccctggtcaccatgactcccgatcagaggcaggacgttgtccggctcttgcagctgcgaacggcggagcccgaggtgcgtgccaagccctacacgctggaggagttttcctatgactacttcaggcccccacccaagcacacgctgagccgtgtcatggtgtccaaggcccgaggcaaggaccggctgtggagccacacgcgggaaccgctcaagcaggcgctgctcaagaagctcctgggcagtgaggagctctcgcaggaggcctgcctggccttcattgctgtgctcaagtacatgggcgactacccgtccaagaggacacgctccgtcaacgagctcaccgaccagatctttgagggtcccctgaaagccgagcccctgaaggacgaggcatatgtgcagatcctgaagcagctgaccgacaaccacatcaggtacagcgaggagcggggttgggagctgctctggctgtgcacgggccttttcccacccagcaacatcctcctgccccacgtgcagcgcttcctgcagtcccgaaagcactgcccactcgccatcgactgcctgcaacggctccagaaagccctgagaaacgggtcccggaagtaccctccgcacctggtggaggtggaggccatccagcacaagaccacccagattttccacaaagtctacttccctgatgacactgacgaggccttcgaagtggagtccagcaccaaggccaaggacttctgccagaacatcgccaccaggctgctcctcaagtcctcagagggattcagcctctttgtcaaaattgcagacaaggtcctcagcgttcctgagaatgacttcttctttgactttgttcgacacttgacagactggataaagaaagctcggcccatcaaggacggaattgtgccctcactcacctaccaggtgttcttcatgaagaagctgtggaccaccacggtgccagggaaggatcccatggccgattccatcttccactattaccaggagttgcccaagtatctccgaggctaccacaagtgcacgcgggaggaggtgctgcagctgggggcgctgatctacagggtcaagttcgaggaggacaagtcctacttccccagcatccccaagctgctgcgggagctggtgccccaggaccttatccggcaggtctcacctgatgactggaagcggtccatcgtcgcctacttcaacaagcacgcagggaagtccaaggaggaggccaagctggccttcctgaagctcatcttcaagtggcccacctttggctcagccttcttcgagcaaactacggagccaaacttccctgagatcctcctaattgccatcaacaagtatggggtcagcctcatcgatcccaaaacgaaggatatcctcaccactcatcccttcaccaagatctccaactggagcagcggcaacacctacttccacatcaccattgggaacttggtgcgcgggagcaaactgctctgcgagacgtcactgggctacaagatggatgacctcctgacttcctacattagccagatgctcacagccatgagcaaacagcggggctccaggagcggcaagtgaacagtcacggggaggtgctggttccatgcctgctctcgaggcagcagtgggttcaggcccatcagctacccctgcagctggggaagacttatgccatcccggcagcgaggctgggctggccagccaccactgactataccaactgggcctctgatgttcttccagtgaggcatctctctgggatgcagaacttccctccatccacccctctggcacctgggttggtctaatcctagtttgctgtggccttcccggttgtgagagcctgtgatccttagatgtgtctcctgtttcagaccagccccaccatgcaacttcctttgactttctgtgtaccactgggatagaggaatcaagaggacaatctagctctccatactttgaacaaccaaatgtgcattgaatactctgaaaccgaagggactggatctgcaggtgggatgagggagacagaccacttttctatattgcagtgtgaatgctgggcccctgctcaagtctaccctgatcacctcagggcataaagcatgtttcattctctg

SEQ ID NO: 44392 - DNA, 6528 bp, Artificial Sequence
  derived and/or modified sequence
atggtgatcctgcagcagggcgaccacgtgtggatggacctgcggttgggccaagagtttgatgttcctatcggcgctgtcgtaaagttgtgcgacagcggtcaggttcaggtagttgacgacgaggataacgaacactggatttcaccccagaacgcgacacacataaaacctatgcatcctaccagcgtccacggcgtggaggatatgattcgcctcggagatctgaacgaggcaggaatcctcaggaatttattgatacggtacagggatcacttgatctatacctacaccggtagcatactcgtcgccgtgaacccttaccagctgctgagtatctatagccccgaacacataaggcagtacaccaacaagaaaataggtgagatgccaccacacatcttcgctattgctgataactgctattttaacatgaagcggaattcccgagaccagtgctgcataatcagcggggagagcggcgcgggaaaaacagagtcaactaagttgatcctgcaattcctggccgctatttctgggcaacactcctggatagagcaacaggtgctagaggccacacccatacttgaggcttttggcaacgccaaaaccattagaaacgataatagcagtagatttggcaaatacatcgacatccacttcaacaaaagaggcgccatcgaaggcgccaaaattgagcagtatctcctggaaaaatcccgggtatgtagacaggctcttgacgaaaggaactaccacgttttctactgcatgcttgaagggatgtctgaggaccagaaaaaaaagcttggactgggccaagcgtctgattataactacctcgctatgggtaactgcataacgtgcgaagggcgcgtcgacagccaagaatacgcaaatatccggtcagccatgaaagtactgatgttcactgacaccgaaaattgggaaatctccaagctgctggcagccatacttcacctaggaaatttgcagtacgaagcacgcacctttgagaacctcgatgcatgcgaggttttgttttcccccagtctggcaacagctgccagcctgctggaggtgaatcctccagacctgatgtcttgcttgacatcccgcaccctgatcacccgaggggaaaccgttagtacccccctgtcacgagaacaggctctcgacgttcgcgatgcattcgtcaaaggaatctacgggaggctgtttgtgtggattgtggataaaattaacgcggcaatttataaacctccttcgcaagatgtcaagaatagccgccggtccattggcctccttgacatttttggctttgagaattttgccgttaatagcttcgagcagctttgtatcaattttgctaacgaacaccttcagcagttcttcgtcagacacgtgttcaaactggagcaagaggagtacgatctagaaagcattgattggctgcacattgagttcactgataaccaggacgcactcgacatgatcgctaataagcctatgaacattatatccctgattgacgaggagagcaagtttcccaagggtactgatacgaccatgttgcataaattgaattcacagcacaagctcaatgcaaattacattcctccgaagaacaatcacgagactcagtttggaattaaccacttcgcaggcatcgtctactatgagactcagggctttctagagaaaaacagagacacgttacacggcgacatcatccagctcgtgcattcgagcagaaataaatttatcaagcagatcttccaagcagacgtagccatgggcgctgagaccagaaagcgttctcccactctgagctcacagtttaagaggtctctcgaattattgatgcggaccttaggagcctgccagccattttttgtaaggtgcatcaaaccgaatgagtttaagaagcccatgctttttgatcggcacttgtgtgtgcgtcagttgagatactcgggaatgatggagactattaggatccgaagggctgggtatcccatccgctactctttcgttgagttcgtggaacggtaccgtgtccttctacctggggtcaaacctgcatacaagcaaggagacctgaggggaacctgccagcgaatggcagaagccgttctgggaacacatgacgattggcagatcggtaagactaaaatcttcctcaaagatcaccatgacatgctcctcgaagtggagagggataaggctatcacagatcgcgtcattttacttcagaaggtgattagaggattcaaggaccgctctaacttcctcaaactaaaaaatgccgccaccctgatccagcgccactggcgcggacacaattgtagaaaaaactatggactgatgagactaggcttcctgagactacaggctttacatcgctcccgcaagctgcaccaacagtacagactcgcccgacagagaattattcagtttcaagcccgttgccgcgcttaccttgttaggaaagccttcagacaccgcctgtgggctgtcctgaccgttcaggcatacgcgcgaggtatgatcgcccgaagactgcaccagcggttgcgggcagagtatctctggcgccttgaggccgaaaaaatgcgcctggcggaggaggagaagctgcggaaggaaatgtccgcaaagaaggctaaagaagaagctgaacgcaaacatcaggagcggttggcccagctggcgcgcgaggacgccgagagggagttgaaggaaaaggaggccgcgaggcgtaagaaagagctgctggaacagatggaacgcgcgcgccacgaaccagttaatcattcagatatggtggacaaaatgttcggttttctgggaaccagtggcgggctgcctggtcaggagggccaggcgccaagcggttttgaggatctggagcggggccgccgcgaaatggttgaggaagatctggatgctgcacttcccctgccagacgaggatgaagaagacctgagtgagtataagtttgctaaatttgcagccacttacttccagggaactactacccacagctacacaaggcggcccctcaaacagccgctactgtatcatgacgacgagggagatcagttggccgcattggccgtttggattaccatccttcgattcatgggcgacctcccagagcctaagtatcacaccgctatgagcgatggctcagagaaaatacccgttatgaccaaaatatacgaaacccttggaaagaagacatacaaacgagaactgcaggcacttcagggtgaaggcgaggctcagctgccagaaggccagaaaaaatccagtgtgagacataagttggtccacctcacactaaaaaagaagtctaaactgacagaagaagtcacgaagaggcttcatgatggcgaaagcacagtgcagggaaattctatgctcgaggatcggccgactagtaatctcgagaaattgcattttatcattggaaacggaatactgcgcccagcactgcgagatgaaatctactgtcagataagtaagcagctgacccacaacccgtctaaatctagctacgcccggggatggatcctggttagcctgtgcgtgggctgctttgctccttctgaaaaatttgttaagtatctccgaaattttatacatggaggcccgccgggatacgctccatactgcgaggaacgtctccgcaggacttttgtgaatgggactcgaacacagcctccctcatggctggagctacaggcaacaaagtccaagaagccaatcatgctgccggtgactttcatggacggtacaaccaagacactcctcacagattctgctaccaccgccaaagagctatgcaatgccctggctgataagatttccctcaaagaccgctttggctttagtttgtacatcgcactttttgacaaagtttcgtccctggggagcggctccgaccacgtgatggacgccatcagtcagtgtgagcagtacgctaaagaacagggtgctcaagagcgcaatgcgccatggagactctttttccggaaggaagtgtttaccccatggcatagcccctcagaggacaatgtggccacaaatctcatctaccaacaggtagtgagaggcgtgaaatttggggaatatcgatgtgaaaaggaagatgacctcgccgaactcgctagccagcaatatttcgtagactacggtagcgaaatgattttagaacgcctgttaaacctggtacccacctacattcctgatagagagattacccccctcaaaaccctggaaaaatgggcccagttggcaatcgctgcacataaaaaaggcatatacgcgcagagacggacagacgctcagaaggtaaaagaggatgtcgtttcttacgcacggttcaaatggccccttctattcagtcggttctacgaagcctacaagttctccggaccctccctcccgaagaatgatgtgattgtggcagtcaattggacaggtgtgtatttcgtcgatgagcaggagcaggtcctcctagaacttagctttccagaaatcatggccgtcagctcctctagaggcgcaaagacaactgccccctcgtttactcttgccaccattaagggggatgaatacacgttcacctccagcaacgccgaggacatacgggatttggtagtaacttttcttgagggcctgcgaaaaagaagcaaatatgttgtggctctccaggataacccaaaccccgccggcgaagagtccggctttctgtctttcgctaaaggtgacctgataattctcgaccacgatacgggggagcaggtaatgaactctggatgggccaatggaataaacgaacgaaccaagcagcgcggggactttcctaccgattcggtctacgtgatgccaactgtaacaatgcctcctcgagaaatcgtagctttagtgaccatgacccccgaccagcgccaggacgtggtgaggcttctgcagttgcggactgcagaaccagaggtacgggctaagccatatactcttgaagaattcagctatgattactttaggccgcctcctaagcacaccttgtctcgagtgatggtgtctaaggcccggggaaaggaccggctttggtcccataccagggagccactgaagcaggcacttttgaagaaattactgggctccgaggagctatcccaagaagcctgcctggccttcattgccgtgcttaagtatatgggggactacccgtctaagaggactcgcagtgttaatgaacttaccgaccagattttcgaaggcccactgaaggctgagccgctgaaggatgaagcctatgtccaaatattgaaacagctcacggataatcacataagatatagcgaggaacgagggtgggagctgctatggctttgtacaggcctcttccctccgtcgaacatcctgctcccgcacgtccagcggttcctgcagtccaggaagcattgcccccttgctattgactgcttgcagagactgcagaaagctctaaggaatggttcacgcaagtatcccccacacctggtcgaggttgaagcaatccagcataaaactacccagatctttcacaaagtctattttcctgacgacacagacgaagcatttgaggtcgaatcgtctacaaaggcgaaagacttttgccagaatattgccaccagacttttgctaaaatcttctgagggcttcagcttgttcgtgaagatcgccgacaaggtgttgtccgtgccagagaatgatttctttttcgactttgttcgtcacctcaccgactggatcaagaaagcccgtcctattaaagatggcattgtaccttctttaacctatcaggtgtttttcatgaagaagctgtggacaaccactgtcccgggcaaagatcccatggcagatagtatattccactactaccaagaactgcccaagtacctgagggggtatcacaagtgtacccgcgaggaggtgctgcagcttggcgccctgatctatcgtgtcaaatttgaggaagacaagtcctactttccctccatacctaagcttctacgcgaactggtgccacaggacttaatccgtcaggtgtcccccgatgactggaagcgttctatcgtggcttactttaataagcacgccggtaagtccaaggaagaagctaagctcgctttcttgaagcttatctttaaatggccaacctttggcagtgctttttttgagcagacgacagagccaaatttccctgagatcctcctgatcgcgattaataagtatggagtatccctgattgatcctaaaacaaaggatatactgaccacacacccctttaccaaaatatccaactggtcatcaggcaatacctactttcatatcacgatcggaaatttagtcagagggtcgaaactgctgtgcgaaaccagcctgggatacaaaatggacgatttactgacaagttacataagtcagatgttgacagcaatgagcaagcagcgggggagccgatccgggaagtag

SEQ ID NO: 44393 - DNA, 6527 bp, Artificial Sequence
  derived and/or modified sequence
atggtgatcttacagcagggggatcatgtctggatggatttgcgcttgggccaggaatttgatgtgccaattggggctgtcgtgaaactctgtgactcgggtcaggtccaagtggtggacgacgaggacaatgaacattggatttcgccgcagaatgcaacgcacataaaacctatgcaccctacctcagtgcatggagtcgaggacatgattcgcctcggcgacttgaacgaagctggtattctgaggaacttactcatcagatacagggaccatctcatttatacatataccggttcaattctggtcgccgttaacccctaccagcttctctccatctattcgccagaacacattaggcaatacacaaataagaaaatcggtgaaatgccaccccacattttcgccattgctgacaactgctacttcaatatgaagagaaattcgcgggatcagtgctgcatcatctcaggcgagagtggagccggaaaaactgagagcactaagttaattctgcagttcctcgcggctatcagtggacaacactcctggattgaacagcaagttctggaggccacccccatcctggaggcgttcggcaatgctaagactatccggaatgataatagtagccgttttggcaaatatatcgatatccactttaataagcggggtgccatcgaaggggctaaaattgagcaatacctgctagagaaatctagggtatgtaggcaggctctcgacgaaagaaattatcacgtcttttattgcatgttggaaggaatgagcgaagaccagaaaaaaaagctcggtctgggccaggccagcgattataactacctggcaatgggaaactgcattacctgcgagggacgcgtggatagtcaagaatacgccaacatcagatcggctatgaaagtcctgatgttcactgataccgaaaattgggagataagcaaactgctagctgctatactgcacctggggaacctgcagtatgaggctagaacctttgaaaatttggacgcatgtgaagtcctgttcagccccagcctcgccaccgctgcctctctcctggaagtgaaccctcccgacctaatgtcttgcctgaccagcagaacgttgattacccgaggggagaccgtctcaacccccctctctcgcgagcaggcactcgacgtgcgcgacgcctttgtgaagggaatttatggcagactgtttgtctggatcgtggataagataaacgccgctatttataaaccgccatcacaagacgtcaaaaactcccgccgtagtattggcctgctggacatcttcggcttcgaaaactttgccgtaaatagcttcgagcagctttgcatcaacttcgctaacgaacatttacagcagttcttcgtgcgccacgtctttaagctggagcaggaggagtatgacctcgagagcatagactggctgcatatcgagtttacagacaaccaagacgcattagatatgatcgctaacaaacccatgaatataatttctttaatcgacgaggagtccaaatttccaaaggggacggacacaaccatgctgcacaaactcaacagccagcacaaactgaatgccaattacattccgccaaaaaacaatcatgaaactcagtttggcatcaatcacttcgcaggaatcgtatactatgaaactcagggctttctcgagaagaaccgcgacactctgcatggggacattatccagctggtgcattcttcccgcaacaaatttatcaagcagattttccaggcagacgttgctatgggcgctgaaacccgtaagcgtagtcctaccctctcttcacagttcaagaggtctctggaactgctgatgcgcacattgggagcgtgtcagcccttcttcgttcgttgcattaagcccaatgaattcaagaaaccaatgctattcgaccgacatctgtgtgtgcgtcagcttcgctactctgggatgatggagaccattcgaatccggagagcaggttacccaataaggtattcttttgtggagttcgtggagagatacagagtgctcctaccgggagtgaagcccgcatacaaacagggggacttacgcggaacgtgccagcgaatggccgaggcagtgctcggtacgcacgacgactggcagatcggtaagaccaagatattcctaaaagaccatcacgatatgctccttgaggtagaacgggataaggcgattaccgatcgggtaatcctgttgcaaaaagtcattcggggtttcaaagaccggagtaatttcctaaagctgaaaaacgctgctactctgatccagagacactggcggggacacaactgccggaaaaattatggcctgatgcgcctcggcttcctccggctgcaggccctgcaccggtcccggaaacttcaccaacagtatagactggccagacagcggatcatacagtttcaggcaaggtgccgcgcttatctggtgaggaaagcctttcgccaccgactgtgggcagtgctcactgtgcaagcgtatgctcgcggtatgattgctaggcgcttgcaccagcgcctaagagctgagtatctctggcggctagaagctgagaaaatgcgcctcgcagaagaggagaagttacggaaagaaatgagcgcgaagaaggctaaggaggaagcagagcggaagcatcaggagaggcttgcccagttggcccgagaagacgctgagcgagagctgaaggagaaagaagcagccagaagaaaaaaggagctgttggaacaaatggaacgggctcgccacgagccagtgaaccattcagatatggtggataaaatgttcggcttcctggggacatccggcggattgccaggtcaagaggggcaagccccttctggctttgaagatctggaacggggacgccgtgaaatggtggaggaggacctggatgcggctctgccactgcccgatgaagacgaggaagatctatcagaatataaatttgcaaagtttgcagcgacctactttcagggtactacaactcattcctacactagacggcctcttaaacaacctctcttgtaccacgacgatgagggagaccagttggctgccttggctgtctggatcaccatacttaggttcatgggcgacctgcctgagcccaaatatcatacagcgatgagtgatggctccgaaaagatcccagtaatgacaaaaatttatgaaaccttgggcaagaaaacctataagagagagctgcaggccttgcagggagagggcgaagcccagttaccagaaggccaaaagaagtcatcagttcgccacaagttagtgcatttgactctaaagaaaaagagtaagcttactgaggaggtcactaaacggctccatgatggcgagtccactgtccagggaaactctatgttggaggataggccaacctcgaacctagagaaactgcactttatcatcggtaacgggattctccgacctgccctccgcgatgaaatatactgccagatatctaagcagctaacgcataatccaagtaagtcatcttacgccagaggatggatactggtatcactgtgtgtggggtgtttcgccccttcagaaaaattcgtgaagtacttgaggaacttcattcacgggggtccccctgggtacgccccatactgcgaggagaggctgcggcgaaccttcgtgaacggtacgcggacgcagcctccttcatggctggaattacaagccaccaaaagcaaaaagccaatcatgctgcctgtcactttcatggatggtacaacaaaaacactactaacagactccgctacgacagccaaagaactgtgcaacgcacttgctgacaagatctcgcttaaggacagattcggatttagtctgtacattgcactgtttgataaggtatccagtctggggtcagggtccgaccatgtgatggatgccatatcccaatgcgagcaatatgcaaaggagcagggcgcacaggagaggaacgctccctggaggctattttttcggaaagaggttttcactccgtggcattctccgtcagaggataacgttgctactaatcttatctaccagcaagtagtgcggggtgtgaaatttggcgaataccgctgcgagaaggaagatgatttggccgaactggccagccagcaatactttgtggattatggatctgagatgattttggagcgccttctcaatttagtgcccacctacatccccgacagagagattactccgctgaagactctggagaagtgggcccagttggcgatcgccgcacataagaagggcatctacgcacagaggcggaccgatgctcagaaagtaaaggaggacgtggtctcctacgctagattcaaatggccacttttgttcagccgattctacgaagcctacaagttttccgggccaagcctgcctaagaacgatgtgattgtggccgtcaattggaccggcgtctatttcgtggacgaacaggagcaagtcctgctcgaattgtctttccccgaaatcatggctgtaagcagctctagaggcgcaaaaacaacagcgccttcttttaccttggccacaatcaagggtgacgaatacaccttcaccagtagtaatgcagaagatataagggacctcgttgtgacctttctagagggcctccggaagcgaagcaagtacgtcgtggccctccaggacaatccaaacccagcaggcgaggagagcggctttctgagttttgccaagggggatttgattatcctggatcacgacaccggggaacaagtgatgaattcagggtgggccaacggaattaatgaaaggactaagcaacgcggtgactttcccaccgattctgtctatgtgatgccgacagtaactatgccccctagggagattgtagccctggtcacaatgacacccgatcagcgacaggacgtagtcagactgttgcagttgcgtacagccgagccggaggtgcgcgcaaaaccttacactcttgaagaattcagctacgactactttaggccacctccgaaacacactctctcaagagtcatggtgagcaaagctcgcggtaaggatcggctctggtcacatacacgcgagcccctcaagcaggccctgctgaaaaagcttctgggaagcgaggagctttcccaggaggcctgcttggcctttattgctgtgcttaaatacatgggggactaccccagtaagagaacgagatctgtaaacgagctgacagaccagatcttcgaaggaccactcaaggccgagcctcttaaggatgaagcctacgtgcagatcctgaaacagctcacagacaaccacattaggtactcagaagagagggggtgggagctcttgtggctgtgtaccggcctgttccctccgagtaatattttgttacctcacgttcaaagattcctgcagagtagaaagcactgccccctggccatagactgcctacaacggctgcagaaggccttgcgcaatggatcccgtaaataccccccacatctcgtcgaggtggaggctatccagcacaaaacaacccagatctttcacaaggtatatttccccgacgacacggatgaagcatttgaggtggaaagctcaaccaaggccaaagatttttgtcaaaacatcgccacgaggctcttgctcaagtcaagcgagggcttcagcctgtttgttaagatcgcagataaggtcctgtccgttcctgaaaacgattttttcttcgatttcgtaagacatctaaccgattggataaaaaaggctcgtcccattaaggatgggattgtgccaagcctaacataccaggtcttcttcatgaagaaactctggactacaacggtgcccggaaaggatcctatggcagacagcatcttccactactatcaggaactgcccaaatatctgcgcggatatcacaaatgtacacgggaggaagtgttgcagttgggggctctgatttacagagtgaaattcgaggaggataagtcttatttcccttcaataccgaagctcctccgagaactcgttccacaagacctgatccggcaggtcagtccagatgattggaagcggtccattgtcgcttattttaacaaacacgcaggcaaatcaaaagaggaggccaaactggccttcctgaagctgatttttaagtggccaacattcggaagcgctttcttcgagcagacaacagagcctaattttcctgagatcctcttaatcgctataaataagtacggggtgagccttattgaccccaagaccaaagatatcttgacaacccaccctttcacaaaaatctccaattggtccagcggtaacacttatttccatatcactatcgggaatctggtacgcggttcaaagctgttgtgcgaaacctctctgggatacaaaatggacgatctgctgacatcttacataagccagatgctgaccgccatgagcaagcagaggggaagcagaagtggcaagta

SEQ ID NO: 44394 - DNA, 6528 bp, Artificial Sequence
  derived and/or modified sequence
atggtgatcctgcagcagggcgaccacgtgtggatggacctgagactgggccaggagttcgacgtgcccatcggcgccgtggtgaagctgtgcgacagcggccaggtgcaggtggtggacgacgaggacaacgagcactggatcagcccccagaacgccacccacatcaagcccatgcaccccaccagcgtgcacggcgtggaggacatgatcagactgggcgacctgaacgaggccggcatcctgagaaacctgctgatcagatacagagaccacctgatctacacctacaccggcagcatcctggtggccgtgaacccctaccagctgctgagcatctacagccccgagcacatcagacagtacaccaacaagaagatcggcgagatgcccccccacatcttcgccatcgccgacaactgctacttcaacatgaagagaaacagcagagaccagtgctgcatcatcagcggcgagagcggcgccggcaagaccgagagcaccaagctgatcctgcagttcctggccgccatcagcggccagcacagctggatcgagcagcaggtgctggaggccacccccatcctggaggccttcggcaacgccaagaccatcagaaacgacaacagcagcagattcggcaagtacatcgacatccacttcaacaagagaggcgccatcgagggcgccaagatcgagcagtacctgctggagaagagcagagtgtgcagacaggccctggacgagagaaactaccacgtgttctactgcatgctggagggcatgagcgaggaccagaagaagaagctgggcctgggccaggccagcgactacaactacctggccatgggcaactgcatcacctgcgagggcagagtggacagccaggagtacgccaacatcagaagcgccatgaaggtgctgatgttcaccgacaccgagaactgggagatcagcaagctgctggccgccatcctgcacctgggcaacctgcagtacgaggccagaaccttcgagaacctggacgcctgcgaggtgctgttcagccccagcctggccaccgccgccagcctgctggaggtgaacccccccgacctgatgagctgcctgaccagcagaaccctgatcaccagaggcgagaccgtgagcacccccctgagcagagagcaggccctggacgtgagagacgccttcgtgaagggcatctacggcagactgttcgtgtggatcgtggacaagatcaacgccgccatctacaagccccccagccaggacgtgaagaacagcagaagaagcatcggcctgctggacatcttcggcttcgagaacttcgccgtgaacagcttcgagcagctgtgcatcaacttcgccaacgagcacctgcagcagttcttcgtgagacacgtgttcaagctggagcaggaggagtacgacctggagagcatcgactggctgcacatcgagttcaccgacaaccaggacgccctggacatgatcgccaacaagcccatgaacatcatcagcctgatcgacgaggagagcaagttccccaagggcaccgacaccaccatgctgcacaagctgaacagccagcacaagctgaacgccaactacatcccccccaagaacaaccacgagacccagttcggcatcaaccacttcgccggcatcgtgtactacgagacccagggcttcctggagaagaacagagacaccctgcacggcgacatcatccagctggtgcacagcagcagaaacaagttcatcaagcagatcttccaggccgacgtggccatgggcgccgagaccagaaagagaagccccaccctgagcagccagttcaagagaagcctggagctgctgatgagaaccctgggcgcctgccagcccttcttcgtgagatgcatcaagcccaacgagttcaagaagcccatgctgttcgacagacacctgtgcgtgagacagctgagatacagcggcatgatggagaccatcagaatcagaagagccggctaccccatcagatacagcttcgtggagttcgtggagagatacagagtgctgctgcccggcgtgaagcccgcctacaagcagggcgacctgagaggcacctgccagagaatggccgaggccgtgctgggcacccacgacgactggcagatcggcaagaccaagatcttcctgaaggaccaccacgacatgctgctggaggtggagagagacaaggccatcaccgacagagtgatcctgctgcagaaggtgatcagaggcttcaaggacagaagcaacttcctgaagctgaagaacgccgccaccctgatccagagacactggagaggccacaactgcagaaagaactacggcctgatgagactgggcttcctgagactgcaggccctgcacagaagcagaaagctgcaccagcagtacagactggccagacagagaatcatccagttccaggccagatgcagagcctacctggtgagaaaggccttcagacacagactgtgggccgtgctgaccgtgcaggcctacgccagaggcatgatcgccagaagactgcaccagagactgagagccgagtacctgtggagactggaggccgagaagatgagactggccgaggaggagaagctgagaaaggagatgagcgccaagaaggccaaggaggaggccgagagaaagcaccaggagagactggcccagctggccagagaggacgccgagagagagctgaaggagaaggaggccgccagaagaaagaaggagctgctggagcagatggagagagccagacacgagcccgtgaaccacagcgacatggtggacaagatgttcggcttcctgggcaccagcggcggcctgcccggccaggagggccaggcccccagcggcttcgaggacctggagagaggcagaagagagatggtggaggaggacctggacgccgccctgcccctgcccgacgaggacgaggaggacctgagcgagtacaagttcgccaagttcgccgccacctacttccagggcaccaccacccacagctacaccagaagacccctgaagcagcccctgctgtaccacgacgacgagggcgaccagctggccgccctggccgtgtggatcaccatcctgagattcatgggcgacctgcccgagcccaagtaccacaccgccatgagcgacggcagcgagaagatccccgtgatgaccaagatctacgagaccctgggcaagaagacctacaagagagagctgcaggccctgcagggcgagggcgaggcccagctgcccgagggccagaagaagagcagcgtgagacacaagctggtgcacctgaccctgaagaagaagagcaagctgaccgaggaggtgaccaagagactgcacgacggcgagagcaccgtgcagggcaacagcatgctggaggacagacccaccagcaacctggagaagctgcacttcatcatcggcaacggcatcctgagacccgccctgagagacgagatctactgccagatcagcaagcagctgacccacaaccccagcaagagcagctacgccagaggctggatcctggtgagcctgtgcgtgggctgcttcgcccccagcgagaagttcgtgaagtacctgagaaacttcatccacggcggcccccccggctacgccccctactgcgaggagagactgagaagaaccttcgtgaacggcaccagaacccagccccccagctggctggagctgcaggccaccaagagcaagaagcccatcatgctgcccgtgaccttcatggacggcaccaccaagaccctgctgaccgacagcgccaccaccgccaaggagctgtgcaacgccctggccgacaagatcagcctgaaggacagattcggcttcagcctgtacatcgccctgttcgacaaggtgagcagcctgggcagcggcagcgaccacgtgatggacgccatcagccagtgcgagcagtacgccaaggagcagggcgcccaggagagaaacgccccctggagactgttcttcagaaaggaggtgttcaccccctggcacagccccagcgaggacaacgtggccaccaacctgatctaccagcaggtggtgagaggcgtgaagttcggcgagtacagatgcgagaaggaggacgacctggccgagctggccagccagcagtacttcgtggactacggcagcgagatgatcctggagagactgctgaacctggtgcccacctacatccccgacagagagatcacccccctgaagaccctggagaagtgggcccagctggccatcgccgcccacaagaagggcatctacgcccagagaagaaccgacgcccagaaggtgaaggaggacgtggtgagctacgccagattcaagtggcccctgctgttcagcagattctacgaggcctacaagttcagcggccccagcctgcccaagaacgacgtgatcgtggccgtgaactggaccggcgtgtacttcgtggacgagcaggagcaggtgctgctggagctgagcttccccgagatcatggccgtgagcagcagcagaggcgccaagaccaccgcccccagcttcaccctggccaccatcaagggcgacgagtacaccttcaccagcagcaacgccgaggacatcagagacctggtggtgaccttcctggagggcctgagaaagagaagcaagtacgtggtggccctgcaggacaaccccaaccccgccggcgaggagagcggcttcctgagcttcgccaagggcgacctgatcatcctggaccacgacaccggcgagcaggtgatgaacagcggctgggccaacggcatcaacgagagaaccaagcagagaggcgacttccccaccgacagcgtgtacgtgatgcccaccgtgaccatgccccccagagagatcgtggccctggtgaccatgacccccgaccagagacaggacgtggtgagactgctgcagctgagaaccgccgagcccgaggtgagagccaagccctacaccctggaggagttcagctacgactacttcagacccccccccaagcacaccctgagcagagtgatggtgagcaaggccagaggcaaggacagactgtggagccacaccagagagcccctgaagcaggccctgctgaagaagctgctgggcagcgaggagctgagccaggaggcctgcctggccttcatcgccgtgctgaagtacatgggcgactaccccagcaagagaaccagaagcgtgaacgagctgaccgaccagatcttcgagggccccctgaaggccgagcccctgaaggacgaggcctacgtgcagatcctgaagcagctgaccgacaaccacatcagatacagcgaggagagaggctgggagctgctgtggctgtgcaccggcctgttcccccccagcaacatcctgctgccccacgtgcagagattcctgcagagcagaaagcactgccccctggccatcgactgcctgcagagactgcagaaggccctgagaaacggcagcagaaagtaccccccccacctggtggaggtggaggccatccagcacaagaccacccagatcttccacaaggtgtacttccccgacgacaccgacgaggccttcgaggtggagagcagcaccaaggccaaggacttctgccagaacatcgccaccagactgctgctgaagagcagcgagggcttcagcctgttcgtgaagatcgccgacaaggtgctgagcgtgcccgagaacgacttcttcttcgacttcgtgagacacctgaccgactggatcaagaaggccagacccatcaaggacggcatcgtgcccagcctgacctaccaggtgttcttcatgaagaagctgtggaccaccaccgtgcccggcaaggaccccatggccgacagcatcttccactactaccaggagctgcccaagtacctgagaggctaccacaagtgcaccagagaggaggtgctgcagctgggcgccctgatctacagagtgaagttcgaggaggacaagagctacttccccagcatccccaagctgctgagagagctggtgccccaggacctgatcagacaggtgagccccgacgactggaagagaagcatcgtggcctacttcaacaagcacgccggcaagagcaaggaggaggccaagctggccttcctgaagctgatcttcaagtggcccaccttcggcagcgccttcttcgagcagaccaccgagcccaacttccccgagatcctgctgatcgccatcaacaagtacggcgtgagcctgatcgaccccaagaccaaggacatcctgaccacccaccccttcaccaagatcagcaactggagcagcggcaacacctacttccacatcaccatcggcaacctggtgagaggcagcaagctgctgtgcgagaccagcctgggctacaagatggacgacctgctgaccagctacatcagccagatgctgaccgccatgagcaagcagagaggcagcagaagcggcaagtag

SEQ ID NO: 44395 - protein, 399 aa, Artificial Sequence
  derived and/or modified sequence
MSSRSTKDLIKSKWGSKPSNSKSETTLEKLKGEIAHLKTSVDEITSGKGKLTDKERHRLLEKIRVLEAEKEKNAYQLTEKDKEIQRLRDQLKARYSTTTLLEQLEETTREGERREQVLKALSEEKDVLKQQLSAATSRIAELESKTNTLRLSQTVAPNCFNSSINNIHEMEIQLKDALEKNQQWLVYDQQREVYVKGLLAKIFELEKKTETAAHSLPQQTKKPESEGYLQEEKQKCYNDLLASAKKDLEVERQTITQLSFELSEFRRKYEETQKEVHNLNQLLYSQRRADVQHLEDDRHKTEKIQKLREENDIARGKLEEEKKRSEELLSQVQFLYTSLLKQQEEQTRVALLEQQMQACTLDFENEKLDRQHVQHQLHVILKELRKARNNTVGILDTKS

SEQ ID NO: 44396 - protein, 464 aa, Artificial Sequence
  derived and/or modified sequence
MSSRSTKDLIKSKWGSKPSNSKSETTLEKLKGEIAHLKTSVDEITSGKGKLTDKERHRLLEKIRVLEAEKEKNAYQLTEKDKEIQRLRDQLKARYSTTTLLEQLEETTREGERREQVLKALSEEKDVLKQQLSAATSRIAELESKTNTLRLSQTVAPNCFNSSINNIHEMEIQLKDALEKNQQWLVYDQQREVYVKGLLAKIFELEKKTETAAHSLPQQTKKPESEGYLQEEKQKCYNDLLASAKKDLEVERQTITQLSFELSEFRRKYEETQKEVHNLNQLLYSQRRADVQHLEDDRHKTEKIQKLREENDIARGKLEEEKKRSEELLSQVQFLYTSLLKQQEEQTRVALLEQQMQACTLDFENEKLDRQHVQHQLHVILKELRKARNQITQLESLKQLHEFAITEPLVTFQGETENREKVAASPKSPTAALNESLVECPKCNIQYPATEHRDLLVHVEYCSK

SEQ ID NO: 44397 - protein, 208 aa, Artificial Sequence
  derived and/or modified sequence
  misc_feature (1)..(1): Xaa can be any naturally occurring amino acid
XSSINNIHEMEIQLKDALEKNQQWLVYDQQREVYVKGLLAKIFELEKKTETAAHSLPQQTKKPESEGYLQEEKQKCYNDLLASAKKDLEVERQTITQLSFELSEFRRKYEETQKEVHNLNQLLYSQRRADVQHLEDDRHKTEKIQKLREENDIARGKLEEEKKRSEELLSQVQFLYTSLLKQQEEQTRVALLEQQVLIRVASKFNSAC

SEQ ID NO: 44398 - DNA, 1200 bp, Artificial Sequence
  derived and/or modified sequence
atgtccagcaggagcactaaggacctgattaaaagcaagtggggctccaaaccctccaatagcaagtccgaaactacactcgaaaagctgaaaggagaaatcgcacacctgaagacttctgtggacgagataacttccggaaaggggaaattgaccgataaggagcggcatcgcctgctcgaaaagatccgggtactggaagctgagaaggaaaaaaacgcataccagctcacagagaaggataaagaaatccagcgccttcgcgatcagctgaaagcccgatatagcacaactacattgcttgagcaacttgaagagacaaccagagagggagagcggcgggagcaagtgcttaaggctttgagcgaagagaaggatgtgctgaagcaacagttgagtgccgcaacgtcgagaattgccgaactggaatcaaagaccaacacacttcgcctctcccaaaccgttgcccccaactgttttaactcttccattaacaatatccacgaaatggagattcagctgaaggacgcgcttgaaaagaaccaacaatggttagtatacgaccaacagcgagaggtttacgtgaagggcctgctggcaaagatctttgaactagagaagaagactgagaccgcagcacacagtctgcctcagcagacaaaaaagccagagtctgagggttacctacaggaagagaagcagaagtgttataacgacctgctggctagcgcaaagaaagatcttgaggtggagcgccagaccatcactcagctgtctttcgagttgagtgagttccgccgtaaatatgaggaaacacagaaggaagtccataacctcaaccaattgctctattcccagagaagggcagacgttcaacatctggaagacgataggcacaagactgaaaagattcaaaagttaagagaggagaacgacatcgcgaggggaaaactcgaggaggagaagaagaggtcagaggagcttctgagtcaggttcagtttctgtatacaagtttgctcaaacaacaggaggaacagacaagggtagctttgctggagcagcaaatgcaggcttgtaccctggattttgagaatgaaaaattggacagacaacatgtccaacatcagctgcatgtcattctgaaggaactgcgtaaggctagaaacaataccgtggggatcctggatactaagagctag

SEQ ID NO: 44399 - DNA, 1395 bp, Artificial Sequence
  derived and/or modified sequence
atgtcatccagatcaaccaaagacctcataaagtctaagtggggatccaagccttccaattccaaatcagaaactactctggagaagctgaagggggagatagcacatctgaagacgagcgtggacgagattacttccggtaaggggaagctgaccgacaaggagaggcaccgcctgctggaaaagatccgtgtgcttgaggccgagaaggaaaaaaatgcttatcagctgaccgagaaggacaaggagatccagcggcttcgcgatcagctcaaggctcggtactcaaccactaccttactcgagcagctggaggaaactaccagggagggcgagcggcgcgagcaggtccttaaagctctgagcgaagaaaaggacgtgctgaagcaacagctgtctgccgctacctctcgaatcgcagagcttgaatctaagacaaacaccttgagactcagccagactgtggctcccaactgctttaactcatcaatcaacaacatccacgagatggaaatccagctcaaagacgctctggagaaaaatcagcagtggttggtgtacgatcagcagcgcgaagtgtacgtaaaagggcttcttgcaaaaatctttgagcttgagaagaaaacagagaccgcagcccatagcctgccccagcaaactaaaaagcccgaatcagaagggtacctccaagaggaaaagcaaaagtgctacaatgaccttctggctagcgctaaaaaagatctggaagtggaacgccagactatcactcagttgtcgtttgaactgtcagaatttcggaggaagtacgaggaaactcagaaagaggtacataatctgaatcaactcctctatagccaaaggagagcagacgtgcagcatctggaagatgataggcacaagacagagaagatccagaagctgagagaggaaaatgatatcgcacggggtaagctcgaggaggaaaagaaaaggagtgaagaattgctttctcaggtgcagtttttatataccagcttgcttaagcagcaggaagaacagacaagagtcgctctgcttgagcaacagatgcaggcatgcactttggattttgagaatgagaaactggaccgccagcatgtccagcaccagctccatgtaatcttaaaggaactgcggaaagctcgaaatcagattacccaactggagagccttaagcaactgcatgaatttgcaatcacagaaccactggtgacctttcagggagaaactgagaacagggagaaagtggccgccagtcctaaaagcccaactgcggccctaaacgagagtctggttgagtgccctaaatgtaacatccagtatcctgctactgagcatcgagacctgctggtgcacgtagaatactgctctaaatag

SEQ ID NO: 44400 - DNA, 627 bp, Artificial Sequence
  derived and/or modified sequence
taatcttcaatcaacaacattcatgagatggaaatacagcttaaggacgcactggaaaaaaatcagcagtggcttgtttatgaccagcagcgcgaggtctatgtgaagggcctgctggcaaaaattttcgaactagagaaaaagacagagaccgcggcccatagccttccccagcaaaccaagaaaccagagtctgagggatatttgcaagaagaaaagcagaagtgctacaatgatttgttggcatctgccaagaaagatctcgaagtagagcgtcagacaatcactcagctgtcctttgagcttagcgagtttcggagaaagtacgaagagacacagaaagaggttcacaacctgaaccagctgctttactcgcaaaggcgcgccgacgtgcaacacctggaagatgacagacacaagacagagaaaatacagaaacttagagaggaaaatgacatcgctcgagggaagctggaggaagaaaaaaaacgcagcgaggagctcctgagccaggttcagttcctctatacgagcttgctcaagcagcaggaggagcaaacacgcgtggcgctgctcgagcagcaggtgttgattagggtggcttccaagtttaacagcgcgtgctag

SEQ ID NO: 44401 - DNA, 1200 bp, Artificial Sequence
  derived and/or modified sequence
atgagcagccgcagcaccaaggacctgatcaagagcaagtggggcagcaagcccagcaacagcaagtctgagaccaccctggagaagctgaagggggagatcgcccacctgaagacctctgtggatgagatcaccagcggcaagggcaagctgacagacaaggagcggcaccggctgctggagaagatccgggtgctggaggccgagaaggagaagaatgcctaccagctgacagagaaggacaaggagatccagaggctgcgggaccagctgaaggcccgctacagcaccaccaccctgctggagcagctggaggagaccacccgggagggggagcggcgggagcaggtgctgaaggccctgtctgaggagaaggatgtgctgaagcagcagctgtctgctgccaccagcagaattgctgagctggagagcaagaccaacaccctgcggctgagccagacagtggcccccaactgcttcaacagcagcatcaacaacatccacgagatggagatccagctgaaggatgccctggagaagaaccagcagtggctggtgtatgaccagcagcgggaggtgtatgtgaagggcctgctggccaagatctttgagctggagaagaagacagaaacagctgcccacagcctgccccagcagaccaagaagccagagagcgagggctacctgcaggaggagaagcagaagtgctacaatgacctgctggccagcgccaagaaggacctggaggtggagcggcagaccatcacccagctgagctttgagctgtctgagttccggaggaaatatgaggagacccagaaggaggtgcacaacctgaaccagctgctgtacagccagaggagagcagatgtgcagcacctggaggatgacagacacaagacagagaagatccagaagctgcgggaggagaatgacatcgcccggggcaagctggaggaggagaagaagaggtctgaggagctgctgagccaggtgcagttcctgtacaccagcctgctgaagcagcaggaggagcagaccagggtggccctgctggagcagcagatgcaggcctgcaccctggactttgaaaatgagaagctggaccggcagcacgtgcagcaccagctgcacgtgatcctgaaggagctgaggaaggccaggaacaacacagtgggcatcctggacaccaagagctag

SEQ ID NO: 44402 - DNA, 1395 bp, Artificial Sequence
  derived and/or modified sequence
atgagcagccgcagcaccaaggacctgatcaagagcaagtggggcagcaagcccagcaacagcaagtctgagaccaccctggagaagctgaagggggagatcgcccacctgaagacctctgtggatgagatcaccagcggcaagggcaagctgacagacaaggagcggcaccggctgctggagaagatccgggtgctggaggccgagaaggagaagaatgcctaccagctgacagagaaggacaaggagatccagaggctgcgggaccagctgaaggcccgctacagcaccaccaccctgctggagcagctggaggagaccacccgggagggggagcggcgggagcaggtgctgaaggccctgtctgaggagaaggatgtgctgaagcagcagctgtctgctgccaccagcagaattgctgagctggagagcaagaccaacaccctgcggctgagccagacagtggcccccaactgcttcaacagcagcatcaacaacatccacgagatggagatccagctgaaggatgccctggagaagaaccagcagtggctggtgtatgaccagcagcgggaggtgtatgtgaagggcctgctggccaagatctttgagctggagaagaagacagaaacagctgcccacagcctgccccagcagaccaagaagccagagagcgagggctacctgcaggaggagaagcagaagtgctacaatgacctgctggccagcgccaagaaggacctggaggtggagcggcagaccatcacccagctgagctttgagctgtctgagttccggaggaaatatgaggagacccagaaggaggtgcacaacctgaaccagctgctgtacagccagaggagagcagatgtgcagcacctggaggatgacagacacaagacagagaagatccagaagctgcgggaggagaatgacatcgcccggggcaagctggaggaggagaagaagaggtctgaggagctgctgagccaggtgcagttcctgtacaccagcctgctgaagcagcaggaggagcagaccagggtggccctgctggagcagcagatgcaggcctgcaccctggactttgaaaatgagaagctggaccggcagcacgtgcagcaccagctgcacgtgatcctgaaggagctgaggaaggccaggaaccagatcacccagctggagagcctgaagcagctgcatgaatttgccatcacagagcccctggtgaccttccagggcgagacagaaaatcgggagaaggtggccgccagccccaagagccccacagctgccctgaatgaaagcctggtggagtgccccaagtgcaacatccagtacccagccacagagcaccgggacctgctggtgcacgtggagtactgcagcaagtag

SEQ ID NO: 44403 - DNA, 627 bp, Artificial Sequence
  derived and/or modified sequence
tgaagcagcatcaacaacatccacgagatggagatccagctgaaggatgccctggagaagaaccagcagtggctggtgtatgaccagcagcgggaggtgtatgtgaagggcctgctggccaagatctttgagctggagaagaagacagaaacagctgcccacagcctgccccagcagaccaagaagccagagagcgagggctacctgcaggaggagaagcagaagtgctacaatgacctgctggccagcgccaagaaggacctggaggtggagcggcagaccatcacccagctgagctttgagctgtctgagttccggaggaaatatgaggagacccagaaggaggtgcacaacctgaaccagctgctgtacagccagaggagagcagatgtgcagcacctggaggatgacagacacaagacagagaagatccagaagctgcgggaggagaatgacatcgcccggggcaagctggaggaggagaagaagaggtctgaggagctgctgagccaggtgcagttcctgtacaccagcctgctgaagcagcaggaggagcagaccagggtggccctgctggagcagcaggtgctgatccgggtggccagcaagttcaacagcgcctgctag

SEQ ID NO: 44404 - DNA, 1200 bp, Artificial Sequence
  derived and/or modified sequence
atgagcagccggagcaccaaggacctgatcaagagcaagtggggctcaaaaccctcaaactccaagagtgagacaaccctggaaaaattaaaaggtgaaattgctcaccttaaaactagtgtggacgagatcacctctggcaaaggcaaattaaccgataaggaaagacataggctgctagagaaaatccgggtgttggaagcagagaaggaaaagaatgcctatcagctgacagaaaaggataaagagatccagaggctgcgcgatcagttgaaggctcgctattcaactacgacgcttttggaacagctggaggaaacaactagagagggtgagcgacgcgaacaagttctgaaagccctgtctgaggagaaagacgtgctgaagcagcaactgagcgccgctacaagtcggatagctgagctggaaagcaaaactaatacattgagactttcccagacagtggccccaaactgcttcaactcttcaattaataatatacatgagatggaaatccagctcaaagatgcacttgagaaaaaccagcaatggctggtttatgatcagcagcgtgaggtttacgtcaagggactactggccaaaattttcgaattggagaaaaagactgaaactgctgcccattctctaccccagcagactaagaagcccgaaagcgagggctacctgcaggaggaaaagcagaagtgctataacgatctgttggcttccgcaaaaaaggatttagaagtcgagaggcagaccattacccagctgagcttcgaacttagcgagttcagacggaagtatgaagagacccagaaagaagtgcacaaccttaaccagctgctatattcccagagacgggcggatgtccaacacctcgaggatgacaggcacaagaccgagaagattcaaaaattaagggaggagaacgacatcgcccgcggtaagctcgaggaagaaaaaaagcgttccgaggagctgttgagtcaggtacagtttctctatacctcccttttgaagcagcaggaggagcaaacacgtgtggcgctccttgaacagcagatgcaagcttgcactttagattttgagaatgagaaactggacagacagcacgtgcagcaccagctccatgtcattttaaaggagctgcgcaaggcccggaacaatacagtaggcattttggacaccaaatcttag

SEQ ID NO: 44405 - DNA, 1395 bp, Artificial Sequence
  derived and/or modified sequence
atgagcagccggagcaccaaggacctgatcaagagcaagtggggctctaagcccagcaactccaaatccgaaaccactctggagaagctaaagggagagatagcacatttgaaaactagtgtggacgaaatcacgagtggaaaggggaagttaaccgataaggagcgccacagattgctggagaagatcagggtccttgaggctgagaaagagaaaaacgcctatcagctgacagaaaaggacaaggagattcagcggctgagagaccagctgaaagccagatattcaacgactacactgctggagcagttggaggaaaccaccagagagggcgaaaggagagaacaggtcctcaaagccctgtctgaggagaaggatgtactcaagcagcagctcagcgcggccacctcacgaatcgccgagcttgagagcaagacaaatacactgcgcctgagtcaaacagtggcacctaattgcttcaattcatccataaacaatatacatgagatggagattcagttaaaggacgcactggagaagaaccagcaatggcttgtgtatgatcaacagcgcgaagtctacgttaagggactgctcgccaagatattcgagctagaaaaaaaaaccgagaccgctgcccattccctccctcaacagactaagaagccggagagtgagggctacctgcaggaagagaagcagaaatgttataatgatctccttgcgtctgccaaaaaggatcttgaagtggaaaggcagaccataacccagctctctttcgaattgtctgaatttcgaagaaaatacgaggagacccagaaagaagtccacaacctgaaccagctcttatattcccaaaggagagcagatgtgcagcatctcgaggatgatcggcataagacagaaaagattcagaagctgcgcgaggagaacgacatagcgagaggcaaactggaggaagagaagaagcggagcgaggagctgcttagccaggtgcagtttctgtacacatcactcctaaagcaacaagaggaacagacaagggtcgcgctcctagagcagcagatgcaagcatgcacactggacttcgagaacgaaaaacttgatcgccaacatgttcagcatcagctgcacgtcattctgaaagagttgcgaaaagcccggaaccagatcacacagctcgagagtctgaaacaattacacgagttcgctattactgaaccgttggtgacctttcagggagagacagagaacagggagaaagtcgctgcctcccctaagtcccccaccgccgcactgaacgaatcactggtggagtgccccaagtgcaacattcagtatcccgcaacagaacatagagatctactggtccacgtcgaatattgcagtaagtag

SEQ ID NO: 44406 - DNA, 627 bp, Artificial Sequence
  derived and/or modified sequence
tgaagcagcatcaacaacatccacgagatggagatccagctgaaggacgcccttgaaaagaatcagcagtggctggtgtatgatcagcagcgggaggtctatgtgaaggggctcttagccaaaatatttgaattggaaaagaaaactgaaacagccgcccattcactaccacaacagactaagaaacccgaaagcgaaggttatttgcaggaggagaagcagaagtgctataatgacctcctggcctctgccaagaaagatttggaggtggagcgccagactatcacgcagctgtcatttgaactgtctgaatttaggagaaaatacgaggagacacaaaaggaagttcacaatctgaaccagttattgtactcacagcgtagggctgacgtacagcacctcgaggatgatcgtcacaaaacagagaagattcaaaaattgagagaggagaatgatatcgctcgcggaaaactggaggaagaaaagaagaggagtgaggagttactgtcccaggtccagttcctctacacaagtctcctgaaacagcaggaagagcagacacgtgtagccctgctggagcagcaggtattaatccgagtagcctctaagttcaatagcgcctgttag

SEQ ID NO: 44407 - DNA, 1200 bp, Artificial Sequence
  derived and/or modified sequence
atgtcctccaggagcactaaagacctgataaagtccaagtggggcagcaagccatctaattccaaaagtgagactaccctggagaagctgaagggggagatcgctcacctgaagactagcgtagatgagatcacttcgggaaagggcaaactgaccgataaagagcgtcacaggttgctggagaagatcagggtgctggaagctgaaaaggagaagaatgcataccagctgacagagaaagataaggagattcagaggctgcgtgatcagctgaaggctcggtattctactacaaccctgctggaacagctcgaggagactaccagggagggcgaacggagagaacaggtccttaaggcactgagtgaagagaaggacgtgctgaaacagcaacttagcgcggcaaccagcaggatcgccgaactggaaagcaaaactaacaccctgcgcctgtcacagactgttgcccctaactgttttaattccagcatcaataacatacacgagatggaaattcagctgaaggatgcgttggaaaagaaccaacaatggctcgtctacgatcaacagagggaggtttacgtgaaagggttactagccaagatttttgaactggagaagaagactgaaacagccgcacatagcctcccacagcagacaaagaaaccggagtctgaaggatacctccaagaggaaaagcaaaagtgttataatgacctgctggcatccgcaaagaaggatctagaagtggagagacagaccattactcagctctctttcgagctttcagaattccgcaggaagtatgaagagacacagaaggaggtgcataacctgaatcagttgctctactctcaacgtcgcgcagacgtccagcatctcgaggatgacaggcacaagactgagaagatccaaaagttgagggaagagaacgatattgctcgcggtaagctggaagaggaaaagaaacggagcgaagagctgttgagtcaggttcaattcctgtacaccagcctgctcaagcaacaagaggaacaaactcgagtggccctgctggaacagcagatgcaagcctgtaccctggattttgaaaacgagaagctcgaccgtcagcacgtgcagcatcagctgcacgtgattctgaaggaactgaggaaggccaggaataatactgtcgggatactggataccaagagttag

SEQ ID NO: 44408 - DNA, 1395 bp, Artificial Sequence
  derived and/or modified sequence
atgagtagtcgatccactaaagatctgattaagtctaaatggggatcgaagccttcaaattcaaagtctgaaactactttggagaagttaaaaggcgagattgctcacctgaagacatccgtggacgaaatcacatctggcaagggaaagttaaccgataaagagaggcatcgtcttctggaaaagatccgggttctcgaagccgaaaaagagaagaatgcctaccagttaactgaaaaagacaaagagattcaacggctgcgggaccagcttaaggcccgatactcaacaaccacactgctggaacagttggaggagactactcgggaaggcgaacggagagagcaagtcctaaaggccctcagcgaggaaaaagacgtgctgaaacagcaactgtcagccgctacctccaggattgccgaactagagagtaaaaccaacactctacgccttagccagactgtagcccctaactgcttcaacagtagtatcaacaacattcacgagatggaaatccagctgaaagacgccctggagaaaaaccagcagtggctagtctacgatcagcagagggaggtgtacgtgaaggggttgttggccaagatattcgaactggaaaagaagactgagaccgccgctcacagcctcccccagcagactaaaaagccagagagcgagggatacctgcaggaggaaaagcagaagtgctacaacgatcttctagcctcggccaaaaaagacctggaggtcgaacgccagaccataactcagctatcttttgaactctccgagttccgcaggaagtacgaagagacgcagaaggaagtgcataaccttaatcaactgctctacagccagcgcagagccgatgtccaacacctggaggacgaccgacacaaaaccgaaaagatccagaagctaagagaagagaacgacattgccagaggcaaacttgaagaggagaagaaaagaagcgaagagctattaagccaggtccaattcctctatacaagcctcctgaaacagcaggaagagcaaacacgggtcgctctactggagcagcagatgcaggcctgtactttggacttcgagaatgagaaactagaccgacaacatgtgcagcaccagctgcatgtgattctcaaggagctgcggaaagcaaggaatcagattacacagttagagtctctcaaacagcttcacgaatttgcaataacagagccactggtgaccttccagggagaaactgagaacagagagaaagttgccgcttcaccgaagagccctaccgccgcacttaatgaatcgctagtcgagtgtcctaagtgcaatatccaataccctgcgactgagcacagggatttgttggttcacgtcgagtactgttccaaatag

SEQ ID NO: 44409 - DNA, 627 bp, Artificial Sequence
  derived and/or modified sequence
taatcttctatcaataatatccacgagatggagattcagttgaaagacgcccttgaaaagaaccagcagtggctggtctacgatcagcagagggaggtgtacgttaaggggctgctggccaaaatctttgagctggagaagaaaactgagacggctgcccacagtcttccccagcagaccaagaagccagaaagcgagggttacctgcaagaagagaaacagaaatgctacaacgacctgctcgcctccgcgaagaaagacctggaggtcgaacgtcagactatcacacaactcagctttgaacttagcgaattccggagaaagtatgaagagacccaaaaagaagtgcataacttgaatcagctactttatagccagcgaagagcagatgtccaacacctagaagacgatcgacataagacagaaaagatacaaaagctcagggaggaaaacgatatcgcccgtggaaaactggaggaggaaaagaagcggtccgaagagctgctgtctcaagtgcagttcctgtatacctctctgctgaagcagcaggaggagcagactcgagtggcacttcttgaacagcaagtgctgatcagagtggcctcgaagtttaacagcgcatgttag

SEQ ID NO: 44410 - DNA, 1501 bp, Artificial Sequence
  derived and/or modified sequence
cacacctgatggtgtgactcggccgacgcgagcgccgcgcttcgcttcagctgctagctggcccaagggaggcgaccgcggagggtggcgaggggcggccaggacccgcagccccggggccgggccggtccggaccgccagggagggcaggtcagtgggcagatcgcgtccgcgggattcaatctctgcccgctctgataacagtccttttccctggcgctcacttcgtgcctggcacccggctgggcgcctcaagaccgttgtctcttcgatcgcttctttggacttggcgaccatttcagagatgtcttccagaagtaccaaagatttaattaaaagtaagtggggatcgaagcctagtaactccaaatccgaaactacattagaaaaattaaagggagaaattgcacacttaaagacatcagtggatgaaatcacaagtgggaaaggaaagctgactgataaagagagacacagacttttggagaaaattcgagtccttgaggctgagaaggagaagaatgcttatcaactcacagagaaggacaaagaaatacagcgactgagagaccaactgaaggccagatatagtactaccacattgcttgaacagctggaagagacaacgagagaaggagaaaggagggagcaggtgttgaaagccttatctgaagagaaagacgtattgaaacaacagttgtctgctgcaacctcacgaattgctgaacttgaaagcaaaaccaatacactccgtttatcacagactgtggctccaaactgcttcaactcatcaataaataatattcatgaaatggaaatacagctgaaagatgctctggagaaaaatcagcagtggctcgtgtatgatcagcagcgggaagtctatgtaaaaggacttttagcaaagatctttgagttggaaaagaaaacggaaacagctgctcattcactcccacagcagacaaaaaagcctgaatcagaaggttatcttcaagaagagaagcagaaatgttacaacgatctcttggcaagtgcaaaaaaagatcttgaggttgaacgacaaaccataactcagctgagttttgaactgagtgaatttcgaagaaaatatgaagaaacccaaaaagaagttcacaatttaaatcagctgttgtattcacaaagaagggcagatgtgcaacatctggaagatgataggcataaaacagagaagatacaaaaactcagggaagagaatgatattgctaggggaaaacttgaagaagagaagaagagatccgaagagctcttatctcaggtccagtttctttacacatctctgctaaagcagcaagaagaacaaacaagggtagctctgttggaacaacagatgcaggcatgtactttagactttgaaaatgaaaaactcgaccgtcaacatgtgcagcatcaattgcatgtaattcttaaggagctccgaaaagcaagaaataacacagttggaatccttgataccaaatca

SEQ ID NO: 44411 - DNA, 2638 bp, Artificial Sequence
  derived and/or modified sequence
cacacctgatggtgtgactcggccgacgcgagcgccgcgcttcgcttcagctgctagctggcccaagggaggcgaccgcggagggtggcgaggggcggccaggacccgcagccccggggccgggccggtccggaccgccagggagggcaggtcagtgggcagatcgcgtccgcgggattcaatctctgcccgctctgataacagtccttttccctggcgctcacttcgtgcctggcacccggctgggcgcctcaagaccgttgtctcttcgatcgcttctttggacttggcgaccatttcagagatgtcttccagaagtaccaaagatttaattaaaagtaagtggggatcgaagcctagtaactccaaatccgaaactacattagaaaaattaaagggagaaattgcacacttaaagacatcagtggatgaaatcacaagtgggaaaggaaagctgactgataaagagagacacagacttttggagaaaattcgagtccttgaggctgagaaggagaagaatgcttatcaactcacagagaaggacaaagaaatacagcgactgagagaccaactgaaggccagatatagtactaccacattgcttgaacagctggaagagacaacgagagaaggagaaaggagggagcaggtgttgaaagccttatctgaagagaaagacgtattgaaacaacagttgtctgctgcaacctcacgaattgctgaacttgaaagcaaaaccaatacactccgtttatcacagactgtggctccaaactgcttcaactcatcaataaataatattcatgaaatggaaatacagctgaaagatgctctggagaaaaatcagcagtggctcgtgtatgatcagcagcgggaagtctatgtaaaaggacttttagcaaagatctttgagttggaaaagaaaacggaaacagctgctcattcactcccacagcagacaaaaaagcctgaatcagaaggttatcttcaagaagagaagcagaaatgttacaacgatctcttggcaagtgcaaaaaaagatcttgaggttgaacgacaaaccataactcagctgagttttgaactgagtgaatttcgaagaaaatatgaagaaacccaaaaagaagttcacaatttaaatcagctgttgtattcacaaagaagggcagatgtgcaacatctggaagatgataggcataaaacagagaagatacaaaaactcagggaagagaatgatattgctaggggaaaacttgaagaagagaagaagagatccgaagagctcttatctcaggtccagtttctttacacatctctgctaaagcagcaagaagaacaaacaagggtagctctgttggaacaacagatgcaggcatgtactttagactttgaaaatgaaaaactcgaccgtcaacatgtgcagcatcaattgcatgtaattcttaaggagctccgaaaagcaagaaatcaaataacacagttggaatccttgaaacagcttcatgagtttgccatcacagagccattagtcactttccaaggagagactgaaaacagagaaaaagttgccgcctcaccaaaaagtcccactgctgcactcaatgaaagcctggtggaatgtcccaagtgcaatatacagtatccagccactgagcatcgcgatctgcttgtccatgtggaatactgttcaaagtagcaaaataagtatttgttttgatattaaaagattcaatactgtattttctgttagcttgtgggcattttgaattatatatttcacattttgcataaaactgcctatctacctttgacactccagcatgctagtgaatcatgtatcttttaggctgctgtgcatttctcttggcagtgatacctccctgacatggttcatcatcaggctgcaatgacagaatgtggtgagcagcgtctactgagactactaacattttgcactgtcaaaatacttggtgaggaaaagatagctcaggttattgctaatgggttaatgcaccagcaagcaaaatattttatgttttgggggttttgaaaaatcaaagataattaaccaaggatcttaactgtgttcgcattttttatccaagcacttagaaaacctacaatcctaattttgatgtccattgttaagaggtggtgatagatactattttttttttcatattgtatagcggttattagaaaagttggggattttcttgatctttattgctgcttaccattgaaacttaacccagctgtgttccccaactctgttctgcgcacgaaacagtatctgtttgaggcataatcttaagtggccacacacaatgttttctcttatgttatctggcagtaactgtaacttgaattacattagcacattctgcttagctaaaattgttaaaataaactttaataaacccatgtagccctctcatttgattgacagtattttagttatttttggcattcttaaagctgggcaatgtaatgatcagatctttgtttgtctgaacaggtatttttatacatgctttttgtaaaccaaaaacttttaaatttcttcaggttttctaacatgcttaccactgggctactgtaaatgagaaaagaataaaattatttaatgttttaa

SEQ ID NO: 44412 - DNA, 747 bp, Artificial Sequence
  derived and/or modified sequence
actcatcaataaataatattcatgaaatggaaatacagctgaaagatgctctggagaaaaatcagcagtggctcgtgtatgatcagcagcgggaagtctatgtaaaaggacttttagcaaagatctttgagttggaaaagaaaacggaaacagctgctcattcactcccacagcagacaaaaaagcctgaatcagaaggttatcttcaagaagagaagcagaaatgttacaacgatctcttggcaagtgcaaaaaaagatcttgaggttgaacgacaaaccataactcagctgagttttgaactgagtgaatttcgaagaaaatatgaagaaacccaaaaagaagttcacaatttaaatcagctgttgtattcacaaagaagggcagatgtgcaacatctggaagatgataggcataaaacagagaagatacaaaaactcagggaagagaatgatattgctaggggaaaacttgaagaagagaagaagagatccgaagagctcttatctcaggtccagtttctttacacatctctgctaaagcagcaagaagaacaaacaagggtagctctgttggaacaacaggtactcattcgggttgcttctaaattcaattctgcctgttagaaaatgcagtttttcctcatgtttatgctgttctatggagaactgtttgaaagttgtgaaaagtgtctttaaaagacttcaataaaagtctttcttcttcaataaaaaagatatttcaaga

SEQ ID NO: 44413 - DNA, 1200 bp, Artificial Sequence
  derived and/or modified sequence
atgagcagcagaagcaccaaggacctgatcaagagcaagtggggcagcaagcccagcaacagcaagagcgagaccaccctggagaagctgaagggcgagatcgcccacctgaagaccagcgtggacgagatcaccagcggcaagggcaagctgaccgacaaggagagacacagactgctggagaagatcagagtgctggaggccgagaaggagaagaacgcctaccagctgaccgagaaggacaaggagatccagagactgagagaccagctgaaggccagatacagcaccaccaccctgctggagcagctggaggagaccaccagagagggcgagagaagagagcaggtgctgaaggccctgagcgaggagaaggacgtgctgaagcagcagctgagcgccgccaccagcagaatcgccgagctggagagcaagaccaacaccctgagactgagccagaccgtggcccccaactgcttcaacagcagcatcaacaacatccacgagatggagatccagctgaaggacgccctggagaagaaccagcagtggctggtgtacgaccagcagagagaggtgtacgtgaagggcctgctggccaagatcttcgagctggagaagaagaccgagaccgccgcccacagcctgccccagcagaccaagaagcccgagagcgagggctacctgcaggaggagaagcagaagtgctacaacgacctgctggccagcgccaagaaggacctggaggtggagagacagaccatcacccagctgagcttcgagctgagcgagttcagaagaaagtacgaggagacccagaaggaggtgcacaacctgaaccagctgctgtacagccagagaagagccgacgtgcagcacctggaggacgacagacacaagaccgagaagatccagaagctgagagaggagaacgacatcgccagaggcaagctggaggaggagaagaagagaagcgaggagctgctgagccaggtgcagttcctgtacaccagcctgctgaagcagcaggaggagcagaccagagtggccctgctggagcagcagatgcaggcctgcaccctggacttcgagaacgagaagctggacagacagcacgtgcagcaccagctgcacgtgatcctgaaggagctgagaaaggccagaaacaacaccgtgggcatcctggacaccaagagctag

SEQ ID NO: 44414 - DNA, 1395 bp, Artificial Sequence
  derived and/or modified sequence
atgagcagcagaagcaccaaggacctgatcaagagcaagtggggcagcaagcccagcaacagcaagagcgagaccaccctggagaagctgaagggcgagatcgcccacctgaagaccagcgtggacgagatcaccagcggcaagggcaagctgaccgacaaggagagacacagactgctggagaagatcagagtgctggaggccgagaaggagaagaacgcctaccagctgaccgagaaggacaaggagatccagagactgagagaccagctgaaggccagatacagcaccaccaccctgctggagcagctggaggagaccaccagagagggcgagagaagagagcaggtgctgaaggccctgagcgaggagaaggacgtgctgaagcagcagctgagcgccgccaccagcagaatcgccgagctggagagcaagaccaacaccctgagactgagccagaccgtggcccccaactgcttcaacagcagcatcaacaacatccacgagatggagatccagctgaaggacgccctggagaagaaccagcagtggctggtgtacgaccagcagagagaggtgtacgtgaagggcctgctggccaagatcttcgagctggagaagaagaccgagaccgccgcccacagcctgccccagcagaccaagaagcccgagagcgagggctacctgcaggaggagaagcagaagtgctacaacgacctgctggccagcgccaagaaggacctggaggtggagagacagaccatcacccagctgagcttcgagctgagcgagttcagaagaaagtacgaggagacccagaaggaggtgcacaacctgaaccagctgctgtacagccagagaagagccgacgtgcagcacctggaggacgacagacacaagaccgagaagatccagaagctgagagaggagaacgacatcgccagaggcaagctggaggaggagaagaagagaagcgaggagctgctgagccaggtgcagttcctgtacaccagcctgctgaagcagcaggaggagcagaccagagtggccctgctggagcagcagatgcaggcctgcaccctggacttcgagaacgagaagctggacagacagcacgtgcagcaccagctgcacgtgatcctgaaggagctgagaaaggccagaaaccagatcacccagctggagagcctgaagcagctgcacgagttcgccatcaccgagcccctggtgaccttccagggcgagaccgagaacagagagaaggtggccgccagccccaagagccccaccgccgccctgaacgagagcctggtggagtgccccaagtgcaacatccagtaccccgccaccgagcacagagacctgctggtgcacgtggagtactgcagcaagtag

SEQ ID NO: 44415 - DNA, 627 bp, Artificial Sequence
  derived and/or modified sequence
tgaagcagcatcaacaacatccacgagatggagatccagctgaaggacgccctggagaagaaccagcagtggctggtgtacgaccagcagagagaggtgtacgtgaagggcctgctggccaagatcttcgagctggagaagaagaccgagaccgccgcccacagcctgccccagcagaccaagaagcccgagagcgagggctacctgcaggaggagaagcagaagtgctacaacgacctgctggccagcgccaagaaggacctggaggtggagagacagaccatcacccagctgagcttcgagctgagcgagttcagaagaaagtacgaggagacccagaaggaggtgcacaacctgaaccagctgctgtacagccagagaagagccgacgtgcagcacctggaggacgacagacacaagaccgagaagatccagaagctgagagaggagaacgacatcgccagaggcaagctggaggaggagaagaagagaagcgaggagctgctgagccaggtgcagttcctgtacaccagcctgctgaagcagcaggaggagcagaccagagtggccctgctggagcagcaggtgctgatcagagtggccagcaagttcaacagcgcctgctag

SEQ ID NO: 44416 - protein, 221 aa, Artificial Sequence
  derived and/or modified sequence
MSAEVIHQVEEALDTDEKEMLLFLCRDVAIDVVPPNVRDLLDILRERGKLSVGDLAELLYRVRRFDLLKRILKMDRKAVETHLLRNPHLVSDYRVLMAEIGEDLDKSDVSSLIFLMKDYMGRGKISKEKSFLDLVVELEKLNLVAPDQLDLLEKCLKNIHRIDLKTKIQKYKQSVQGAGTSYRNVLQAAIQKSLKDPSNNFRMITPYAHCPDLKILGNCSM

SEQ ID NO: 44417 - DNA, 357 bp, Artificial Sequence
  derived and/or modified sequence
atgtccgccgaagttatccatcaagtggaagaggcgctggatacagacgagaaagagatgttactctttttatgcagggacgtggccatagacgtggtacctcccaacgttcgggacctcctcgatatactcagagagagagggaagctgtccgtgggtgatctggcagagctcctgtaccgcgtgagacgttttgacctgttaaagcgcatcctgaaaatggacagaaaagcggtggagactcatttgctgaggaaccctcatctggtgtctgactacagagtcctcatggcagaaatcggggaggacttggataaaagtgacgtgtcatctcttatcttcctcatgaaggactag

SEQ ID NO: 44418 - DNA, 189 bp, Artificial Sequence
  derived and/or modified sequence
atgtcagccgaagtcattcaccaggtggaggaggcccttgacactgatgagaaggagatgttgctttttctttgccgagacgtggctatcgatgtagtcccacccaacgtacgagacctgcttgacatcctccgagaacggggcaagctctccgttggcgacttggcagaactgctgtatcgcgtatag

SEQ ID NO: 44419 - DNA, 195 bp, Artificial Sequence
  derived and/or modified sequence
atgagtgccgaagtgatccaccaggtggaggaggctctcgacaccgatgagaaagagatgctactattcctgtgtcgagatgttgccatagatgtggtgcctcctaatgttagagatctactggatatcttgagagagcgaggcaaattgtccgtgggcgacttggcagagttgctctatagagtgaggcgttag

SEQ ID NO: 44420 - DNA, 390 bp, Artificial Sequence
  derived and/or modified sequence
atgtccgcagaagttattcaccaggtggaggaggcgttggatacagacgagaaggaaatgctgctctttctttgcagggacgtggcaatcgatgtggtacctcccaacgtccgggatctattggacatactgcgtgagcgtggcaaacttagtgtgggagatttagcggagcttttatatcgcgttagacgtttcgacctcttaaagcggatattgaagatggataggaaagccgttgagactcacctgctgagaaatcctcatctggtgtcagattatcgggtgcttatggccgagatcggggaagatttggataagtcagatgtttcaagtctgatttttctgatgaaagactacatgggtcggggcaaaatttcgaaagagaagtag

SEQ ID NO: 44421 - DNA, 666 bp, Artificial Sequence
  derived and/or modified sequence
atgtcagcagaggtgatccaccaagtcgaggaagcgttggatactgatgagaaagagatgctcctgttcctgtgccgggatgtggctatcgatgtggtgcctcccaacgtgagggatctactggacattttgagagaaagaggaaaactgtctgtaggtgacctagccgagctgctttacagggtgcggagatttgatctgctcaaacggattctgaagatggacagaaaagccgtggagacccaccttctgaggaacccgcacctggttagcgactacagagtgttaatggccgagataggcgaggacctggataagagcgacgttagcagcctgatcttcctgatgaaggattatatggggcgcggtaagattagcaaagaaaaatccttcctcgatctcgttgttgaactggaaaaactcaatttagtggcccccgatcaactggacctattggagaagtgcctgaaaaacattcaccggatcgacttgaagacaaagatccagaaatacaagcagtccgtacagggcgccgggaccagctataggaacgtactccaagctgctattcaaaaatctctaaaggatccgtcaaataatttccgaatgatcacaccttacgcacactgcccagacttaaaaatcctgggcaactgtagcatgtag

SEQ ID NO: 44422 - DNA, 357 bp, Artificial Sequence
  derived and/or modified sequence
atgtctgctgaggtgatccaccaggtggaggaggccctggacacagatgagaaggagatgctgctcttcctgtgcagagatgtggccattgatgtggtgccccccaacgtgcgggacctgctggacatcctgcgggagcggggcaagctgtctgtgggggacctggccgagctgctgtacagagtgagaagatttgacctgctgaagaggatcctgaagatggacaggaaggctgtggagacccacctgctgaggaacccccacctggtgtctgactacagagtgctgatggccgagatcggggaggacctggacaagagtgatgtgagcagcctcatcttcctgatgaaggactag

SEQ ID NO: 44423 - DNA, 189 bp, Artificial Sequence
  derived and/or modified sequence
atgtctgctgaggtgatccaccaggtggaggaggccctggacacagatgagaaggagatgctgctcttcctgtgcagagatgtggccattgatgtggtgccccccaacgtgcgggacctgctggacatcctgcgggagcggggcaagctgtctgtgggggacctggccgagctgctgtacagagtgtag

SEQ ID NO: 44424 - DNA, 195 bp, Artificial Sequence
  derived and/or modified sequence
atgtctgctgaggtgatccaccaggtggaggaggccctggacacagatgagaaggagatgctgctcttcctgtgcagagatgtggccattgatgtggtgccccccaacgtgcgggacctgctggacatcctgcgggagcggggcaagctgtctgtgggggacctggccgagctgctgtacagagtgagaagatag

SEQ ID NO: 44425 - DNA, 390 bp, Artificial Sequence
  derived and/or modified sequence
atgtctgctgaggtgatccaccaggtggaggaggccctggacacagatgagaaggagatgctgctcttcctgtgcagagatgtggccattgatgtggtgccccccaacgtgcgggacctgctggacatcctgcgggagcggggcaagctgtctgtgggggacctggccgagctgctgtacagagtgagaagatttgacctgctgaagaggatcctgaagatggacaggaaggctgtggagacccacctgctgaggaacccccacctggtgtctgactacagagtgctgatggccgagatcggggaggacctggacaagagtgatgtgagcagcctcatcttcctgatgaaggactacatgggccggggcaagatcagcaaggagaagtag

SEQ ID NO: 44426 - DNA, 666 bp, Artificial Sequence
  derived and/or modified sequence
atgtctgctgaggtgatccaccaggtggaggaggccctggacacagatgagaaggagatgctgctcttcctgtgcagagatgtggccattgatgtggtgccccccaacgtgcgggacctgctggacatcctgcgggagcggggcaagctgtctgtgggggacctggccgagctgctgtacagagtgagaagatttgacctgctgaagaggatcctgaagatggacaggaaggctgtggagacccacctgctgaggaacccccacctggtgtctgactacagagtgctgatggccgagatcggggaggacctggacaagagtgatgtgagcagcctcatcttcctgatgaaggactacatgggccggggcaagatcagcaaggagaagagcttcctggacctggtggtggagctggagaagctgaacctggtggccccagaccagctggacctgctggagaagtgcctgaagaacatccacagaattgacctgaagaccaagatccagaagtacaagcagagcgtgcagggcgccggcaccagctacagaaatgtgctgcaggccgccatccagaagagcctgaaggaccccagcaacaacttcaggatgatcaccccctatgcccactgcccagacctgaagatcctgggcaactgcagcatgtag

SEQ ID NO: 44427 - DNA, 357 bp, Artificial Sequence
  derived and/or modified sequence
atgagcgccgaggtgatccaccaggtggaggaggccctggacaccgacgaaaaagagatgcttctgttcctgtgtagagatgtggcaatcgacgtagtccctcccaatgttcgagatttgctggacattctgcgggaaaggggcaagctgtctgtgggcgacctggctgagcttttatacagagtgagacgattcgacctactgaaaaggattcttaagatggaccggaaagccgtcgagacacacttgctgcgaaatcctcatttagtatctgattaccgggtgttgatggcggagataggagaggatctcgacaagagtgacgtgtcgagcttaatatttctcatgaaggattag

SEQ ID NO: 44428 - DNA, 189 bp, Artificial Sequence
  derived and/or modified sequence
atgagcgccgaggtgatccaccaggtggaggaggccctggacaccgatgaaaaagaaatgctgcttttcctctgtagagacgtcgcaattgacgtggtccccccaaacgtccgagacctgttggatatcctacgggagagaggaaagcttagcgtcggcgacctggctgagctgttgtatcgcgtctag

SEQ ID NO: 44429 - DNA, 195 bp, Artificial Sequence
  derived and/or modified sequence
atgagcgccgaggtgatccaccaggtggaggaggccctggacaccgatgagaaagaaatgctcctgtttctgtgtcgcgacgttgcgattgacgtggtgccacctaacgtgcgcgatcttcttgatattctgagggaacgtggtaagctgtccgtaggggacttggcagagcttctttatcgcgttagaaggtag

SEQ ID NO: 44430 - DNA, 390 bp, Artificial Sequence
  derived and/or modified sequence
atgagcgccgaggtgatccaccaggtggaggaggccctggacaccgacgagaaggagatgctgctcttcctgtgcagggacgtcgcaattgacgtggtgcctccaaatgtccgggacctccttgacattcttagggagaggggcaagttgagtgttggcgaccttgcagagctcctttaccgcgtcagaaggtttgacctgctcaaacgtatactcaagatggatcgcaaggctgtggagactcacctgctgcgcaacccccatttggtatctgactatagggtgttaatggcagagatcggtgaagatctagacaaatctgatgtgtctagcctgattttccttatgaaagattatatgggcaggggaaaaatctcaaaagaaaagtag

SEQ ID NO: 44431 - DNA, 666 bp, Artificial Sequence
  derived and/or modified sequence
atgagcgccgaggtgatccaccaggtggaggaggccctggacaccgacgagaaggaaatgctcctctttctgtgtcgcgatgtagcaattgatgtggtacctccaaatgtgcgggacctcctcgacatactgcgcgaacgcggcaagctgtcagtgggggatctggctgagctcctttacagagtccggaggtttgatctcctcaaacggattttgaagatggatcgcaaagcagtggagacccacttgcttcggaacccccatctcgtgtcagactaccgtgtgctgatggcagaaattggagaggatcttgataagtctgatgtgtcctctctgatcttcctgatgaaagattacatgggccgcggcaagatatctaaagagaagtctttcctcgacctggtggtggaactggagaagcttaacctggttgcacctgatcagctggacctcctggagaagtgcctgaagaatatccaccgcatcgatttaaagacaaaaatacagaagtataagcagagtgtccagggtgccggaacgtcttatagaaacgtgttacaggctgcaattcagaagagtctgaaggatccatccaataattttcgcatgattacgccatacgcacactgtccggacctcaaaatactggggaactgttcaatgtag

SEQ ID NO: 44432 - DNA, 357 bp, Artificial Sequence
  derived and/or modified sequence
atgagcgcagaggtgattcaccaggtggaagaagccctggacaccgatgagaaggagatgctcttattcctttgtcgagatgtggcaattgacgtggtcccgccaaatgtccgcgatttgttagacattctcagggagagagggaagctatccgtcggagacctggctgagctcctgtacagggttaggaggttcgacctactgaaacggatcctaaagatggatcggaaggccgtggagacacatctgctgcgaaaccctcacctcgtgtccgactaccgagtcctgatggcagaaataggagaagacctggataagagtgacgtttcatcccttatcttcttaatgaaggactag

SEQ ID NO: 44433 - DNA, 189 bp, Artificial Sequence
  derived and/or modified sequence
atgtccgccgaggttattcatcaagtggaggaggcactcgacactgacgagaaggagatgcttctgttcctgtgcagagatgtggccattgatgtggttccccctaacgtgagggatttgctggatattcttcgagaacgcggtaagctgtccgttggagacctcgccgagctcttatatcgggtttag

SEQ ID NO: 44434 - DNA, 195 bp, Artificial Sequence
  derived and/or modified sequence
atgagcgccgaggtgatccaccaggttgaggaggcattggacacagatgagaaggaaatgcttctgtttctctgccgtgatgtagctatcgacgtggtcccgcctaacgtccgcgatcttctcgacatccttagagagcgagggaaactgtcagtcggagatctggctgagctgctgtatcgcgttcgtcgctag

SEQ ID NO: 44435 - DNA, 390 bp, Artificial Sequence
  derived and/or modified sequence
atgtctgcagaagtgatccatcaggttgaagaggcactggatactgacgaaaaggaaatgttactgtttttgtgtcgcgatgtggccatagacgtggtgccgcctaacgtcagggatctccttgacatactgcgggaacgcggaaagttatctgtcggcgacctcgccgagttgctttatcgtgttagaagattcgatctcctgaagcgcattctaaagatggataggaaagctgttgagacacacttattaagaaacccgcatttggtgtccgattatagagtactgatggctgagatcggtgaagatctggacaagagtgatgtgtcgagcctgatctttctcatgaaggattatatgggacgcggtaaaataagtaaagaaaagtag

SEQ ID NO: 44436 - DNA, 666 bp, Artificial Sequence
  derived and/or modified sequence
atgtctgctgaggtgatccaccaggtcgaagaagccctcgatacagacgagaaggagatgttgctgttcctctgcagagatgttgccatcgacgttgtcccacctaacgtgcgggatctcctggatatcctgagagaacgtggcaagttaagcgtgggcgatctggctgaactgctctatagggtgcggcgtttcgatttactgaagcggatactaaagatggatcgaaaggctgtggagactcaccttttgaggaatcctcacctcgtctccgactacagggttttgatggctgagattggagaagacctggacaagtctgacgtgagctccttgattttcttaatgaaagattatatggggagaggaaagataagcaaggaaaagagcttcctggatttagtcgtggaacttgagaagttgaaccttgtagccccagaccaactcgatctgctcgaaaaatgcttaaaaaatatccacaggatcgacctgaaaaccaaaatccagaagtataaacaatctgtgcagggtgctggaacctcgtacaggaacgtgcttcaggccgcaattcagaagagtctgaaagacccaagcaataatttccggatgattaccccgtatgcccattgtcctgatctgaagattcttggcaactgctccatgtag

SEQ ID NO: 44437 - DNA, 684 bp, Artificial Sequence
  derived and/or modified sequence
agtcaggctgtctgtcgttgggcttttcccacttccttctactacgtacttcttccctattcctcctactgaggccattaaacccttagttgtaattttccctgaacatgctttacattctgatgaattctgaaaaagaatgtggggtttccttgcagatgagttcatctgttgtttcatttcctttacaataactcccccactggaaaggattctgaaagaaatgaagtcagccctcagaaatgaagttgactgcctgctggctttctgttgactggcccggagctgtactgcaagacccttgtgagcttccctagtctaagagtaggatgtctgctgaagtcatccatcaggttgaagaagcacttgatacagatgagaaggagatgctgctctttttgtgccgggatgttgctatagatgtggttccacctaatgtcagggaccttctggatattttacgggaaagaggtaagctgtctgtcggggacttggctgaactgctctacagagtgaggcgatttgacctgctcaaacgtatcttgaagatggacagaaaagctgtggagacccacctgctcaggaaccctcaccttgtttcggactatagagtgctgatggcagagattggtgaggatttggataaatctgatgtgtcctcattaattttcctcatgaaggatt

SEQ ID NO: 44438 - DNA, 596 bp, Artificial Sequence
  derived and/or modified sequence
caatgatgaccagtctgttcaagacccaagagggctgagattggcagccctggccattgtttaccacagcctaatgaagatgagtaaaagcctatctatccccaaggacctccacatatgacagtactcaactgagtctcacataggatagaataagataaaatgctggaagagaacacaaatagtgctacaaagcaggaagagagacttgatttggggatcaagacaagcttatagaagagacatcttgagagagaagatataatttcagaactcccccactggaaaggattctgaaagaaatgaagtcagccctcagaaatgaagttgactgcctgctggctttctgttgactggcccggagctgtactgcaagacccttgtgagcttccctagtctaagagtaggatgtctgctgaagtcatccatcaggttgaagaagcacttgatacagatgagaaggagatgctgctctttttgtgccgggatgttgctatagatgtggttccacctaatgtcagggaccttctggatattttacgggaaagaggtaagctgtctgtcggggacttggctgaactgctctacagagtgag

SEQ ID NO: 44439 - DNA, 435 bp, Artificial Sequence
  derived and/or modified sequence
cctttcgaaagttgttgggaacgtggactttcccaacaattgtgtatgcgctcgatctcactcagtgggagccgccgccctggagggaatttcacaatagcctgaactcccccactggaaaggattctgaaagaaatgaagtcagccctcagaaatgaagttgactgcctgctggctttctgttgactggcccggagctgtactgcaagacccttgtgagcttccctagtctaagagtaggatgtctgctgaagtcatccatcaggttgaagaagcacttgatacagatgagaaggagatgctgctctttttgtgccgggatgttgctatagatgtggttccacctaatgtcagggaccttctggatattttacgggaaagaggtaagctgtctgtcggggacttggctgaactgctctacagagtgaggcgatt

SEQ ID NO: 44440 - DNA, 655 bp, Artificial Sequence
  derived and/or modified sequence
cacagcggtacaagctgcaccccgatggacctgagagaccggaagtaacccttggccaactctggccgccccctgcagccgcagccccagaggcccacccgcgagcttcagtggcgggccctcagcgtcgtaactcccccactggaaaggattctgaaagaaatgaagtcagccctcagaaatgaagttgactgcctgctggctttctgttgactggcccggagctgtactgcaagacccttgtgagcttccctagtctaagagtaggatgtctgctgaagtcatccatcaggttgaagaagcacttgatacagatgagaaggagatgctgctctttttgtgccgggatgttgctatagatgtggttccacctaatgtcagggaccttctggatattttacgggaaagaggtaagctgtctgtcggggacttggctgaactgctctacagagtgaggcgatttgacctgctcaaacgtatcttgaagatggacagaaaagctgtggagacccacctgctcaggaaccctcaccttgtttcggactatagagtgctgatggcagagattggtgaggatttggataaatctgatgtgtcctcattaattttcctcatgaaggattacatgggccgaggcaagataagcaaggagaag

SEQ ID NO: 44441 - DNA, 1283 bp, Artificial Sequence
  derived and/or modified sequence
caagccatagcaggaaacagcgagcttgcagcctcaccgacgagtctcaactaaaagggactcccggagctaggggtggggactcggcctcacacagtgagtgccggctattggacttttgtccagtgacagctgagacaacaaggaccacgggaggaggtgtaggagagaagcgccgcgaacagcgatcgcccagcaccaagtccgcttccaggctttcggtttctttgcctccatcttgggtgcgccttcccggcgtctaggggagcgaaggctgaggtggcagcggcaggagagtccggccgcgacaggacgaactcccccactggaaaggattctgaaagaaatgaagtcagccctcagaaatgaagttgactgcctgctggctttctgttgactggcccggagctgtactgcaagacccttgtgagcttccctagtctaagagtaggatgtctgctgaagtcatccatcaggttgaagaagcacttgatacagatgagaaggagatgctgctctttttgtgccgggatgttgctatagatgtggttccacctaatgtcagggaccttctggatattttacgggaaagaggtaagctgtctgtcggggacttggctgaactgctctacagagtgaggcgatttgacctgctcaaacgtatcttgaagatggacagaaaagctgtggagacccacctgctcaggaaccctcaccttgtttcggactatagagtgctgatggcagagattggtgaggatttggataaatctgatgtgtcctcattaattttcctcatgaaggattacatgggccgaggcaagataagcaaggagaagagtttcttggaccttgtggttgagttggagaaactaaatctggttgccccagatcaactggatttattagaaaaatgcctaaagaacatccacagaatagacctgaagacaaaaatccagaagtacaagcagtctgttcaaggagcagggacaagttacaggaatgttctccaagcagcaatccaaaagagtctcaaggatccttcaaataacttcaggatgataacaccctatgcccattgtcctgatctgaaaattcttggaaattgttccatgtgattaacatggaactgcctctacttaatcattctgaatgattaaatcgtttcattttctaaatgtgttataatgtgtttagccctttcttgttgctgtatgtttagatgctttccaatcttttgttactactaataatgctataaaataaatatccttgtacttctt

SEQ ID NO: 44442 - DNA, 357 bp, Artificial Sequence
  derived and/or modified sequence
atgagcgccgaggtgatccaccaggtggaggaggccctggacaccgacgagaaggagatgctgctgttcctgtgcagagacgtggccatcgacgtggtgccccccaacgtgagagacctgctggacatcctgagagagagaggcaagctgagcgtgggcgacctggccgagctgctgtacagagtgagaagattcgacctgctgaagagaatcctgaagatggacagaaaggccgtggagacccacctgctgagaaacccccacctggtgagcgactacagagtgctgatggccgagatcggcgaggacctggacaagagcgacgtgagcagcctgatcttcctgatgaaggactag

SEQ ID NO: 44443 - DNA, 189 bp, Artificial Sequence
  derived and/or modified sequence
atgagcgccgaggtgatccaccaggtggaggaggccctggacaccgacgagaaggagatgctgctgttcctgtgcagagacgtggccatcgacgtggtgccccccaacgtgagagacctgctggacatcctgagagagagaggcaagctgagcgtgggcgacctggccgagctgctgtacagagtgtag

SEQ ID NO: 44444 - DNA, 195 bp, Artificial Sequence
  derived and/or modified sequence
atgagcgccgaggtgatccaccaggtggaggaggccctggacaccgacgagaaggagatgctgctgttcctgtgcagagacgtggccatcgacgtggtgccccccaacgtgagagacctgctggacatcctgagagagagaggcaagctgagcgtgggcgacctggccgagctgctgtacagagtgagaagatag

SEQ ID NO: 44445 - DNA, 390 bp, Artificial Sequence
  derived and/or modified sequence
atgagcgccgaggtgatccaccaggtggaggaggccctggacaccgacgagaaggagatgctgctgttcctgtgcagagacgtggccatcgacgtggtgccccccaacgtgagagacctgctggacatcctgagagagagaggcaagctgagcgtgggcgacctggccgagctgctgtacagagtgagaagattcgacctgctgaagagaatcctgaagatggacagaaaggccgtggagacccacctgctgagaaacccccacctggtgagcgactacagagtgctgatggccgagatcggcgaggacctggacaagagcgacgtgagcagcctgatcttcctgatgaaggactacatgggcagaggcaagatcagcaaggagaagtag

SEQ ID NO: 44446 - DNA, 666 bp, Artificial Sequence
  derived and/or modified sequence
atgagcgccgaggtgatccaccaggtggaggaggccctggacaccgacgagaaggagatgctgctgttcctgtgcagagacgtggccatcgacgtggtgccccccaacgtgagagacctgctggacatcctgagagagagaggcaagctgagcgtgggcgacctggccgagctgctgtacagagtgagaagattcgacctgctgaagagaatcctgaagatggacagaaaggccgtggagacccacctgctgagaaacccccacctggtgagcgactacagagtgctgatggccgagatcggcgaggacctggacaagagcgacgtgagcagcctgatcttcctgatgaaggactacatgggcagaggcaagatcagcaaggagaagagcttcctggacctggtggtggagctggagaagctgaacctggtggcccccgaccagctggacctgctggagaagtgcctgaagaacatccacagaatcgacctgaagaccaagatccagaagtacaagcagagcgtgcagggcgccggcaccagctacagaaacgtgctgcaggccgccatccagaagagcctgaaggaccccagcaacaacttcagaatgatcaccccctacgcccactgccccgacctgaagatcctgggcaactgcagcatgtag

SEQ ID NO: 44447 - protein, 179 aa, Artificial Sequence
  derived and/or modified sequence
MSSNECFKCGRSGHWARECPTGGGRGRGMRSRGRGGFTSDRGFQFVSSSLPDICYRCGESGHLAKDCDLQEDVEACYNCGRGGHIAKDCKEPKREREQCCYNCGKPGHLARDCDHADEQKCYSCGEFGHIQKDCTKVKCYRCGETGHVAINCSKTSEVNCYRCGESGHLARECTIEATA

SEQ ID NO: 44448 - DNA, 540 bp, Artificial Sequence
  derived and/or modified sequence
atgagcagcaacgagtgcttcaagtgcggcagaagcggccactgggccagagagtgccccaccggcggcggcagaggcagaggcatgagaagcagaggcagaggcggcttcaccagcgacagaggcttccagttcgtgagcagcagcctgcccgacatctgctacagatgcggcgagagcggccacctggccaaggactgcgacctgcaggaggacgtggaggcctgctacaactgcggcagaggcggccacatcgccaaggactgcaaggagcccaagagagagagagagcagtgctgctacaactgcggcaagcccggccacctggccagagactgcgaccacgccgacgagcagaagtgctacagctgcggcgagttcggccacatccagaaggactgcaccaaggtgaagtgctacagatgcggcgagaccggccacgtggccatcaactgcagcaagaccagcgaggtgaactgctacagatgcggcgagagcggccacctggccagagagtgcaccatcgaggccaccgcctag

SEQ ID NO: 44449 - DNA, 540 bp, Artificial Sequence
  derived and/or modified sequence
atgtccagcaacgagtgctttaaatgcggccgctcaggccattgggctcgagagtgcccaactggcggaggccgtggcaggggaatgcgttcaaggggtagaggaggattcaccagcgacaggggtttccagttcgtatcgagcagcctacccgacatctgctatcggtgtggtgagtccgggcacctggccaaggactgcgacttgcaggaagatgtggaagcatgttacaactgcggcagaggcggtcatatcgccaaggattgcaaagagcctaaacgcgaacgtgaacagtgttgctacaattgcggcaaaccaggccatctggctagagattgcgaccacgccgatgaacagaaatgctactcctgcggcgagtttggtcacatccagaaagattgcacaaaggtgaagtgctatagatgtggtgaaaccggacatgtggctattaattgtagtaagacctccgaagtgaattgttacaggtgcggcgaatcagggcatcttgcgcgagaatgtacaatagaagctactgcctag

SEQ ID NO: 44450 - DNA, 540 bp, Artificial Sequence
  derived and/or modified sequence
atgagcagcaatgaatgcttcaagtgtggccgcagcggccactgggcccgggagtgccccactggaggcggccggggccggggcatgaggagccggggccggggcggcttcaccagtgaccggggcttccagtttgtgagcagcagcctgcctgacatctgctaccgctgtggggagagcggccacctggccaaggactgtgacctgcaggaggatgtggaggcctgctacaactgtggccggggcggccacatcgccaaggactgcaaggagcccaagcgggagcgggagcagtgctgctacaactgtgggaagccaggccacctggcccgggactgtgaccacgcagatgagcagaagtgctacagctgtggggagtttggccacatccagaaggactgcaccaaggtgaagtgctaccgctgtggggagactggacatgtggccatcaactgcagcaagaccagcgaggtgaactgctaccgctgtggggagagcggccacctggcccgggagtgcaccatcgaggccacagcctag

SEQ ID NO: 44451 - DNA, 540 bp, Artificial Sequence
  derived and/or modified sequence
atgagcagcaacgagtgcttcaagtgcggccggagcggccactgggctagggagtgtcccaccggcggcggacgggggaggggaatgcgaagcagaggccggggcggcttcacatcagacaggggattccaatttgtgagctcatctctgcccgacatttgttatagatgcggcgaatctggccatctggccaaagattgtgatttacaggaggatgtcgaagcatgctacaattgcggaagagggggccatatcgcaaaggattgtaaagagcccaaacgcgagagggagcagtgctgctataactgcggtaaacctggacatctggctagggattgcgaccacgctgacgagcagaaatgctactcctgtggagaatttggacatatccagaaagactgtaccaaggtgaagtgctaccggtgcggagagacagggcatgtcgctatcaactgttcgaagacaagcgaagtcaattgctacaggtgtggcgagtctgggcatttggcccgtgagtgtaccatcgaagccacagcctag

SEQ ID NO: 44452 - DNA, 540 bp, Artificial Sequence
  derived and/or modified sequence
atgagctcaaacgagtgttttaagtgcgggagaagtggtcactgggcgcgagaatgccccacgggcggaggacgcggacggggtatgagaagccgagggagaggaggtttcacctccgaccgcggatttcagtttgtctcctcaagcctgccagatatttgctatcgatgtggcgagtctggtcatctcgctaaggattgcgatctacaagaggacgttgaggcttgctacaattgtggaagagggggtcatattgccaaggactgcaaggaaccaaagcgcgaacgtgaacagtgttgttataattgcgggaaaccgggacacctcgctagagactgcgaccacgccgacgaacagaaatgctacagttgtggggaatttggacatatccaaaaggactgtacgaaggtcaaatgctatcggtgcggcgagaccggccacgtggccatcaattgcagcaaaacatcagaggtgaactgttaccgctgcggtgagtctggccatctcgctagagaatgcactatcgaggccactgcatag

SEQ ID NO: 44453 - DNA, 1040 bp, Artificial Sequence
  derived and/or modified sequence
gtatgtggggccgtgtgcagacccgcgtgtggcgcaggcaaggaccctcaaaataaacagcctctaccttgcgagccgtcttccccaggcctgcgtccgagtctccgccgctgcgggcccgctccgacgcggaagatctgactgcagccatgagcagcaatgagtgcttcaagtgtggacgatctggccactgggcccgggaatgtcctactggtggaggccgtggtcgtggaatgagaagccgtggcagaggtggttttacctcggatagaggtttccagtttgtttcctcgtctcttccagacatttgttatcgctgtggtgagtctggtcatcttgccaaggattgtgatcttcaggaggatgttgaagcctgctataactgcggtagaggtggccacattgccaaggactgcaaggagcccaagagagagcgagagcaatgctgctacaactgtggcaaaccaggccatctggctcgtgactgcgaccatgcagatgagcagaaatgctattcttgtggagaattcggacacattcaaaaagactgcaccaaagtgaagtgctataggtgtggtgaaactggtcatgtagccatcaactgcagcaagacaagtgaagtcaactgttaccgctgtggcgagtcagggcaccttgcacgggaatgcacaattgaggctacagcctaattattttcctttgtcgcccctcctttttctgattgatggttgtattattttctctgaatcctcttcactggccaaaggttggcagatagaggcaactcccaggccagtgagctttacttgccgtgtaaaaggaggaaaggggtggaaaaaaaccgactttctgcatttaactacaaaaaaagtttatgtttagtttggtagaggtgttatgtataatgctttgttaaagaaccccctttccgtgccactggtgaatagggattgatgaatgggaagagttgagtcagaccagtaagcccgtcctgggttccttgaacatgttcccatgtaggaggtaaaaccaattctgga

SEQ ID NO: 44454 - protein, 178 aa, Artificial Sequence
  derived and/or modified sequence
MSSNECFKCGRSGHWARECPTGGGRGRGMRSRGRGGFTSDRGFQFVSSSLPDICYRCGESGHLAKDCDLQEDEACYNCGRGGHIAKDCKEPKREREQCCYNCGKPGHLARDCDHADEQKCYSCGEFGHIQKDCTKVKCYRCGETGHVAINCSKTSEVNCYRCGESGHLARECTIEATA

SEQ ID NO: 44455 - DNA, 537 bp, Artificial Sequence
  derived and/or modified sequence
atgagcagcaacgagtgcttcaagtgcggcagaagcggccactgggccagagagtgccccaccggcggcggcagaggcagaggcatgagaagcagaggcagaggcggcttcaccagcgacagaggcttccagttcgtgagcagcagcctgcccgacatctgctacagatgcggcgagagcggccacctggccaaggactgcgacctgcaggaggacgaggcctgctacaactgcggcagaggcggccacatcgccaaggactgcaaggagcccaagagagagagagagcagtgctgctacaactgcggcaagcccggccacctggccagagactgcgaccacgccgacgagcagaagtgctacagctgcggcgagttcggccacatccagaaggactgcaccaaggtgaagtgctacagatgcggcgagaccggccacgtggccatcaactgcagcaagaccagcgaggtgaactgctacagatgcggcgagagcggccacctggccagagagtgcaccatcgaggccaccgcctag

SEQ ID NO: 44456 - DNA, 537 bp, Artificial Sequence
  derived and/or modified sequence
atgtcaagcaacgagtgctttaagtgtggacgatccgggcactgggcaagggagtgccctactgggggaggtagggggagaggaatgcggagcaggggaaggggaggatttactagcgacaggggctttcagttcgtgagcagctcactcccggacatctgctaccggtgtggggaaagtgggcacttggccaaggactgcgatctgcaggaagacgaggcctgctacaactgcggaaggggaggacatattgcaaaggattgcaaagagcctaaaagagagagggaacagtgttgttacaattgcgggaaacccggacacttggcccgcgactgcgatcatgcagatgagcagaagtgctactcttgtggcgagtttggtcatatccagaaagattgtaccaaggtcaagtgctataggtgtggtgaaacaggccatgtggccataaactgctctaaaacttccgaagttaactgttatcggtgcggggagtcgggacacctagccagggaatgcacaattgaagctacagcctag

SEQ ID NO: 44457 - DNA, 537 bp, Artificial Sequence
  derived and/or modified sequence
atgagcagcaatgaatgcttcaagtgtggccgcagcggccactgggcccgggagtgccccactggaggcggccggggccggggcatgaggagccggggccggggcggcttcaccagtgaccggggcttccagtttgtgagcagcagcctgcctgacatctgctaccgctgtggggagagcggccacctggccaaggactgtgacctgcaggaggatgaggcctgctacaactgtggccggggcggccacatcgccaaggactgcaaggagcccaagcgggagcgggagcagtgctgctacaactgtgggaagccaggccacctggcccgggactgtgaccatgctgatgagcagaagtgctacagctgtggggagtttggccacatccagaaggactgcaccaaggtgaagtgctaccgctgtggggagaccggccacgtggccatcaactgcagcaagaccagcgaggtgaactgctaccgctgtggggagagcggccacctggccagagaatgtaccatcgaggccacagcctag

SEQ ID NO: 44458 - DNA, 537 bp, Artificial Sequence
  derived and/or modified sequence
atgagcagcaacgagtgcttcaagtgcggccggagcggccactgggcccgcgagtgtccaactgggggaggaaggggtcgcggtatgcgcagtcggggtagagggggctttacatcagaccggggatttcagtttgtgtcaagttctctgcccgatatatgctacaggtgtggagaatcaggacatctggccaaggattgtgaccttcaagaagatgaggcctgttacaactgtggtcggggaggacacatcgccaaggactgcaaagaacctaaacgggagcgagagcagtgttgttataattgtgggaagcctggccacctggccagggactgtgatcatgccgacgaacagaagtgttatagctgcggtgagttcggtcatatacaaaaggactgcacaaaggtgaaatgctatcgctgcggcgaaactggacacgtggcaatcaattgctcaaaaactagcgaggtgaattgttatcgctgcggagaatcaggacatctcgcccgcgaatgcacgatagaagcgaccgcttag

SEQ ID NO: 44459 - DNA, 537 bp, Artificial Sequence
  derived and/or modified sequence
atgtcgagtaatgagtgcttcaagtgtgggcgtagcggacattgggcacgggaatgccctaccgggggaggccgtgggagggggatgcggagcaggggaaggggcggttttacttccgataggggctttcagtttgtgtcctcctcactccccgatatttgctacaggtgcggggaatccggacatttggctaaagattgcgatctacaagaggatgaagcctgctacaattgcggtcggggtggacacatagccaaagattgcaaagaacctaaacgtgaaagagaacagtgctgttacaattgtggaaaaccgggtcatctggcccgagactgtgaccacgccgacgaacagaaatgctatagctgcggagaattcggccatatccaaaaggactgcacgaaagtgaagtgctataggtgcggcgagacaggacacgtggcgatcaactgttccaaaacctctgaagttaattgctatagatgtggagaatcaggtcacctggcgagggagtgcacgattgaagccacagcatag

SEQ ID NO: 44460 - DNA, 1641 bp, Artificial Sequence
  derived and/or modified sequence
cgtgtgcagacccgcgtgtggcgcaggcaaggaccctcaaaataaacagcctctaccttgcgagccgtcttccccaggcctgcgtccgagtctccgccgctgcgggcccgctccgacgcggaagatctgactgcagccatgagcagcaatgagtgcttcaagtgtggacgatctggccactgggcccgggaatgtcctactggtggaggccgtggtcgtggaatgagaagccgtggcagaggtggttttacctcggatagaggtttccagtttgtttcctcgtctcttccagacatttgttatcgctgtggtgagtctggtcatcttgccaaggattgtgatcttcaggaggatgaagcctgctataactgcggtagaggtggccacattgccaaggactgcaaggagcccaagagagagcgagagcaatgctgctacaactgtggcaaaccaggccatctggctcgtgactgcgaccatgcagatgagcagaaatgctattcttgtggagaattcggacacattcaaaaagactgcaccaaagtgaagtgctataggtgtggtgaaactggtcatgtagccatcaactgcagcaagacaagtgaagtcaactgttaccgctgtggcgagtcagggcaccttgcacgggaatgcacaattgaggctacagcctaattattttcctttgtcgcccctcctttttctgattgatggttgtattattttctctgaatcctcttcactggccaaaggttggcagatagaggcaactcccaggccagtgagctttacttgccgtgtaaaaggaggaaaggggtggaaaaaaaccgactttctgcatttaactacaaaaaaagtttatgtttagtttggtagaggtgttatgtataatgctttgttaaagaaccccctttccgtgccactggtgaatagggattgatgaatgggaagagttgagtcagaccagtaagcccgtcctgggttccttgaacatgttcccatgtaggaggtaaaaccaattctggaagtgtctatgaacttccataaataactttaattttagtataatgatggtcttggattgtctgacctcagtagctattaaataacatcaagtaacatctgtatcaggccctacatagaacatacagttgagtgggagtaaacaaaaagataaacatgcgtgttaatggctgttcgagagaaatcggaataaaagcctaaacaggaacaacttcatcacagtgttgatgttggacacatagatggtgatggcaaaggtttagaacacattattttcaaagactaaatctaaaacccagagtaaacatcaatgctcagagttagcataatttggagctattcaggaattgcagagaaatgcattttcacagaaatcaagatgttatttttgtatactatatcacttagacaactgtgtttcatttgctgtaatcagtttttaaaagtcagatggaaagagcaactgaagtcctagaaaatagaaatgtaattttaaactattccaataaagctggaggaggaaggggagtttgactaaagttctttttgtttgtttcaaattttcattaatgtatatagtgcaaaataccatattaaagaggggaatgtggaggactg

SEQ ID NO: 44461 - protein, 172 aa, Artificial Sequence
  derived and/or modified sequence
MSSNECFKCGRSGHWARECPTGGGRGRGMRSRGRGFQFVSSSLPDICYRCGESGHLAKDCDLQEDVEACYNCGRGGHIAKDCKEPKREREQCCYNCGKPGHLARDCDHADEQKCYSCGEFGHIQKDCTKVKCYRCGETGHVAINCSKTSEVNCYRCGESGHLARECTIEATA

SEQ ID NO: 44462 - DNA, 519 bp, Artificial Sequence
  derived and/or modified sequence
atgagcagcaacgagtgcttcaagtgcggcagaagcggccactgggccagagagtgccccaccggcggcggcagaggcagaggcatgagaagcagaggcagaggcttccagttcgtgagcagcagcctgcccgacatctgctacagatgcggcgagagcggccacctggccaaggactgcgacctgcaggaggacgtggaggcctgctacaactgcggcagaggcggccacatcgccaaggactgcaaggagcccaagagagagagagagcagtgctgctacaactgcggcaagcccggccacctggccagagactgcgaccacgccgacgagcagaagtgctacagctgcggcgagttcggccacatccagaaggactgcaccaaggtgaagtgctacagatgcggcgagaccggccacgtggccatcaactgcagcaagaccagcgaggtgaactgctacagatgcggcgagagcggccacctggccagagagtgcaccatcgaggccaccgcctag

SEQ ID NO: 44463 - DNA, 519 bp, Artificial Sequence
  derived and/or modified sequence
atgtcttctaacgagtgtttcaaatgcgggcggtctggacactgggcacgcgagtgtccaacaggagggggaaggggtaggggcatgagatctcgcgggcgcgggtttcaattcgtgagctccagcctgccagacatttgctatcggtgtggcgagtctggacacttagctaaagattgcgacctgcaagaggacgtcgaggcttgctacaactgtgggcgcggcggacacattgctaaggattgcaaggagccgaaaagggaacgggagcagtgctgctacaactgcgggaagccaggccacctcgctagagactgtgatcacgccgatgaacagaaatgttattcttgtggcgaatttggacatatccagaaggactgtacaaaagtgaagtgctatcggtgtggtgagacaggacatgtggccatcaactgtagcaagaccagcgaagtcaactgttacagatgtggcgaatcaggccatttggcccgcgaatgtaccattgaggcgacggcctag

SEQ ID NO: 44464 - DNA, 519 bp, Artificial Sequence
  derived and/or modified sequence
atgagcagcaatgaatgcttcaagtgtggccgcagcggccactgggcccgggagtgccccactggaggcggccggggccggggcatgaggagccggggccggggcttccagtttgtgagcagcagcctgcctgacatctgctaccgctgtggggagagcggccacctggccaaggactgtgacctgcaggaggatgtggaggcctgctacaactgtggccggggcggccacatcgccaaggactgcaaggagcccaagcgggagcgggagcagtgctgctacaactgtgggaagccaggccacctggcccgggactgtgaccatgctgatgagcagaagtgctacagctgtggggagtttggccacatccagaaggactgcaccaaggtgaagtgctaccgctgtggggagaccggccacgtggccatcaactgcagcaagaccagcgaggtgaactgctaccgctgtggggagagcggccacctggccagagaatgtaccatcgaggccacagcctag

SEQ ID NO: 44465 - DNA, 519 bp, Artificial Sequence
  derived and/or modified sequence
atgagcagcaacgagtgcttcaagtgcggccggagcggccactgggctagggagtgccctactggaggggggagaggcaggggcatgcgctcacgaggccgcgggtttcagttcgtctcatcatctctgcccgatatttgttaccggtgcggagaatccgggcacttggctaaggattgtgacctccaggaggacgtggaggcatgctacaactgtggccgtgggggccatatcgccaaggactgcaaggaacccaagagagagcgggaacagtgctgttataattgcggcaagcccgggcacctcgccagagattgtgaccatgccgatgagcagaagtgttatagctgtggcgagtttggtcacattcaaaaagactgtaccaaggtgaagtgttaccggtgcggagagacaggccacgtagcaatcaattgctctaaaacttccgaagtcaactgctaccggtgcggtgagtctggtcatctcgctagagaatgcactatcgaggccactgcctag

SEQ ID NO: 44466 - DNA, 519 bp, Artificial Sequence
  derived and/or modified sequence
atgagctccaacgagtgctttaagtgtggtcggagtggtcactgggctagagagtgccctaccggaggaggtaggggacgtgggatgaggtcaagagggagaggatttcaattcgtttcttcctcattgcccgacatctgttacagatgcggagaatcaggtcacctggctaaagattgcgacctacaggaggacgtggaggcgtgctataattgcggacgaggaggacacatagcaaaagattgcaaggagccgaaaagagagagggaacaatgctgttacaactgtggcaagccaggacatctggcccgagactgcgatcatgcagacgagcaaaagtgctacagctgcggcgagttcggtcacatccagaaagattgtacaaaagttaaatgttaccgatgtggcgaaaccgggcatgtggctattaactgctcaaaaaccagcgaagtgaattgctatagatgcggagaatcaggccatctggccagagaatgtacaatcgaagccaccgcttag

SEQ ID NO: 44467 - DNA, 1623 bp, Artificial Sequence
  derived and/or modified sequence
cgtgtgcagacccgcgtgtggcgcaggcaaggaccctcaaaataaacagcctctaccttgcgagccgtcttccccaggcctgcgtccgagtctccgccgctgcgggcccgctccgacgcggaagatctgactgcagccatgagcagcaatgagtgcttcaagtgtggacgatctggccactgggcccgggaatgtcctactggtggaggccgtggtcgtggaatgagaagccgtggcagaggtttccagtttgtttcctcgtctcttccagacatttgttatcgctgtggtgagtctggtcatcttgccaaggattgtgatcttcaggaggatgttgaagcctgctataactgcggtagaggtggccacattgccaaggactgcaaggagcccaagagagagcgagagcaatgctgctacaactgtggcaaaccaggccatctggctcgtgactgcgaccatgcagatgagcagaaatgctattcttgtggagaattcggacacattcaaaaagactgcaccaaagtgaagtgctataggtgtggtgaaactggtcatgtagccatcaactgcagcaagacaagtgaagtcaactgttaccgctgtggcgagtcagggcaccttgcacgggaatgcacaattgaggctacagcctaattattttcctttgtcgcccctcctttttctgattgatggttgtattattttctctgaatcctcttcactggccaaaggttggcagatagaggcaactcccaggccagtgagctttacttgccgtgtaaaaggaggaaaggggtggaaaaaaaccgactttctgcatttaactacaaaaaaagtttatgtttagtttggtagaggtgttatgtataatgctttgttaaagaaccccctttccgtgccactggtgaatagggattgatgaatgggaagagttgagtcagaccagtaagcccgtcctgggttccttgaacatgttcccatgtaggaggtaaaaccaattctggaagtgtctatgaacttccataaataactttaattttagtataatgatggtcttggattgtctgacctcagtagctattaaataacatcaagtaacatctgtatcaggccctacatagaacatacagttgagtgggagtaaacaaaaagataaacatgcgtgttaatggctgttcgagagaaatcggaataaaagcctaaacaggaacaacttcatcacagtgttgatgttggacacatagatggtgatggcaaaggtttagaacacattattttcaaagactaaatctaaaacccagagtaaacatcaatgctcagagttagcataatttggagctattcaggaattgcagagaaatgcattttcacagaaatcaagatgttatttttgtatactatatcacttagacaactgtgtttcatttgctgtaatcagtttttaaaagtcagatggaaagagcaactgaagtcctagaaaatagaaatgtaattttaaactattccaataaagctggaggaggaaggggagtttgactaaagttctttttgtttgtttcaaattttcattaatgtatatagtgcaaaataccatattaaagaggggaatgtggaggactg

SEQ ID NO: 44468 - protein, 170 aa, Artificial Sequence
  derived and/or modified sequence
MSSNECFKCGRSGHWARECPTGGGRGRGMRSRGRGFQFVSSSLPDICYRCGESGHLAKDCDLQEDACYNCGRGGHIAKDCKEPKREREQCCYNCGKPGHLARDCDHADEQKCYSCGEFGHIQKDCTKVKCYRCGETGHVAINCSKTSEVNCYRCGESGHLARECTIEATA

SEQ ID NO: 44469 - DNA, 513 bp, Artificial Sequence
  derived and/or modified sequence
atgagcagcaacgagtgcttcaagtgcggcagaagcggccactgggccagagagtgccccaccggcggcggcagaggcagaggcatgagaagcagaggcagaggcttccagttcgtgagcagcagcctgcccgacatctgctacagatgcggcgagagcggccacctggccaaggactgcgacctgcaggaggacgcctgctacaactgcggcagaggcggccacatcgccaaggactgcaaggagcccaagagagagagagagcagtgctgctacaactgcggcaagcccggccacctggccagagactgcgaccacgccgacgagcagaagtgctacagctgcggcgagttcggccacatccagaaggactgcaccaaggtgaagtgctacagatgcggcgagaccggccacgtggccatcaactgcagcaagaccagcgaggtgaactgctacagatgcggcgagagcggccacctggccagagagtgcaccatcgaggccaccgcctag

SEQ ID NO: 44470 - DNA, 513 bp, Artificial Sequence
  derived and/or modified sequence
atgagtagtaacgagtgcttcaaatgtgggcggtccggacactgggcccgagagtgccccactggcgggggacgagggaggggcatgagatctcgcggtagaggatttcaatttgtgtcctccagtctacccgacatttgctacagatgcggggaatctggtcacttggctaaggactgtgacctgcaggaggatgcgtgctacaactgtggccgaggaggtcacatcgcgaaagattgcaaggaacctaagagagagcgggagcagtgctgttacaattgcggcaaaccaggccatctggcaagggactgcgaccacgcggacgaacagaaatgttattcctgtggagagtttgggcatatccagaaagattgtactaaagttaaatgctaccggtgtggagaaactggacatgtggctatcaactgttctaagacctctgaagtaaactgttatcgctgcggagaaagcggccacctagcgcgggagtgcacaattgaggctaccgcctag

SEQ ID NO: 44471 - DNA, 513 bp, Artificial Sequence
  derived and/or modified sequence
atgagcagcaatgaatgcttcaagtgtggccgcagcggccactgggcccgggagtgccccactggaggcggccggggccggggcatgaggagccggggccggggcttccagtttgtgagcagcagcctgcctgacatctgctaccgctgtggggagagcggccacctggccaaggactgtgacctgcaggaggatgcctgctacaactgtggccggggcggccacatcgccaaggactgcaaggagcccaagcgggagcgggagcagtgctgctacaactgtgggaagccaggccacctggcccgggactgtgaccatgctgatgagcagaagtgctacagctgtggggagtttggccacatccagaaggactgcaccaaggtgaagtgctaccgctgtggggagaccggccacgtggccatcaactgcagcaagaccagcgaggtgaactgctaccgctgtggggagagcggccacctggccagagaatgtaccatcgaggccacagcctag

SEQ ID NO: 44472 - DNA, 513 bp, Artificial Sequence
  derived and/or modified sequence
atgagcagcaacgagtgcttcaagtgcggccggagcggccactgggcgcgagagtgccccaccggagggggaagagggcgtgggatgcgcagtcgagggcgcgggttccagttcgtctcatcctcccttcctgacatctgctaccggtgcggcgagagtggacaccttgcaaaggactgcgatctgcaggaggacgcatgttataattgtggacggggtgggcatatcgctaaagactgcaaggaacccaagcgcgaaagggagcagtgttgttataattgcggaaagccaggacatctcgctagggattgcgaccacgctgacgagcagaaatgttattcctgcggtgaattcgggcatattcagaaggattgcacaaaggttaagtgttataggtgtggggagactgggcatgtggcaattaactgcagcaagacaagcgaagttaattgctaccgctgcggcgagagcggtcacctcgctcgcgagtgtacaatagaggctactgcctag

SEQ ID NO: 44473 - DNA, 513 bp, Artificial Sequence
  derived and/or modified sequence
atgagttccaacgaatgctttaaatgcggcaggagtggccactgggctcgcgagtgtcccacaggcggtgggagaggaaggggtatgagatcgcgcggaaggggctttcaattcgttagttccagccttccagacatatgctatagatgtggagagtccggtcacttggcgaaggattgtgacctgcaagaggatgcttgttataattgtgggaggggcggacacatcgccaaagattgcaaggaacccaagagggagcgcgaacagtgctgttacaactgcggcaagcccggtcacttagctcgcgattgcgatcatgcagatgaacaaaagtgttattcctgcggggagtttgggcacatccagaaagattgtaccaaggtgaaatgttatcgctgcggcgaaacagggcatgtcgccattaactgctccaaaacctccgaggtgaactgctacaggtgcggagaatcaggtcacctggcacgggagtgtactatcgaagcaacagcatag

SEQ ID NO: 44474 - DNA, 1626 bp, Artificial Sequence
  derived and/or modified sequence
tggggccgtgtgcagacccgcgtgtggcgcaggcaaggaccctcaaaataaacagcctctaccttgcgagccgtcttccccaggcctgcgtccgagtctccgccgctgcgggcccgctccgacgcggaagatctgactgcagccatgagcagcaatgagtgcttcaagtgtggacgatctggccactgggcccgggaatgtcctactggtggaggccgtggtcgtggaatgagaagccgtggcagaggtttccagtttgtttcctcgtctcttccagacatttgttatcgctgtggtgagtctggtcatcttgccaaggattgtgatcttcaggaggatgcctgctataactgcggtagaggtggccacattgccaaggactgcaaggagcccaagagagagcgagagcaatgctgctacaactgtggcaaaccaggccatctggctcgtgactgcgaccatgcagatgagcagaaatgctattcttgtggagaattcggacacattcaaaaagactgcaccaaagtgaagtgctataggtgtggtgaaactggtcatgtagccatcaactgcagcaagacaagtgaagtcaactgttaccgctgtggcgagtcagggcaccttgcacgggaatgcacaattgaggctacagcctaattattttcctttgtcgcccctcctttttctgattgatggttgtattattttctctgaatcctcttcactggccaaaggttggcagatagaggcaactcccaggccagtgagctttacttgccgtgtaaaaggaggaaaggggtggaaaaaaaccgactttctgcatttaactacaaaaaaagtttatgtttagtttggtagaggtgttatgtataatgctttgttaaagaaccccctttccgtgccactggtgaatagggattgatgaatgggaagagttgagtcagaccagtaagcccgtcctgggttccttgaacatgttcccatgtaggaggtaaaaccaattctggaagtgtctatgaacttccataaataactttaattttagtataatgatggtcttggattgtctgacctcagtagctattaaataacatcaagtaacatctgtatcaggccctacatagaacatacagttgagtgggagtaaacaaaaagataaacatgcgtgttaatggctgttcgagagaaatcggaataaaagcctaaacaggaacaacttcatcacagtgttgatgttggacacatagatggtgatggcaaaggtttagaacacattattttcaaagactaaatctaaaacccagagtaaacatcaatgctcagagttagcataatttggagctattcaggaattgcagagaaatgcattttcacagaaatcaagatgttatttttgtatactatatcacttagacaactgtgtttcatttgctgtaatcagtttttaaaagtcagatggaaagagcaactgaagtcctagaaaatagaaatgtaattttaaactattccaataaagctggaggaggaaggggagtttgactaaagttctttttgtttgtttcaaattttcattaatgtatatagtgcaaaataccatattaaagaggggaatgtggaggactgaaa

SEQ ID NO: 44475 - protein, 399 aa, Artificial Sequence
  derived and/or modified sequence
MAHITINQYLQQVYEAIDSRDGASCAELVSFKHPHVANPRLQMASPEEKCQQVLEPPYDEMFAAHLRCTYAVGNHDFIEAYKCQTVIVQSFLRAFQAHKEENWALPVMYAVALDLRVFANNADQQLVKKGKSKVGDMLEKAAELLMSCFRVCASDTRAGIEDSKKWGMLFLVNQLFKIYFKINKLHLCKPLIRAIDSSNLKDDYSTAQRVTYKYYVGRKAMFDSDFKQAEEYLSFAFEHCHRSSQKNKRMILIYLLPVKMLLGHMPTVELLKKYHLMQFAEVTRAVSEGNLLLLHEALAKHEAFFIRCGIFLILEKLKIITYRNLFKKVYLLLKTHQLSLDAFLVALKFMQVEDVDIDEVQCILANLIYMGHVKGYISHQHQKLVVSKQNPFPPLSTVC

SEQ ID NO: 44476 - protein, 376 aa, Artificial Sequence
  derived and/or modified sequence
MAHITINQYLQQVYEAIDSRDGASCAELVSFKHPHVANPRLQMASPEEKCQQVLEPPYDEMFAAHLRCTYAVGNHDFIEAYKCQTVIVQYPLSFMAAVADQQLVKKGKSKVGDMLEKAAELLMSCFRVCASDTRAGIEDSKKWGMLFLVNQLFKIYFKINKLHLCKPLIRAIDSSNLKDDYSTAQRVTYKYYVGRKAMFDSDFKQAEEYLSFAFEHCHRSSQKNKRMILIYLLPVKMLLGHMPTVELLKKYHLMQFAEVTRAVSEGNLLLLHEALAKHEAFFIRCGIFLILEKLKIITYRNLFKKVYLLLKTHQLSLDAFLVALKFMQVEDVDIDEVQCILANLIYMGHVKGYISHQHQKLVVSKQNPFPPLSTVC

SEQ ID NO: 44477 - DNA, 1200 bp, Artificial Sequence
  derived and/or modified sequence
atggcacacataaccatcaatcaatatctccagcaggtctatgaggccattgactcccgcgatggcgcatcttgcgcagagctggtgagttttaagcatccccatgttgccaaccctcgactgcagatggcatccccagaggaaaaatgtcaacaggtattggagccaccttatgatgagatgttcgccgcccatttgcgctgtacgtacgccgtcggcaaccatgacttcattgaagcctacaagtgccagacagtgattgtgcagagctttctcagagcctttcaggcacacaaagaggaaaactgggcccttcccgtgatgtatgccgtggctctcgacttacgtgttttcgccaacaatgccgatcagcagctggtgaaaaagggaaaatccaaagtcggggacatgttggaaaaggcagccgaactactgatgtcctgttttcgagtctgcgccagcgacactagggctggcatcgaggattcaaaaaagtggggcatgctgttcctagtgaaccagctcttcaagatatactttaaaattaacaagttacacctctgcaagcccctgatccgggctattgattctagcaatcttaaagatgattattccactgcccagagagtgacctataaatactatgtcggtcggaaggccatgttcgattctgacttcaagcaggccgaggaatatttgagcttcgcgttcgaacattgccaccgctcttcccagaagaacaaaagaatgatcttaatatatctgttgccagtgaaaatgctgctcggtcatatgcctactgtggagttacttaagaagtatcacttaatgcaatttgccgaggtgacgcgtgcggtgtccgagggaaacctactgctgcttcatgaagccctcgctaaacacgaagctttcttcatacgatgtggcatttttttaatcctcgaaaagttgaagattatcacttatcgcaacttgtttaaaaaagtgtacctgctgttaaagacccatcaactgagccttgacgcctttttggtagccctcaagttcatgcaggtggaagatgtggacattgacgaagttcaatgtattctagccaatctcatttacatgggacacgtaaagggttacataagccaccagcatcagaagctggtggttagtaagcagaacccatttcctcccttgtctactgtctgttag

SEQ ID NO: 44478 - DNA, 1131 bp, Artificial Sequence
  derived and/or modified sequence
atggcccatattactataaaccaatacctgcagcaggtgtacgaggccattgattcacgggacggcgcatcttgcgctgaactggtttcttttaaacatcctcatgtcgccaatccgcgccttcaaatggcctctcccgaagaaaagtgccaacaggtgctcgaaccgccctatgacgaaatgttcgcagcccacctccggtgcacctacgccgttggaaaccacgattttatagaagcttacaagtgtcagaccgtcatcgttcagtatcctcttagcttcatggcagcagtggccgatcagcagctggtcaagaagggtaagtcgaaggtgggagatatgctggaaaaggcagccgaactcctgatgagctgtttccgggtttgcgctagtgacacccgtgctggcattgaggatagtaaaaaatgggggatgctgttccttgtgaaccagctgtttaagatctattttaaaattaacaaactgcatctgtgcaagccactcattcgagcaatcgacagcagcaatctaaaggatgattactctactgcccagcgggtgacctataagtattacgtgggcagaaaggccatgtttgatagcgattttaagcaggctgaagagtacctaagtttcgctttcgaacactgccacagaagttctcagaaaaacaagagaatgatccttatctacctcctgccagtaaagatgctactaggccatatgcctacagtggaactactaaagaagtaccacctgatgcagttcgcggaggtgacgcgcgctgtatccgaaggtaacttgctgttgctgcatgaggccctcgcaaaacacgaggccttctttattcgctgcgggatctttttgatactggagaagctgaaaattatcacttacagaaacttgttcaagaaggtttatcttttacttaaaacccatcagcttagtctggacgcctttctggttgcccttaagttcatgcaggtggaagatgttgatattgacgaggtgcaatgtattctggctaacttgatctacatgggacacgtgaaggggtacatttcacaccagcaccagaagttagtggtgtctaaacagaatcctttccctccactttctacagtctgttag

SEQ ID NO: 44479 - DNA, 1200 bp, Artificial Sequence
  derived and/or modified sequence
atggcgcacattaccatcaatcagtacctgcagcaggtgtacgaggccattgactccagggatggcgcgagctgcgctgagcttgtctcctttaagcatccgcatgttgccaatcctcggcttcagatggcctctcccgaagaaaaatgccagcaggtgcttgagcctccttacgatgagatgttcgcagcccatctgcgatgtacttatgcagtgggaaaccacgattttatcgaggcctacaaatgccagactgtgattgtacaaagctttcttcgggcgttccaggctcacaaggaagaaaactgggccttaccagttatgtatgcggtcgctctggacttgcgcgtgttcgccaacaacgcagaccaacagctggttaagaaggggaagtctaaagtgggcgacatgctcgagaaggcggccgagctcttgatgagttgcttccgagtttgcgccagcgacacaagggccgggattgaggacagcaagaaatgggggatgttgtttctcgtgaatcaactttttaagatctactttaagatcaacaagctccatctgtgtaaaccgctcatccgcgccattgatagttctaacttgaaagacgattattcaacagcccagcgtgtgacatataagtactacgtaggaagaaaggcaatgttcgattctgatttcaaacaggccgaggagtacctcagcttcgcttttgaacattgccaccggagcagtcagaagaataaaaggatgatcctcatatatttactgccagtgaaaatgcttctaggccacatgcccactgtggagttgctgaagaagtaccatctaatgcaatttgctgaagtgaccagggccgtgagtgagggcaaccttctcctcctccatgaggccctggccaagcatgaggccttttttatcagatgcggcatctttctgatccttgaaaagttaaagataattacttacaggaacctttttaagaaagtgtacttgctattgaaaacccaccaactgagtctcgacgccttcctcgtcgcgctgaagtttatgcaggtcgaggacgtcgacatcgatgaggtgcagtgtatactcgccaatcttatctatatgggccatgtaaagggttatatctcacatcaacaccagaagttggtcgtgagcaaacagaatcccttccccccactgagtacagtgtgttag

SEQ ID NO: 44480 - DNA, 1200 bp, Artificial Sequence
  derived and/or modified sequence
atggcacacattactatcaaccaatacctccagcaggtgtatgaggccattgactctcgagatggtgcatcctgcgcagagcttgtgtccttcaaacacccccacgtcgccaaccctcgacttcagatggccagtccagaagagaagtgccagcaggttctcgagcctccttatgacgagatgttcgcagcccacttgagatgcacatatgctgttgggaaccacgactttatcgaggcctataaatgccagacagtaattgtccagtccttcctacgggcctttcaggcacacaaggaggaaaactgggccctccccgtcatgtacgctgtggccctcgatcttcgggtattcgccaataatgcagaccagcaactggttaaaaagggtaagagcaaagtgggggatatgcttgaaaaggctgcagaactactgatgtcttgtttccgtgtttgcgcctccgataccagggctggcatcgaagactccaaaaaatggggcatgctttttctggtgaatcagttatttaagatttattttaagatcaacaaactgcacttatgtaagcctctcatccgcgctattgacagcagcaacctgaaggatgattatagcactgcccagcgggtcacctataagtactacgtgggccgcaaagccatgtttgactctgattttaaacaggccgaggaatatttgtcatttgcttttgagcattgtcacaggtccagtcagaaaaataaaaggatgattttgatttatctgcttccggtgaaaatgctgctaggacacatgcccaccgtggaattgttgaaaaagtatcatttgatgcagttcgcagaggtgacacgggctgtgtccgagggcaacctcctgcttctccatgaagccctggccaagcacgaggcattctttattcggtgtggaatctttctaatcctcgaaaagcttaaaatcatcacttaccggaacttgtttaaaaaagtgtatctcctgctcaagactcaccagctgtcacttgacgcattcctagtagcactcaagtttatgcaggttgaggacgtggatatcgacgaagtccagtgtatcttagcaaacctcatctacatgggtcatgttaagggatatattagtcaccagcaccagaaactcgtagtgtctaaacaaaacccatttccacctctgtcgaccgtgtgctag

SEQ ID NO: 44481 - DNA, 1200 bp, Artificial Sequence
  derived and/or modified sequence
atggcccacatcaccatcaaccagtacctgcagcaggtgtatgaggccatcgacagcagagatggagccagctgtgccgagctggtgtccttcaagcacccccacgtggccaacccccggctgcagatggccagccctgaggagaagtgccagcaggtgctggagcccccctatgatgagatgtttgctgcccacctgcgctgcacctatgctgtgggcaaccacgacttcatcgaggcctacaagtgccagacagtgattgtgcagagcttcctgcgggccttccaggcccacaaggaggagaactgggccctgcctgtgatgtatgctgtggccctggacctgcgggtgtttgccaacaatgctgaccagcagctggtgaagaagggcaagagcaaggtgggggacatgctggagaaggctgctgagctgctgatgagctgcttccgggtgtgtgccagtgacacccgggccggcatcgaggacagcaagaagtggggcatgctgttcctggtgaaccagctgttcaagatctacttcaagatcaacaagctgcacctgtgcaagcccctcatccgggccatcgacagcagcaacctgaaggatgactacagcacagcccagagggtgacctacaagtactacgtgggcaggaaggccatgtttgacagcgacttcaagcaggccgaggagtacctgagctttgcctttgagcactgccacaggagcagccagaagaacaagaggatgatcctgatctacctgctgcctgtgaagatgctgctgggccacatgcccaccgtggagctgctgaagaagtaccacctgatgcagtttgctgaggtgaccagggctgtgtctgagggcaacctgctgctgctgcacgaggccctggccaagcatgaggccttcttcatccgctgtggcatcttcctgatcctggagaagctgaagatcatcacctacagaaacctcttcaagaaggtgtacctgctgctgaagacccaccagctgagcctggatgccttcctggtggccctgaagttcatgcaggtggaggatgtggacattgatgaggtgcagtgcatcctggccaacctgatctacatgggccacgtgaagggctacatcagccaccagcaccagaagctggtggtgtccaagcagaaccccttcccccccctgagcacagtgtgctag

SEQ ID NO: 44482 - DNA, 1131 bp, Artificial Sequence
  derived and/or modified sequence
atggcccacatcaccatcaaccagtacctgcagcaggtgtatgaggccatcgacagcagagatggagccagctgtgccgagctggtgtccttcaagcacccccacgtggccaacccccggctgcagatggccagccctgaggagaagtgccagcaggtgctggagcccccctatgatgagatgtttgctgcccacctgcgctgcacctatgctgtgggcaaccacgacttcatcgaggcctacaagtgccagacagtgattgtgcagtaccccctgtccttcatggctgctgtggccgaccagcagctggtgaagaagggcaagagcaaggtgggggacatgctggagaaggctgctgagctgctgatgagctgcttccgggtgtgtgccagtgacaccagggctggcatcgaggacagcaagaagtggggcatgctgttcctggtgaaccagctgttcaagatctacttcaagatcaacaagctgcacctgtgcaagcccctcatccgggccatcgacagcagcaacctgaaggatgactacagcacagcccagagggtgacctacaagtactacgtgggcaggaaggccatgtttgacagcgacttcaagcaggccgaggagtacctgagctttgcctttgagcactgccacaggagcagccagaagaacaagaggatgatcctgatctacctgctgcctgtgaagatgctgctgggccacatgcccaccgtggagctgctgaagaagtaccacctgatgcagtttgctgaggtgaccagggctgtgtctgagggcaacctgctgctgctgcacgaggccctggccaagcatgaggccttcttcatccgctgtggcatcttcctgatcctggagaagctgaagatcatcacctacagaaacctcttcaagaaggtgtacctgctgctgaagacccaccagctgagcctggatgccttcctggtggccctgaagttcatgcaggtggaggatgtggacattgatgaggtgcagtgcatcctggccaacctgatctacatgggccacgtgaagggctacatcagccaccagcaccagaagctggtggtgtccaagcagaaccccttcccccccctgagcacagtgtgctag

SEQ ID NO: 44483 - DNA, 1200 bp, Artificial Sequence
  derived and/or modified sequence
atggcccacatcaccatcaaccagtacctgcagcaggtgtacgaggccattgattcaagggatggcgcgtcttgcgctgagctcgtatcattcaagcatccacatgtcgccaacccccgcctgcagatggcaagtcccgaggagaagtgtcaacaggtgcttgaaccgccatacgatgaaatgttcgctgctcacctgcggtgtacatatgccgtaggtaaccacgactttattgaggcatataagtgtcagaccgtgatcgtacaatcctttctgcgtgcttttcaggctcacaaggaggaaaactgggcgctaccagtgatgtatgccgtggcactagacttaagagtgttcgctaacaatgccgatcagcagctggtcaagaaaggaaaaagtaaggtaggtgatatgctggagaaggccgcagagctgctgatgtcctgcttcagggtgtgcgcctccgacacccgagccgggatcgaagacagtaagaaatggggcatgttgttcttggtcaaccagctctttaaaatctattttaagattaataagctacacctttgtaagcccctcattagggccatagatagttcgaacttgaaggatgattacagcaccgctcagcgggtaacctacaaatattacgtgggtagaaaggctatgtttgacagtgacttcaaacaagcagaagaatatctttccttcgcttttgagcattgtcacaggtcatcacagaaaaacaaaaggatgatactcatctatctgctgccggttaagatgctcctgggccacatgcctacagtggaactgctaaaaaaatatcacctcatgcaattcgccgaagttactcgtgctgtgtctgagggaaatctattgttgctgcacgaagcactcgccaagcacgaggcattcttcattcgatgtggtattttcctgatactggagaaactcaagattatcacgtatcgcaatctgtttaaaaaggtttacctgcttctgaaaacacaccagttatcactggatgcattcctggttgctctgaagttcatgcaggtcgaagatgtagatatagacgaagtgcaatgtatcctcgccaatctgatttacatgggtcacgtgaaggggtacatctcccatcagcatcagaagctggtagtatctaagcaaaacccatttcctcccctgtcaactgtctgctag

SEQ ID NO: 44484 - DNA, 1131 bp, Artificial Sequence
  derived and/or modified sequence
atggcccacatcaccatcaaccagtacctgcagcaggtgtacgaggctattgactcccgggatggtgcttcctgcgccgaactcgtttccttcaagcacccccacgtggcaaaccctagactacagatggcgtctccggaagaaaagtgccagcaggtcctcgaacctccctacgacgaaatgtttgccgcccacttacgttgcacctacgctgtcgggaaccacgacttcattgaggcttacaagtgccagactgtgattgtgcagtaccctctgtccttcatggcggcagtagccgatcagcagctggttaagaagggaaaaagcaaggtgggagatatgctagagaaagctgcagagctgctgatgtcctgttttagagtctgtgcctccgatacacgtgcaggaatagaagatagcaagaaatggggcatgctctttctagtcaatcagctgttcaagatttattttaagattaacaagctccacctgtgcaagcctctgatccgagcgattgatagttcaaatctcaaggatgattactccaccgcccagcgagtgacctataagtactacgtagggagaaaggcgatgttcgacagcgattttaagcaggcagaggagtacttgtcttttgcatttgagcattgtcaccgatccagtcaaaagaataaaaggatgattcttatttacttgttaccagtgaagatgctattaggccacatgccaaccgtcgagctccttaagaagtatcatctcatgcagtttgctgaagtgactcgcgctgtgagcgagggcaaccttctgctgttgcacgaggcgcttgccaaacatgaggccttttttatccgctgcggcatttttttgatcctggagaagctcaaaattatcacttacagaaaccttttcaaaaaggtctacctgctgctgaaaacccatcagctaagtttggatgccttcttagtggccttgaagtttatgcaggtggaggatgtggacatcgacgaagtgcagtgcattttggccaatctaatatatatggggcacgtgaagggctatatcagtcaccagcatcagaagttggtagttagcaagcagaacccatttccccctctgagtaccgtatgctag

SEQ ID NO: 44485 - DNA, 1200 bp, Artificial Sequence
  derived and/or modified sequence
atggcccacatcaccatcaaccagtacctgcagcaggtgtacgaggccatcgattcacgcgatggagcaagttgtgccgagctggtctctttcaaacatcctcatgttgccaaccctcgactgcaaatggcctcacctgaggagaaatgtcaacaagttttagagccaccctacgatgagatgttcgcagcgcacctacggtgcacgtatgccgtggggaatcatgattttatagaggcttacaaatgccagactgtgatcgttcagtcttttctccgagcctttcaggcccataaggaggaaaattgggccttgccggtgatgtacgctgtggcgcttgatttacgcgtctttgccaacaatgccgaccagcaactggtcaagaagggcaaatctaaggtgggagacatgctggagaaagcagcggagcttctgatgagctgcttccgtgtctgtgcaagcgatacgagggctgggatcgaggactccaaaaagtggggcatgctattcctggtgaaccagttgttcaagatatatttcaaaataaacaagctgcatctctgtaaacctttgattcgagccatcgacagttccaaccttaaggatgactactcaactgcgcaacgagttacctataaatattacgtaggtcgaaaggctatgtttgatagcgacttcaagcaagcggaagagtacctatcattcgcctttgagcactgtcaccgcagctctcagaaaaataaacggatgatcctcatctacctgctccccgttaagatgctcctgggacacatgcctaccgtagaactcctaaaaaaatatcacctgatgcagtttgccgaagtgaccagagctgtgtcggagggaaacttattgctcctacatgaagcgctggcaaagcacgaagctttcttcataaggtgtggaatttttctcatcctcgagaagcttaagattattacataccgtaacttattcaagaaagtctatctactgcttaagactcaccaattgagtctcgacgcctttctagtcgccctgaaatttatgcaggttgaagacgtggacatcgacgaagtgcagtgcattttggccaacctcatctatatgggccacgtgaagggttatattagtcaccagcatcagaagctcgtggtgagcaaacagaaccctttcccccctttatccaccgtgtgctag

SEQ ID NO: 44486 - DNA, 1200 bp, Artificial Sequence
  derived and/or modified sequence
atggcccacatcaccatcaaccagtacctgcagcaggtgtacgaggccatcgattcccgggacggggccagctgtgccgaactcgtgtctttcaagcacccccacgtggcgaacccgaggctccagatggcgagtcctgaggagaaatgtcagcaggtccttgagcccccctacgacgagatgttcgccgcccatctgcggtgtacctacgctgtcggaaatcacgattttatcgaagcgtataaatgccagaccgtgatcgtgcagtccttcttaagggccttccaggctcataaagaggagaattgggcccttcctgtgatgtatgccgtggcactggatctgcgagtcttcgcaaacaatgccgatcaacagttagttaagaaaggcaaatcaaaagttggcgacatgttggagaaggcagcagagctgcttatgtcttgcttcagagtatgcgcgtccgatacaagagccgggattgaggactcaaagaagtggggcatgttgtttctcgttaatcagctgtttaagatctattttaagatcaacaagttacacctgtgcaaaccgttgattcgggcgatcgactcgtcaaacctcaaggatgactatagcacagctcagagggttacatacaagtattacgttggtagaaaggcgatgttcgatagtgattttaagcaggccgaagagtatttgtccttcgcttttgagcactgtcaccggagttctcagaaaaataagcgtatgatattaatctacctgctcccagtgaaaatgcttctggggcacatgcccaccgtcgagcttttgaaaaaataccacctgatgcagttcgctgaagttactagggctgtatctgaggggaatctgctcctgctgcacgaagcccttgctaaacacgaggccttcttcatcagatgtggcatctttttaatattggaaaaactcaagattatcacgtataggaatctcttcaagaaggtatatctcctgctaaagacccaccagctgtccttggatgcctttcttgttgccctcaaatttatgcaggtggaggatgtcgacatcgacgaggtgcaatgtatactcgccaatctgatttatatgggacacgtaaaagggtatatatctcaccagcaccaaaaattggtggtgtccaaacagaatccatttccacctctgtctactgtctgttag

SEQ ID NO: 44487 - DNA, 1898 bp, Artificial Sequence
  derived and/or modified sequence
ggaccgagggccggaagtgacgccagctggcccgcttgaggcgtagggggtggcgctctccgttcggcggcgctcccatggcgcacattaccattaaccagtacctgcagcaggtgtacgaagccatcgacagcagagatggagcatcttgtgcagagttggtgtcttttaaacatcctcatgttgcaaacccacgacttcaaatggcctctccagaggagaagtgtcaacaagtcttggaacccccttatgatgaaatgtttgcagctcatttaaggtgcacttatgcagtggggaatcatgacttcatagaggcatacaagtgccagaccgtgatagtccaatcattcttgcgagcattccaggcccacaaagaagaaaactgggctctgcctgtcatgtatgcagtagcgcttgaccttcgagtgtttgccaataatgcagatcaacagttggtaaagaaaggaaaaagcaaagttggggacatgttggaaaaagcagcagagttactgatgagctgtttccgggtctgtgccagcgacacccgtgctggtatagaggactctaagaagtggggcatgctgtttctggtgaaccagctgtttaaaatctacttcaagatcaacaaactccatttatgtaaacccctaattagagcaattgacagctcaaacctgaaagacgattacagcactgcacagagagtaacatacaaatactacgttggacgcaaggctatgtttgacagcgattttaagcaagctgaggagtacctgtcatttgcctttgagcattgtcaccgttctagtcagaagaacaaaaggatgattctgatctatttgcttccagtaaaaatgctattgggtcacatgcccactgtggagctcctgaaaaagtatcacctgatgcagtttgcggaagtaaccagagctgtgagcgagggcaacctgctgctgctgcacgaggcgctggcgaagcacgaggccttcttcattcgctgcggaatcttcctcatcctggagaagctgaagatcatcacctacaggaacctctttaagaaagtgtatttgttactgaaaacacaccagctgtctctggatgcttttctggttgccttgaagttcatgcaggtggaggacgtggacattgacgaagttcagtgtattctggctaacttgatatacatgggacacgtcaaaggctacatatcgcatcagcatcagaagctggtggtcagcaagcagaacccatttcctcccctgtccacggtgtgttgaaagtacacggagccccgaggacgggtgagcagttgtttctttccactttggttgtgctgatgagaccggtccggtactgcaacaaggctccctgaagccggaactcttggaggcgcttttcccagggatgctgaggctgagattttcagcacacccgagttaatctccttcatttgtaactaatttcagcctgatgaaaacctggaattcctttttcacagactcggctggttctggagtctttgtgagacttctttgaaggaggctttgcgtgaaggctgctcggctcacttttcctaagtgtggttcctgaaggctgtctttgtaactttttgtagttctttgtgtaaaaagcgtattctgaatttatacacatggcatgttcttcattatatcttccaggatacatctatttttatatattaaatttgaatgtgttatcaaaatgcttggttaacttaaggcacctttttaaaagcagaatttaatttgatttaaattttccagattttatagcttgcctgtatggatgctcctcaatttatgatagggttacatcccaataaacttattttatttgcctttgctttgttggttaaaaaaaaatttcttttaaaaaac

SEQ ID NO: 44488 - DNA, 1555 bp, Artificial Sequence
  derived and/or modified sequence
gaggcgtagggggtggcgctctccgttcggcggcgctcccatggcgcacattaccattaaccagtacctgcagcaggtgtacgaagccatcgacagcagagatggagcatcttgtgcagagttggtgtcttttaaacatcctcatgttgcaaacccacgacttcaaatggcctctccagaggagaagtgtcaacaagtcttggaacccccttatgatgaaatgtttgcagctcatttaaggtgcacttatgcagtggggaatcatgacttcatagaggcatacaagtgccagaccgtgatagtccaatatcctttgtcgttcatggcagctgtcgcagatcaacagttggtaaagaaaggaaaaagcaaagttggggacatgttggaaaaagcagcagagttactgatgagctgtttccgggtctgtgccagcgacacccgtgctggtatagaggactctaagaagtggggcatgctgtttctggtgaaccagctgtttaaaatctacttcaagatcaacaaactccatttatgtaaacccctaattagagcaattgacagctcaaacctgaaagacgattacagcactgcacagagagtaacatacaaatactacgttggacgcaaggctatgtttgacagcgattttaagcaagctgaggagtacctgtcatttgcctttgagcattgtcaccgttctagtcagaagaacaaaaggatgattctgatctatttgcttccagtaaaaatgctattgggtcacatgcccactgtggagctcctgaaaaagtatcacctgatgcagtttgcggaagtaaccagagctgtgagcgagggcaacctgctgctgctgcacgaggcgctggcgaagcacgaggccttcttcattcgctgcggaatcttcctcatcctggagaagctgaagatcatcacctacaggaacctctttaagaaagtgtatttgttactgaaaacacaccagctgtctctggatgcttttctggttgccttgaagttcatgcaggtggaggacgtggacattgacgaagttcagtgtattctggctaacttgatatacatgggacacgtcaaaggctacatatcgcatcagcatcagaagctggtggtcagcaagcagaacccatttcctcccctgtccacggtgtgttgaaagtacacggagccccgaggacggactcggctggttctggagtctttgtgagacttctttgaaggaggctttgcgtgaaggctgctcggctcacttttcctaagtgtggttcctgaaggctgtctttgtaactttttgtagttctttgtgtaaaaagcgtattctgaatttatacacatggcatgttcttcattatatcttccaggatacatctatttttatatattaaatttgaatgtgttatcaaaatgcttggttaacttaaggcacctttttaaaagcagaatttaatttgatttaaattttccagattttatagcttgcctgtatggatgctcctcaatttatgatagggttacatcccaataaacttattttatttgc

SEQ ID NO: 44489 - DNA, 1654 bp, Artificial Sequence
  derived and/or modified sequence
gggggtggcgctctccgttcggcggcgctcccatggcgcacattaccattaaccagtacctgcagcaggtgtacgaagccatcgacagcagagatggagcatcttgtgcagagttggtgtcttttaaacatcctcatgttgcaaacccacgacttcaaatggcctctccagaggagaagtgtcaacaagtcttggaacccccttatgatgaaatgtttgcagctcatttaaggtgcacttatgcagtggggaatcatgacttcatagaggcatacaagtgccagaccgtgatagtccaatcattcttgcgagcattccaggcccacaaagaagaaaactgggctctgcctgtcatgtatgcagtagcgcttgaccttcgagtgtttgccaataatgcagatcaacagttggtaaagaaaggaaaaagcaaagttggggacatgttggaaaaagcagcagagttactgatgagctgtttccgggtctgtgccagcgacacccgtgctggtatagaggactctaagaagtggggcatgctgtttctggtgaaccagctgtttaaaatctacttcaagatcaacaaactccatttatgtaaacccctaattagagcaattgacagctcaaacctgaaagacgattacagcactgcacagagagtaacatacaaatactacgttggacgcaaggctatgtttgacagcgattttaagcaagctgaggagtacctgtcatttgcctttgagcattgtcaccgttctagtcagaagaacaaaaggatgattctgatctatttgcttccagtaaaaatgctattgggtcacatgcccactgtggagctcctgaaaaagtatcacctgatgcagtttgcggaagtaaccagagctgtgagcgagggcaacctgctgctgctgcacgaggcgctggcgaagcacgaggccttcttcattcgctgcggaatcttcctcatcctggagaagctgaagatcatcacctacaggaacctctttaagaaagtgtatttgttactgaaaacacaccagctgtctctggatgcttttctggttgccttgaagttcatgcaggtggaggacgtggacattgacgaagttcagtgtattctggctaacttgatatacatgggacacgtcaaaggctacatatcgcatcagcatcagaagctggtggtcagcaagcagaacccatttcctcccctgtccacggtgtgttgaaagtacacggagccccgaggacggcctgatgaaaacctggaattcctttttcacagactcggctggttctggagtctttgtgagacttctttgaaggaggctttgcgtgaaggctgctcggctcacttttcctaagtgtggttcctgaaggctgtctttgtaactttttgtagttctttgtgtaaaaagcgtattctgaatttatacacatggcatgttcttcattatatcttccaggatacatctatttttatatattaaatttgaatgtgttatcaaaatgcttggttaacttaaggcacctttttaaaagcagaatttaatttgatttaaattttccagattttatagcttgcctgtatggatgctcctcaatttatgatagggttacatcccaataaacttattttatttgcctttgc

SEQ ID NO: 44490 - DNA, 1671 bp, Artificial Sequence
  derived and/or modified sequence
agacggaccgagggccggaagtgacgccagctggcccgcttgaggcgtagggggtggcgctctccgttcggcggcgctcccatggcgcacattaccattaaccagtacctgcagcaggtgtacgaagccatcgacagcagagatggagcatcttgtgcagagttggtgtcttttaaacatcctcatgttgcaaacccacgacttcaaatggcctctccagaggagaagtgtcaacaagtcttggaacccccttatgatgaaatgtttgcagctcatttaaggtgcacttatgcagtggggaatcatgacttcatagaggcatacaagtgccagaccgtgatagtccaatcattcttgcgagcattccaggcccacaaagaagaaaactgggctctgcctgtcatgtatgcagtagcgcttgaccttcgagtgtttgccaataatgcagatcaacagttggtaaagaaaggaaaaagcaaagttggggacatgttggaaaaagcagcagagttactgatgagctgtttccgggtctgtgccagcgacacccgtgctggtatagaggactctaagaagtggggcatgctgtttctggtgaaccagctgtttaaaatctacttcaagatcaacaaactccatttatgtaaacccctaattagagcaattgacagctcaaacctgaaagacgattacagcactgcacagagagtaacatacaaatactacgttggacgcaaggctatgtttgacagcgattttaagcaagctgaggagtacctgtcatttgcctttgagcattgtcaccgttctagtcagaagaacaaaaggatgattctgatctatttgcttccagtaaaaatgctattgggtcacatgcccactgtggagctcctgaaaaagtatcacctgatgcagtttgcggaagtaaccagagctgtgagcgagggcaacctgctgctgctgcacgaggcgctggcgaagcacgaggccttcttcattcgctgcggaatcttcctcatcctggagaagctgaagatcatcacctacaggaacctctttaagaaagtgtatttgttactgaaaacacaccagctgtctctggatgcttttctggttgccttgaagttcatgcaggtggaggacgtggacattgacgaagttcagtgtattctggctaacttgatatacatgggacacgtcaaaggctacatatcgcatcagcatcagaagctggtggtcagcaagcagaacccatttcctcccctgtccacggtgtgttgaaagtacacggagccccgaggacggactcggctggttctggagtctttgtgagacttctttgaaggaggctttgcgtgaaggctgctcggctcacttttcctaagtgtggttcctgaaggctgtctttgtaactttttgtagttctttgtgtaaaaagcgtattctgaatttatacacatggcatgttcttcattatatcttccaggatacatctatttttatatattaaatttgaatgtgttatcaaaatgcttggttaacttaaggcacctttttaaaagcagaatttaatttgatttaaattttccagattttatagcttgcctgtatggatgctcctcaatttatgatagggttacatcccaataaacttattttatttgcctttgc

SEQ ID NO: 44491 - DNA, 1200 bp, Artificial Sequence
  derived and/or modified sequence
atggcacacatcacaatcaatcagtacctgcagcaggtatacgaagctatcgatagccgtgacggagcaagttgtgccgaactagtttcttttaaacatcctcacgttgcaaatcctcggctgcagatggcatccccagaagagaaatgtcagcaagtccttgagccaccctatgatgaaatgttcgccgctcatctgcggtgcacatacgcagtcgggaaccatgacttcatcgaggcatacaaatgtcaaaccgtaattgtgcaaagctttctccgggcatttcaggcccacaaagaagagaattgggctctgcctgtgatgtatgcagtagccctggacctaagggtgtttgccaacaatgccgatcagcagttagtgaagaaaggcaagagcaaggtgggcgacatgctcgagaaggcagcagagctcctcatgtcatgttttagagtatgtgctagtgacactcgggcaggcatcgaagacagcaaaaagtgggggatgctgttcctggttaatcaattattcaagatttatttcaagatcaataaactacacctatgtaagcccctcatccgagccatagatagttcaaacctgaaagacgactatagtaccgcacagcgagtgacctacaagtattacgtcggcagaaaggcaatgttcgatagcgattttaaacaggcagaggagtacctatccttcgcgttcgagcattgccatcgcagctcccagaagaataagcgtatgatcctaatttatctgctccccgtgaagatgctattgggccatatgcctacagtggagctgctcaagaagtatcatctgatgcagtttgctgaagtcacacgagcggtaagtgaaggcaacttactgcttcttcacgaagccttagctaagcacgaggccttcttcatacgctgcggtatcttcttaattcttgagaaattgaaaatcattacatataggaatctgttcaaaaaggtatacctgctcctgaagacgcatcagttgtcgctggacgcctttcttgtagccctcaagttcatgcaggttgaggacgtggacatcgatgaagttcaatgcatcctcgccaacctgatctatatggggcatgtcaagggctacattagtcatcaacaccaaaaacttgtcgtgagcaagcaaaatccattcccacccctatccacggtgtgttag

SEQ ID NO: 44492 - DNA, 1131 bp, Artificial Sequence
  derived and/or modified sequence
atggcccatatcacgattaaccagtacttacagcaggtgtatgaagccatagatagtcgagacggagcgtcttgtgccgagctcgtaagttttaaacatccccacgtggccaatcctagactacagatggcgtcacctgaggaaaagtgtcaacaggtactggagcccccttatgatgagatgtttgcggcacacctcaggtgtacctacgctgtaggcaaccacgactttatcgaagcctataagtgtcagaccgttattgtgcaatatcccttgagcttcatggctgccgtcgcagatcagcagttggtgaagaaggggaagagtaaggtgggcgatatgctcgaaaaggccgctgaactgctgatgtcctgcttcagggtatgtgcttcagacacaagggctggcattgaggactccaaaaagtgggggatgttgttcctagtcaatcaactcttcaaaatctattttaagattaacaaactccacctttgcaagccgctcatccgcgcaattgactcctctaacctgaaggatgattatagcactgctcagcgggtgacatacaagtactacgtcgggagaaaagcgatgtttgacagcgactttaagcaggccgaagaatacctgtccttcgcgtttgagcactgtcacaggtcttcccagaagaacaagaggatgattctgatctacttgctgcccgtgaagatgttgttaggtcacatgccaaccgtcgagctcctgaaaaaataccatctgatgcaatttgccgaggtgacacgtgcagtgtccgagggcaacctgttgctgctccacgaggcgctcgcaaaacacgaggcatttttcattcgttgtggcatcttcttaatcctggagaagctcaagattatcacatataggaatctgttcaaaaaagtatacttactcctgaagacacaccagttaagcctagacgcctttctggtcgcgctgaagttcatgcaggtcgaagacgttgacattgatgaggtgcaatgcatcctcgccaacctcatatatatgggccatgttaaaggatacatcagccaccagcaccagaagctcgtggtgtcaaaacaaaatccttttcccccactctccacagtctgctag

SEQ ID NO: 44493 - DNA, 1200 bp, Artificial Sequence
  derived and/or modified sequence
atggctcatatcactatcaatcagtatcttcagcaggtgtacgaagccatcgacagcagagatggtgcatcctgcgccgaattggtctccttcaagcaccctcacgtggcaaatccacggctgcaaatggctagccctgaggagaaatgtcaacaggttctcgagccaccttacgatgagatgtttgctgcccacttgcggtgcacttatgcagtgggcaaccatgacttcattgaggcatacaaatgtcagacagttatcgtgcagtcattcttgcgtgcatttcaagcgcataaagaggaaaactgggcattgcctgtcatgtatgccgtcgccctcgacctgcgggtttttgctaataacgccgatcaacaactagttaaaaagggcaagagcaaagtgggggatatgctcgagaaggctgctgaactgttaatgagctgctttagagtctgcgccagtgatacccgagcaggaattgaagattctaagaagtgggggatgctcttcttggtaaaccaactgttcaagatttatttcaagataaataaattacacctgtgtaagcccctgattagagctatcgactcttctaacctcaaagacgactactctacagcccaacgcgtcacctataaatattacgtagggaggaaggctatgttcgacagcgatttcaagcaagccgaggaatatctgtcgttcgcctttgaacactgccatcggtcatctcagaaaaataaacggatgattttgatatacctgcttcctgtgaaaatgctgctgggccacatgcccacagtcgagctgctcaaaaagtaccacttaatgcagttcgccgaagtgactagagcagtgtcggaaggaaaccttctattgctacatgaagcactggctaagcacgaggctttttttattcgatgcggaattttcttgatcctcgaaaaactcaaaataattacatatcggaatctctttaaaaaggtgtacctcctgttaaagacccaccagctctctttggatgcattcctggtagccctgaagttcatgcaggttgaggacgttgacattgacgaggtgcaatgtattctggctaatcttatttatatggggcatgtgaaaggctatattagtcatcagcaccagaaattagtggtatccaagcaaaacccattccccccactgagtaccgtgtgctag

SEQ ID NO: 44494 - DNA, 1200 bp, Artificial Sequence
  derived and/or modified sequence
atggcacatatcactattaaccagtacctgcagcaggtgtacgaagctattgatagcagagacggtgcaagttgtgcagagctcgtgtcctttaagcatcctcacgtggcaaacccccgtctgcagatggcatcccccgaagaaaagtgccaacaggtcctggagcctccctatgacgagatgtttgccgcacacttgagatgcacctatgctgtgggtaatcatgactttatcgaggcttataaatgccaaacggttatcgtgcagtcatttctgagagcttttcaggcgcacaaggaggaaaattgggctttacctgttatgtacgctgtggctctagatctgcgggtgttcgccaataatgctgatcagcagttggtcaaaaagggcaaaagcaaggttggagacatgctggaaaaggccgcagagctgctcatgagttgctttcgtgtgtgtgcatcagataccagagccggaatcgaggacagcaaaaaatgggggatgttattcctggtgaaccaactttttaagatttatttcaaaatcaacaagctgcacctatgcaagccactcattagggccatcgacagctctaacctgaaggacgactacagcaccgctcaaagagttacatataagtactatgtcggcaggaaggcaatgttcgattcagattttaagcaggctgaggagtacctctcattcgcttttgagcactgccacaggagttcacagaaaaacaagcgaatgattttaatatacctgttacctgtgaagatgttattgggccacatgcccacagtggagcttcttaagaagtatcatctgatgcaattcgccgaggttacccgggcagtctctgaaggaaatctgctactgctacatgaagcactcgcgaaacatgaggcgtttttcataagatgcggtatttttcttattttggaaaaattgaaaatcatcacctaccggaacctttttaagaaagtgtacctcctgctgaaaacgcaccagctcagtctggacgcctttttggtggcattgaaatttatgcaagtggaggacgtggatatcgacgaggtccaatgtatcctcgccaatcttatttatatgggccatgttaagggctatatttcacaccagcatcaaaaactcgtagtgagtaaacagaacccgtttccacctctatccactgtttgctag

SEQ ID NO: 44495 - DNA, 1200 bp, Artificial Sequence
  derived and/or modified sequence
atggcccacatcaccatcaaccagtacctgcagcaggtgtacgaggccatcgacagcagagacggcgccagctgcgccgagctggtgagcttcaagcacccccacgtggccaaccccagactgcagatggccagccccgaggagaagtgccagcaggtgctggagcccccctacgacgagatgttcgccgcccacctgagatgcacctacgccgtgggcaaccacgacttcatcgaggcctacaagtgccagaccgtgatcgtgcagagcttcctgagagccttccaggcccacaaggaggagaactgggccctgcccgtgatgtacgccgtggccctggacctgagagtgttcgccaacaacgccgaccagcagctggtgaagaagggcaagagcaaggtgggcgacatgctggagaaggccgccgagctgctgatgagctgcttcagagtgtgcgccagcgacaccagagccggcatcgaggacagcaagaagtggggcatgctgttcctggtgaaccagctgttcaagatctacttcaagatcaacaagctgcacctgtgcaagcccctgatcagagccatcgacagcagcaacctgaaggacgactacagcaccgcccagagagtgacctacaagtactacgtgggcagaaaggccatgttcgacagcgacttcaagcaggccgaggagtacctgagcttcgccttcgagcactgccacagaagcagccagaagaacaagagaatgatcctgatctacctgctgcccgtgaagatgctgctgggccacatgcccaccgtggagctgctgaagaagtaccacctgatgcagttcgccgaggtgaccagagccgtgagcgagggcaacctgctgctgctgcacgaggccctggccaagcacgaggccttcttcatcagatgcggcatcttcctgatcctggagaagctgaagatcatcacctacagaaacctgttcaagaaggtgtacctgctgctgaagacccaccagctgagcctggacgccttcctggtggccctgaagttcatgcaggtggaggacgtggacatcgacgaggtgcagtgcatcctggccaacctgatctacatgggccacgtgaagggctacatcagccaccagcaccagaagctggtggtgagcaagcagaaccccttcccccccctgagcaccgtgtgctag

SEQ ID NO: 44496 - DNA, 1131 bp, Artificial Sequence
  derived and/or modified sequence
atggcccacatcaccatcaaccagtacctgcagcaggtgtacgaggccatcgacagcagagacggcgccagctgcgccgagctggtgagcttcaagcacccccacgtggccaaccccagactgcagatggccagccccgaggagaagtgccagcaggtgctggagcccccctacgacgagatgttcgccgcccacctgagatgcacctacgccgtgggcaaccacgacttcatcgaggcctacaagtgccagaccgtgatcgtgcagtaccccctgagcttcatggccgccgtggccgaccagcagctggtgaagaagggcaagagcaaggtgggcgacatgctggagaaggccgccgagctgctgatgagctgcttcagagtgtgcgccagcgacaccagagccggcatcgaggacagcaagaagtggggcatgctgttcctggtgaaccagctgttcaagatctacttcaagatcaacaagctgcacctgtgcaagcccctgatcagagccatcgacagcagcaacctgaaggacgactacagcaccgcccagagagtgacctacaagtactacgtgggcagaaaggccatgttcgacagcgacttcaagcaggccgaggagtacctgagcttcgccttcgagcactgccacagaagcagccagaagaacaagagaatgatcctgatctacctgctgcccgtgaagatgctgctgggccacatgcccaccgtggagctgctgaagaagtaccacctgatgcagttcgccgaggtgaccagagccgtgagcgagggcaacctgctgctgctgcacgaggccctggccaagcacgaggccttcttcatcagatgcggcatcttcctgatcctggagaagctgaagatcatcacctacagaaacctgttcaagaaggtgtacctgctgctgaagacccaccagctgagcctggacgccttcctggtggccctgaagttcatgcaggtggaggacgtggacatcgacgaggtgcagtgcatcctggccaacctgatctacatgggccacgtgaagggctacatcagccaccagcaccagaagctggtggtgagcaagcagaaccccttcccccccctgagcaccgtgtgctag

SEQ ID NO: 44497 - DNA, 951 bp, Artificial Sequence
  derived and/or modified sequence
atgagcgccgaggtggagaccagcgagggcgtggacgagagcgagaagaagaacagcggcgccctggagaaggagaaccagatgagaatggccgacctgagcgagctgctgaaggagggcaccaaggaggcccacgacagagccgagaacacccagttcgtgaaggacttcctgaagggcaacatcaagaaggagctgttcaagctggccaccaccgccctgtacttcacctacagcgccctggaggaggagatggagagaaacaaggaccaccccgccttcgcccccctgtacttccccatggagctgcacagaaaggaggccctgaccaaggacatggagtacttcttcggcgagaactgggaggagcaggtgcagtgccccaaggccgcccagaagtacgtggagagaatccactacatcggccagaacgagcccgagctgctggtggcccacgcctacaccagatacatgggcgacctgagcggcggccaggtgctgaagaaggtggcccagagagccctgaagctgcccagcaccggcgagggcacccagttctacctgttcgagaacgtggacaacgcccagcagttcaagcagctgtacagagccagaatgaacgccctggacctgaacatgaagaccaaggagagaatcgtggaggaggccaacaaggccttcgagtacaacatgcagatcttcaacgagctggaccaggccggcagcaccctggccagagagaccctggaggacggcttccccgtgcacgacggcaagggcgacatgagaaagtgccccttctacgccgccgagcaggacaagggcgccctggagggcagcagctgccccttcagaaccgccatggccgtgctgagaaagcccagcctgcagttcatcctggccgccggcgtggccctggccgccggcctgctggcctggtactacatgtag

SEQ ID NO: 44498 - DNA, 951 bp, Artificial Sequence
  derived and/or modified sequence
atgagtgccgaggtggagacttcggaaggggtggatgaatctgaaaaaaagaacagcggggcactggagaaggaaaaccagatgaggatggccgacctcagcgaactgctgaaggaagggaccaaggaggcccacgatagagcagagaatacacagttcgttaaggacttcctcaaaggaaacatcaagaaggagctatttaaactcgccaccactgccctgtactttacttactccgcgctggaggaggaaatggagcgaaataaagatcatcctgcatttgcccccctatatttcccgatggaattacatcggaaggaggccctaaccaaggacatggaatatttcttcggtgaaaattgggaagagcaggtgcaatgccctaaggcagcgcagaagtacgttgagcgcatccactacattgggcagaacgaaccggaactgctcgttgcccatgcctatacccgctacatgggggatctgagtggcggacaggtgctgaagaaggtcgcccagagggccctcaagttgccctccacaggagagggaacccagttttacctttttgaaaacgttgacaacgcgcaacaattcaagcagctgtaccgagccagaatgaacgcccttgacctgaacatgaagaccaaggagcgcattgtggaagaggccaacaaggcattcgaatacaacatgcaaatttttaacgagttagaccaggcaggctcaacgctggccagggagacattggaagatggcttccctgtacacgacggtaaaggagatatgagaaagtgtcccttctatgctgccgaacaagacaagggtgctctcgaggggagctcctgtcctttccgaacagccatggcggtgctgcggaagccctccctccagttcattctagcggccggagtagccctggccgccgggctgctcgcatggtactacatgtag

SEQ ID NO: 44499 - DNA, 951 bp, Artificial Sequence
  derived and/or modified sequence
atgtctgctgaggtggagaccagcgagggcgtggatgagagcgagaagaagaacagcggggccctggagaaggagaaccagatgaggatggctgacctgtctgagctgctgaaggagggcaccaaggaggcccatgacagagctgagaacacccagtttgtgaaggacttcctgaagggcaacatcaagaaggagctgttcaagctggccaccacagccctgtacttcacctacagcgccctggaggaggagatggagaggaacaaggaccacccagcctttgcccccctgtacttccccatggagctgcacaggaaggaggccctgaccaaggacatggagtacttctttggagagaactgggaggagcaggtgcagtgccccaaggccgcccagaagtatgtggagcgcatccactacatcggccagaatgaacctgagctgctggtggcccacgcctacacccgctacatgggagacctgagcggcggccaggtgctgaagaaggtggcccagagggccctgaagctgcccagcactggagagggcacccagttctacctgtttgaaaatgtggacaatgcccagcagttcaagcagctgtaccgggccaggatgaatgccctggacctgaacatgaagaccaaggagagaattgtggaggaggccaacaaggcctttgagtacaacatgcagatcttcaatgagctggaccaggccggcagcaccctggcccgggagaccctggaggatggcttccctgtgcatgatggaaaaggagacatgaggaagtgccccttctatgctgctgagcaggacaagggggccctggagggcagcagctgccccttcagaacagccatggctgtgctgaggaagcccagcctgcagttcatcctggccgccggcgtggccctggccgccggcctgctggcctggtactacatgtag

SEQ ID NO: 44500 - DNA, 951 bp, Artificial Sequence
  derived and/or modified sequence
atgagcgccgaggtggagaccagcgagggcgtggacgagagcgagaaaaagaattctggagccctcgagaaagagaatcagatgcggatggctgaccttagcgaactgctgaaggagggcacgaaagaggcccacgaccgggctgagaatacccagttcgtgaaggactttctgaaaggtaatatcaagaaggaacttttcaaactcgccactaccgcactctacttcacgtactccgcactcgaggaggaaatggagcggaataaggatcatcctgctttcgcccctctttacttcccgatggagctgcaccggaaagaggccctgaccaaggatatggagtattttttcggcgagaactgggaagaacaggtgcagtgtcccaaagccgctcaaaagtacgtagaaagaattcattacatcggccaaaacgaacctgagctcctggtggcacatgcatatacccgatacatgggagacctgagcgggggacaggtgctcaagaaagtcgctcagcgggctctgaaattacccagtaccggcgagggtacacagttctatctgttcgagaatgtcgataatgcccagcagttcaaacagctttaccgcgcccgaatgaatgcactggatctcaacatgaagacgaaagagaggatcgtggaggaagctaacaaggctttcgaatacaacatgcagatattcaacgagctggaccaggccggctccacgctggcacgcgagactctcgaggatggctttcccgttcatgacgggaagggggacatgcggaaatgtccattttacgccgctgagcaggataaaggagctcttgaggggagttcctgcccatttagaactgctatggctgtgctgcgcaaaccatctttacagtttatcctggcagcgggagtggccttagcagcgggcctgctcgcgtggtattacatgtag

SEQ ID NO: 44501 - DNA, 951 bp, Artificial Sequence
  derived and/or modified sequence
atgtcagccgaggtggagacatccgagggtgttgatgaatctgaaaagaagaactctggtgccctggaaaaagagaatcagatgcggatggcagatctaagcgaactgttgaaagagggcaccaaagaagcacacgaccgggctgaaaacacacagttcgtaaaagacttcctgaaggggaacatcaaaaaagagctcttcaagctggccaccacagcactctacttcacatactcagccctggaggaagaaatggagcgtaacaaagaccacccagccttcgccccactctactttccaatggagctgcatcgcaaggaagccttgaccaaggatatggaatatttcttcggcgagaattgggaggaacaggtgcagtgccctaaagcagcgcagaagtatgtggagagaatccactacataggccaaaatgaacccgagctcctggtagctcacgcttatacccgctacatgggggatctctcaggcggtcaggtgctgaaaaaagtggcccaaagggctctgaaactgccatccacaggggaaggcacccagttttatctatttgaaaacgtggataatgctcagcagttcaagcagctctaccgggctcgcatgaatgccctggatctcaatatgaagactaaggagcggatagtggaagaggccaacaaggctttcgagtacaatatgcagatctttaacgagttagaccaggctggatcaaccctcgcccgtgaaaccctagaggatggtttcccggtgcacgacggaaaaggcgacatgagaaaatgtccattctatgccgctgagcaggataagggtgctcttgagggatcctcctgccctttccggacagccatggcagtgctaagaaagccaagtttacagttcattttggccgctggagtagctctcgctgccggactcctcgcatggtattacatgtag

SEQ ID NO: 44502 - DNA, 951 bp, Artificial Sequence
  derived and/or modified sequence
atgtcagccgaggtggagacctccgagggcgtggacgaatcggagaagaaaaactcaggggctttagagaaggagaaccagatgcggatggccgatcttagcgagctgctgaaagaagggaccaaagaggctcacgatagggcggagaacacccagtttgtgaaagactttttgaaaggtaatataaagaaggaactttttaagctggctacaactgcgttgtattttacctattctgccctggaagaggaaatggaaagaaacaaagatcaccccgctttcgcccccctctattttccaatggaacttcatcgtaaggaggccctgacaaaagatatggaatatttttttggagaaaattgggaggaacaggtgcaatgccctaaggcggcccagaagtacgtggagcgaattcactacatcggccagaatgaacccgaactgctggtcgcacacgcctatactcgctacatgggtgatctgagcggaggccaggtcctgaagaaggtggcacagcgagctttaaaactgccatccacaggtgaagggacgcagttttacctgttcgaaaacgtcgacaacgcccagcagtttaaacaactttaccgggctagaatgaatgccctcgacctgaatatgaagactaaggagagaattgttgaagaagccaacaaagcattcgagtataacatgcagattttcaatgaactggaccaggccggaagcacactggcccgggagaccttggaggatggctttcccgtgcacgatggtaagggggatatgaggaagtgcccattttatgctgccgagcaggacaaaggcgccctcgagggttcttcttgcccctttagaaccgctatggcagtgctgagaaaacctagcttgcagttcattctcgccgctggcgtcgcgcttgctgccggcctgctcgcatggtactatatgtag

SEQ ID NO: 44503 - DNA, 951 bp, Artificial Sequence
  derived and/or modified sequence
atgtcagccgaagtggaaaccagtgaaggtgttgacgagtccgaaaagaaaaacagcggggcactagaaaaggagaatcagatgagaatggctgatctctctgagctactgaaggagggtacaaaggaggcacacgaccgcgccgagaatacacagtttgtaaaggactttctaaagggcaacattaaaaaggagctgtttaaactggccaccaccgctctatattttacttattcggcgttagaggaggagatggaaaggaataaagatcaccccgcgttcgcacccctctattttcccatggagctgcatagaaaagaggcactgaccaaggatatggagtacttcttcggggaaaattgggaagaacaggtacagtgcccaaaagcagctcagaaatacgtcgaacgtattcactacattgggcaaaacgaacctgagcttttggttgcccatgcctacacccggtacatgggagacttaagtggcggccaggtattgaagaaggtcgcacagagagccctgaagctgccaagcacaggtgaggggacccagttctacctctttgagaacgttgataacgcccagcagttcaagcagctgtacagagcgcgcatgaacgccctcgaccttaacatgaagactaaggaaaggatcgttgaggaggccaacaaagccttcgagtataacatgcagatattcaacgaactcgaccaggcaggctctaccctggcgagggagacgttggaggatgggtttcccgtacatgacggaaagggtgatatgcgcaaatgccccttttatgcagctgagcaggataaaggagccctggaggggagctcctgcccttttcggactgccatggcagtcctcagaaagccctccttgcagtttatccttgcggcaggtgtggccctcgccgccgggctgcttgcttggtactatatgtag

SEQ ID NO: 44504 - DNA, 951 bp, Artificial Sequence
  derived and/or modified sequence
atgtctgcagaggtagaaacctctgagggagtggacgagtccgaaaaaaagaactcaggcgctcttgaaaaagaaaaccagatgcgtatggctgacctgagcgagttgctgaaggaggggaccaaagaagcccacgacagggcagagaatactcagtttgttaaagactttctgaaaggcaatattaagaaagagctattcaaactggcgactactgctctgtactttacctacagtgcactggaggaagagatggaacggaataaggatcacccagctttcgctcccctgtactttccgatggaactgcaccgcaaggaggccctgactaaagacatggaatacttctttggcgagaattgggaagagcaagtgcagtgccctaaagcggctcagaagtatgtggagcggattcactatatcgggcagaacgaaccagaacttctggtagctcacgcatatacacgctacatgggtgacctttccggaggccaagtcttgaaaaaagtggcccaaagggccctgaaactccccagtaccggagaaggcacccaattctacttgtttgaaaatgtggacaacgctcaacagttcaaacagttatacagggctaggatgaatgctctggatctgaatatgaagaccaaggagcggatcgttgaggaagctaacaaagctttcgagtataacatgcagatcttcaatgagctggatcaagcgggttccacgctggcacgtgaaactctggaggacggctttccagtgcacgatggcaagggtgacatgcggaagtgcccattctacgcggccgagcaggataagggcgctctggagggttctagttgccccttcaggaccgctatggcggtactacgcaaacccagcttacagtttattctcgccgccggtgtggctttggccgcaggactgctggcctggtattatatgtag

SEQ ID NO: 44505 - DNA, 951 bp, Artificial Sequence
  derived and/or modified sequence
atgtccgccgaggtggagacctctgagggggtggatgaatcagagaaaaagaattcaggagcactggagaaggagaaccaaatgcggatggccgacctgtcggagttgctgaaggaagggactaaagaagcgcatgaccgcgctgagaatacacagttcgtcaaggattttctgaaaggcaatataaaaaaagaactctttaagctggccaccactgccctctacttcacttatagcgcactagaagaggaaatggaaaggaataaagatcaccctgcatttgccccgctttattttcctatggagctacatagaaaagaggccctgacaaaagatatggagtattttttcggtgaaaactgggaggagcaggtgcagtgccctaaggctgcccagaaatacgttgagaggattcattatatcgggcagaacgaacctgaattactggttgctcatgcctatacccgttatatgggggacttgagcgggggtcaggtgcttaagaaggtggctcaacgagcactaaagcttccaagtaccggcgaaggaacgcagttctatctctttgagaatgtggacaacgcccagcagtttaaacaactctatcgggcacggatgaatgccctcgacctgaacatgaagacgaaggagcgcattgttgaggaagcaaataaggcctttgagtacaacatgcagattttcaacgagctagaccaggctgggtccacactggcacgggaaacactcgaggatggattcccagtgcatgacgggaaaggtgatatgcgtaagtgcccattctatgctgctgagcaggataagggcgctctcgagggtagcagctgtccattcagaaccgcaatggctgttctgcggaaaccttccctgcagttcatcctggcggctggcgtggctctagcggcaggattgttggcctggtattacatgtag

SEQ ID NO: 44506 - DNA, 951 bp, Artificial Sequence
  derived and/or modified sequence
atgtctgcagaagtggagacgagtgagggggtcgacgaaagtgagaagaagaactctggggccttggagaaggagaatcagatgcggatggcagacctttctgaactcctgaaggagggcactaaagaagcccatgatcgcgccgaaaatacacaatttgtgaaagatttcttgaaggggaacattaaaaaggagctcttcaagctggcgactactgcactgtatttcacctactccgctttggaagaagagatggagcgtaacaaagatcaccctgccttcgcccccctgtacttcccgatggagttacaccggaaagaagcactaaccaaagacatggaatacttttttggagaaaactgggaggagcaggtccagtgccccaaagctgcccagaagtacgtcgaaaggattcattacataggccagaacgaacccgagcttctcgtggcccacgcctacacccggtacatgggcgacctttcgggagggcaggtgctgaagaaggtggcacagcgcgcgctaaaactccctagtactggtgaaggcacccagttttacctgttcgagaacgtcgacaacgcccagcagtttaagcagctgtatagggctaggatgaatgccctggacttgaacatgaagaccaaggagagaatcgtggaggaggcgaacaaagcctttgagtacaacatgcaaatcttcaacgaattagaccaggccggtagcaccctcgctcgggagactttggaagatggctttcctgtgcatgatgggaagggggatatgcgtaagtgtccattctacgccgcggagcaggacaagggcgccctggaggggagctcttgcccctttcggactgctatggccgtgctccggaaaccatcccttcagttcattctggccgctggtgtcgctctcgcggctgggctcttggcatggtattatatgtag

SEQ ID NO: 44507 - DNA, 951 bp, Artificial Sequence
  derived and/or modified sequence
atgagcgccgaggtggagaccagcgagggcgtggacgagagcgagaagaaaaacagtggagcgcttgagaaggagaaccagatgaggatggctgacttgagtgagctcctaaaggagggaaccaaagaggcacacgacagagccgagaacacacaattcgtgaaggactttttaaaagggaatataaaaaaagaacttttcaagttggccactactgcactgtacttcacgtattcagccctggaggaagagatggagcgcaataaagatcacccagcatttgctccattgtattttccaatggaattacatcggaaagaggctcttaccaaagatatggagtacttcttcggcgaaaattgggaggagcaagtgcagtgtcccaaagctgcccaaaaatacgttgaaaggatacactatattggacagaatgagcctgagctgctagtggctcacgcttacacaaggtatatgggtgatttgtctggtggacaggtgctcaagaaagtcgcacagagagctttaaagttgcccagtaccggcgaagggacacagttctacctgtttgaaaacgtagataatgcacaacagtttaagcagctctatcgtgctaggatgaatgccttggacttgaacatgaagactaaggagcggatagtggaggaggctaacaaggcctttgagtacaatatgcagatttttaacgaactcgaccaggccggttcaacgttggctagggaaaccctggaagatggctttcctgtacacgatggtaagggggacatgaggaaatgccctttttacgctgctgaacaggacaagggtgcgttggaaggcagtagttgtccttttagaacagctatggcagtcctgcgcaagccctcattgcaattcatcttagcagctggcgtagcgctagctgcgggcctcctagcgtggtactacatgtag

SEQ ID NO: 44508 - DNA, 951 bp, Artificial Sequence
  derived and/or modified sequence
atgagcgccgaggtggagaccagcgagggcgtggacgagagcgagaagaagaatagcggtgccctggagaaagaaaatcagatgcgcatggcagacctcagcgaacttctcaaagaaggcaccaaggaggcccacgaccgggcagagaatacacaattcgttaaggacttcctgaagggcaatattaagaaggaactcttcaagctcgcgacaaccgccctgtactttacatacagtgccctggaagaggaaatggagcggaacaaggaccatcctgcatttgcaccactttacttccctatggagctccataggaaagaggcgctcaccaaggatatggaatactttttcggtgagaattgggaagagcaggtccagtgccccaaggccgcacagaaatacgttgagcgcattcattatattggacagaatgagcccgaactactggtggcccatgcctacactcggtatatgggagacctctccggcggccaagtgctgaaaaaggtcgcccagagggcactaaagctcccttcgaccggggaaggcacacagttttacttgttcgagaatgttgataatgcgcaacagttcaagcaattataccgcgccaggatgaatgccctcgacctgaacatgaagactaaagaaagaatcgtggaagaagcaaataaagctttcgaatataatatgcagatcttcaacgagctggatcaggccgggtccacactggccagagaaaccctggaggatggatttcccgttcacgacgggaagggcgacatgaggaagtgccccttttacgctgccgagcaagataaaggggcactagaaggctcttcatgcccatttcgtacagcaatggcagtgttgcgcaagccatcactgcagttcattctggcagcgggtgtggcccttgccgctggcctgcttgcctggtattacatgtag

SEQ ID NO: 44509 - DNA, 951 bp, Artificial Sequence
  derived and/or modified sequence
atgagcgccgaggtggagaccagcgagggcgtggacgagagcgagaaaaaaaacagtggcgctctcgagaaggagaaccagatgcgaatggccgatctaagcgagctgctgaaagaggggacaaaggaagcccatgatcgtgctgaaaatacacaatttgttaaggacttcctgaaaggcaacattaaaaaggaactgtttaagctcgccaccaccgctctgtactttacctattccgcactggaagaggagatggaaagaaataaagaccaccccgcatttgccccgctttatttccctatggagctgcataggaaggaggctctcaccaaagacatggaatatttcttcggcgagaactgggaggaacaagtccagtgccccaaggccgcccagaagtacgtggaaaggatccactatatcggtcagaatgaacctgaactactggtcgcccacgcctacacaagatacatgggagacctttcgggggggcaggtgctgaaaaaagtcgcacaaagagcccttaagctgccctctaccggggaaggtactcaattttatctcttcgagaacgtcgataacgcccagcaattcaagcagctgtaccgagcgcgaatgaacgccctcgacctgaacatgaaaacaaaagaacggattgtggaggaagccaataaagccttcgaatacaacatgcagatattcaatgaacttgatcaggcaggctccaccctggctagggagacactcgaggacggattcccagtgcatgatggaaagggcgacatgcgtaagtgtcccttctacgccgccgagcaggacaaaggcgccctggagggctcatcttgtccttttcgcacagcaatggccgtccttagaaaaccctctctccagttcattctggccgccggcgtggctcttgccgctggtctgttggcttggtattatatgtag

SEQ ID NO: 44510 - DNA, 951 bp, Artificial Sequence
  derived and/or modified sequence
atgagcgccgaggtggagaccagcgagggcgtggacgagagcgagaagaagaactcaggcgcccttgagaaggaaaaccagatgaggatggccgatctctctgaattgctgaaggagggtaccaaggaggcccacgaccgcgccgagaacacacagtttgtgaaagattttcttaagggcaacatcaaaaaagagctattcaaactagccacaaccgccctctactttacgtacagtgctctcgaggaggaaatggagaggaacaaggaccaccccgcttttgcgccattatacttccctatggaactgcatagaaaggaagcccttacaaaagacatggagtattttttcggggagaattgggaagaacaagtacagtgccccaaagctgctcaaaagtacgttgagcgaatccactatatcggccaaaacgaaccagaattgcttgtggcccacgcatacacccgatatatgggagatctgtccggaggacaggtcctgaagaaggtcgctcagcgggccctgaagcttccctcgactggagaagggactcagttctacctgtttgaaaatgtggacaacgctcagcaatttaagcagctctacagagctcgtatgaacgctttggatctcaatatgaaaactaaggagaggattgtggaggaagccaacaaggcttttgaatacaatatgcagatctttaatgagcttgatcaggcagggtcgacactagcccgggaaaccttggaggatggattccctgtgcacgacggcaaaggagatatgagaaaatgccccttttacgcagcagagcaggacaaaggagctctggagggctctagctgcccattccgcacagccatggctgtgttgcgcaagcccagtctccaatttattcttgccgccggggtggccctagccgccgggttgttggcttggtattacatgtag

SEQ ID NO: 44511 - DNA, 951 bp, Artificial Sequence
  derived and/or modified sequence
atgagcgccgaggtggagaccagcgagggcgtggacgagagcgagaagaagaattctggggcccttgaaaaagagaatcagatgcggatggcagacttaagtgaactgttgaaagaaggaacaaaagaagcccatgatcgcgccgaaaatacccagtttgtcaaagacttcctcaagggcaacattaaaaaggagctgttcaagctggctacaacggcactttactttacgtatagtgccttggaagaggagatggagcgcaacaaggaccatccagcttttgccccgctgtactttccaatggaattacaccggaaagaagccttgaccaaggatatggagtacttctttggggagaattgggaggaacaggtccagtgcccgaaggcagcccaaaagtacgttgagagaattcactacattggacaaaacgagccggagctgctcgtagcacacgcatatacaaggtacatgggcgacctttcaggcgggcaagtcctcaaaaaggtcgcccagcgggcacttaaactccctagcactggagaaggtacccagttctatctgttcgagaatgtagacaatgcacagcagttcaagcagttatatagagcgcggatgaacgcactcgacctgaacatgaagactaaggagcggatagtggaagaagctaataaggcatttgaatacaatatgcagatctttaacgagcttgaccaggctggaagcacattggcaagagaaaccctagaggatggcttccccgtgcatgatgggaagggggatatgcggaagtgccctttctatgccgccgagcaagacaagggtgctctggaaggctctagctgccccttccgcaccgccatggccgtactacggaagccgtcgcttcagttcatacttgccgccggggtggcactggctgccgggctcttagcctggtattacatgtag

SEQ ID NO: 44512 - DNA, 951 bp, Artificial Sequence
  derived and/or modified sequence
atgagtgccgaggtggaaacttcggagggcgtggatgaatccgaaaagaagaactccggcgcactggagaaagagaaccagatgaggatggcagacctgtccgagttgttaaaggaaggcacaaaggaggcccatgaccgcgctgaaaacacccagttcgttaaggacttcctaaaggggaacatcaaaaaggaactttttaagttggccacaactgctttgtactttacatactctgcactggaggaggaaatggagaggaacaaggaccatcctgcatttgcccctctgtacttcccaatggaactccacagaaaggaagctcttactaaagatatggagtatttcttcggagaaaactgggaggaacaggtccaatgtccaaaagcagcccagaagtatgttgaaagaatacattacattgggcaaaatgaaccagagctacttgtagcgcatgcttacacacgttacatgggggatctttctgggggtcaggtcctgaaaaaggtcgcccagcgggctctaaaactgccgagtacaggagaggggacccagttttatctgttcgagaacgtggataacgctcaacagtttaagcagttatacagggccaggatgaacgccctcgatctaaacatgaaaaccaaggaacgaatcgtcgaggaagctaataaggccttcgaatacaatatgcagattttcaatgaattagaccaggcaggcagtacccttgcgagagagactctcgaggacggctttccagtccacgatgggaaaggtgacatgcgaaaatgcccattctacgcagctgaacaggacaagggggctctcgaaggatcctcttgcccttttcgtacagctatggcagtgctacgcaagccttccttacagttcattctggctgccggagtagctcttgcagctgggcttttagcttggtactacatgtag

SEQ ID NO: 44513 - DNA, 951 bp, Artificial Sequence
  derived and/or modified sequence
atgtcggccgaagtggaaacatccgagggcgttgacgaaagtgagaagaagaacagcggagccctggagaaagagaatcagatgcggatggcagacctgagcgagttactgaaagaaggcacaaaggaggcccatgatcgagccgaaaacactcagttcgttaaagattttctcaagggtaatatcaagaaggagctttttaagctggcgacaacggccctgtatttcacctactcggcgctggaagaagagatggaaagaaataaagaccaccccgcttttgccccattgtactttcctatggaacttcacagaaaagaagcactcactaaggatatggagtactttttcggcgagaattgggaggaacaggtccaatgccccaaggccgctcagaagtacgttgagcgtattcactacattggtcagaatgaaccagagctgctagtggcacacgcgtataccagatacatgggtgatctgtcaggaggacaggtgttgaaaaaagtggcacaaagagccttgaaactgccttccacaggggaaggcacacagttctacttatttgagaacgtggataacgctcaacagtttaagcaactgtacagggctaggatgaacgccctggaccttaatatgaaaaccaaggagaggattgttgaggaggccaataaagcctttgagtataatatgcaaattttcaatgaactggatcaggcaggaagcacactagccagagaaaccttggaagatgggtttccagtccatgatggcaagggcgatatgcgtaaatgccctttctatgccgcagagcaagataagggagcattggagggttccagctgcccgttcagaaccgctatggctgtacttcgcaagccaagcctgcaattcattttagccgcaggagtagccttggccgctggcttactggcctggtattatatgtag

SEQ ID NO: 44514 - DNA, 951 bp, Artificial Sequence
  derived and/or modified sequence
atgtccgcagaggtagaaaccagcgaaggagtggatgaaagtgaaaagaaaaactctggtgcccttgagaaggagaatcaaatgagaatggcggacttgagcgaactacttaaagagggaactaaggaggcccacgaccgggcagagaacacacagttcgtgaaagatttcctgaaaggaaacatcaaaaaagagttatttaagttggccacaactgcactgtattttacttactcggccctagaggaggagatggagcgcaacaaagatcatcccgcattcgcaccgctctatttcccaatggagctgcacagaaaagaggccttgaccaaagacatggaatacttttttggagaaaactgggaggaacaggtgcagtgccctaaggcagcccagaaatacgtggagcggattcactatattggacagaatgagccggagttgttggtagcccacgcctatactcggtacatgggtgacctgtccggcggtcaggtgctgaaaaaagttgcgcagcgggctctgaaactgccatcaacaggtgagggcactcaattctatttattcgaaaatgtggataacgcccagcagttcaagcagctataccgcgctcgcatgaacgctctggatctaaatatgaaaacaaaagaacgtatagtcgaggaggcaaacaaggccttcgaatacaacatgcagatctttaacgagcttgatcaggcaggctccactttggcaagagaaacgctcgaagatggctttcctgtgcacgacgggaaaggtgacatgcggaaatgccctttttatgctgctgaacaggataagggcgcactggaagggagcagctgtccctttagaactgccatggccgtcctccgcaagcctagtctgcagtttattctcgcggcaggcgtcgcgttggcagctgggctgcttgcatggtactatatgtag

SEQ ID NO: 44515 - DNA, 951 bp, Artificial Sequence
  derived and/or modified sequence
atgagcgccgaggtcgaaacctcagagggtgtggatgaatccgagaaaaaaaacagcggcgcactagagaaggagaaccagatgagaatggccgacctgagcgagctgctgaaggagggaaccaaggaggcacacgaccgagccgagaacacacagtttgtgaaagactttctaaaaggcaacattaagaaggagttgttcaaactggcgactacagcactgtacttcacttactctgcattggaggaagagatggagagaaataaagatcacccggcttttgccccactgtacttccctatggagcttcataggaaagaagccttaaccaaggacatggagtacttttttggtgagaattgggaggagcaggtgcagtgtccaaaggctgcccagaagtacgtagagcgaatacactatatcggccaaaatgagcccgaattgctggtggcgcatgcatatacccgatatatgggggacctgagcggcggtcaggtcttaaagaaagtggcccaaagagcgctaaagctcccatcaacaggcgaaggcactcagttttacttgtttgagaatgttgataatgctcaacagttcaaacagttgtatagagcccgtatgaacgcccttgatttaaacatgaagacaaaggagcgcatcgtggaagaggccaataaggctttcgagtacaacatgcaaatcttcaatgaactcgaccaggccggttccactctcgccagggagaccctcgaggacgggttccctgtccacgatgggaagggcgatatgaggaagtgccctttttatgctgccgagcaagataaaggtgcacttgagggcagctcctgtcccttcaggaccgcgatggccgtgctgagaaagccttctctacagtttattctggccgctggagtcgctcttgcggcaggactgttagcttggtactatatgtag

SEQ ID NO: 44516 - DNA, 951 bp, Artificial Sequence
  derived and/or modified sequence
atgtccgcagaagtggaaacctctgagggcgtagacgagtctgaaaagaagaactcaggcgctctcgagaaagagaaccagatgcggatggccgacctgagcgagctactgaaggagggaaccaaggaagcccatgacagggcggagaacacacagtttgtgaaagactttctgaaaggtaacatcaagaaagagctattcaagctggcaaccacggccttatacttcacatacagcgctttggaggaggaaatggaaagaaacaaagaccacccagccttcgctcccctctatttcccaatggagttacatcgcaaggaagctctgactaaagatatggagtactttttcggcgaaaactgggaagagcaggtgcagtgtcctaaagcagcccaaaaatatgtagaaagaattcattacattggccaaaacgagccggagttacttgtggctcacgcctatacccgctacatgggcgacctgtccggaggacaggtcctgaagaaggttgctcagcgagcactcaagctccccagtaccggtgaggggacacaattctatttatttgagaatgtggacaacgctcagcagtttaagcagctgtacagagctcggatgaatgctttggaccttaatatgaagacaaaggagcgcatcgtcgaagaagccaacaaggctttcgaatataatatgcagatattcaacgagctggatcaagctggcagcacgctcgctcgagagactctggaggacgggtttccggtgcatgatggaaagggcgacatgaggaaatgtcccttttacgccgcagaacaggataagggcgctcttgagggtagctcgtgtcctttccgcaccgccatggccgtgctccgcaaacccagtctccagtttattttggccgcaggggtggcgctagccgctggcttgctcgcttggtactacatgtag

SEQ ID NO: 44517 - protein, 2002 aa, Artificial Sequence
  derived and/or modified sequence
MEQDRTNHVEGNRLSPFLIPSPPICQTEPLATKLQNGSPLPERAHPEVNGDTKWHSFKSYYGIPCMKGSQNSRVSPDFTQESRGYSKCLQNGGIKRTVSEPSLSGLLQIKKLKQDQKANGERRNFGVSQERNPGESSQPNVSDLSDKKESVSSVAQENAVKDFTSFSTHNCSGPENPELQILNEQEGKSANYHDKNIVLLKNKAVLMPNGATVSASSVEHTHGELLEKTLSQYYPDCVSIAVQKTTSHINAINSQATNELSCEITHPSHTSGQINSAQTSNSELPPKPAAVVSEACDADDADNASKLAAMLNTCSFQKPEQLQQQKSVFEICPSPAENNIQGTTKLASGEEFCSGSSSNLQAPGGSSERYLKQNEMNGAYFKQSSVFTKDSFSATTTPPPPSQLLLSPPPPLPQVPQLPSEGKSTLNGGVLEEHHHYPNQSNTTLLREVKIEGKPEAPPSQSPNPSTHVCSPSPMLSERPQNNCVNRNDIQTAGTMTVPLCSEKTRPMSEHLKHNPPIFGSSGELQDNCQQLMRNKEQEILKGRDKEQTRDLVPPTQHYLKPGWIELKAPRFHQAESHLKRNEASLPSILQYQPNLSNQMTSKQYTGNSNMPGGLPRQAYTQKTTQLEHKSQMYQVEMNQGQSQGTVDQHLQFQKPSHQVHFSKTDHLPKAHVQSLCGTRFHFQQRADSQTEKLMSPVLKQHLNQQASETEPFSNSHLLQHKPHKQAAQTQPSQSSHLPQNQQQQQKLQIKNKEEILQTFPHPQSNNDQQREGSFFGQTKVEECFHGENQYSKSSEFETHNVQMGLEEVQNINRRNSPYSQTMKSSACKIQVSCSNNTHLVSENKEQTTHPELFAGNKTQNLHHMQYFPNNVIPKQDLLHRCFQEQEQKSQQASVLQGYKNRNQDMSGQQAAQLAQQRYLIHNHANVFPVPDQGGSHTQTPPQKDTQKHAALRWHLLQKQEQQQTQQPQTESCHSQMHRPIKVEPGCKPHACMHTAPPENKTWKKVTKQENPPASCDNVQQKSIIETMEQHLKQFHAKSLFDHKALTLKSQKQVKVEMSGPVTVLTRQTTAAELDSHTPALEQQTTSSEKTPTKRTAASVLNNFIESPSKLLDTPIKNLLDTPVKTQYDFPSCRCVEQIIEKDEGPFYTHLGAGPNVAAIREIMEERFGQKGKAIRIERVIYTGKEGKSSQGCPIAKWVVRRSSSEEKLLCLVRERAGHTCEAAVIVILILVWEGIPLSLADKLYSELTETLRKYGTLTNRRCALNEERTCACQGLDPETCGASFSFGCSWSMYYNGCKFARSKIPRKFKLLGDDPKEEEKLESHLQNLSTLMAPTYKKLAPDAYNNQIEYEHRAPECRLGLKEGRPFSGVTACLDFCAHAHRDLHNMQNGSTLVCTLTREDNREFGGKPEDEQLHVLPLYKVSDVDEFGSVEAQEEKKRSGAIQVLSSFRRKVRMLAEPVKTCRQRKLEAKKAAAEKLSSLENSSNKNEKEKSAPSRTKQTENASQAKQLAELLRLSGPVMQQSQQPQPLQKQPPQPQQQQRPQQQQPHHPQTESVNSYSASGSTNPYMRRPNPVSPYPNSSHTSDIYGSTSPMNFYSTSSQAAGSYLNSSNPMNPYPGLLNQNTQYPSYQCNGNLSVDNCSPYLGSYSPQSQPMDLYRYPSQDPLSKLSLPPIHTLYQPRFGNSQSFTSKYLGYGNQNMQGDGFSSCTIRPNVHHVGKLPPYPTHEMDGHFMGATSRLPPNLSNPNMDYKNGEHHSPSHIIHNYSAAPGMFNSSLHALHLQNKENDMLSHTANGLSKMLPALNHDRTACVQGGLHKLSDANGQEKQPLALVQGVASGAEDNDEVWSDSEQSFLDPDIGGVAVAPTHGSILIECAKRELHATTPLKNPNRNHPTRISLVFYQHKSMNEPKHGLALWEAKMAEKAREKEEECEKYGPDYVPQKSHGKKVKREPAEPHETSEPTYLRFIKSLAERTMSVTTDSTVTTSPYAFTRVTGPYNRYI

SEQ ID NO: 44518 - protein, 2023 aa, Artificial Sequence
  derived and/or modified sequence
MIQEEQIQLEGSLVDGPEASLMEQDRTNHVEGNRLSPFLIPSPPICQTEPLATKLQNGSPLPERAHPEVNGDTKWHSFKSYYGIPCMKGSQNSRVSPDFTQESRGYSKCLQNGGIKRTVSEPSLSGLLQIKKLKQDQKANGERRNFGVSQERNPGESSQPNVSDLSDKKESVSSVAQENAVKDFTSFSTHNCSGPENPELQILNEQEGKSANYHDKNIVLLKNKAVLMPNGATVSASSVEHTHGELLEKTLSQYYPDCVSIAVQKTTSHINAINSQATNELSCEITHPSHTSGQINSAQTSNSELPPKPAAVVSEACDADDADNASKLAAMLNTCSFQKPEQLQQQKSVFEICPSPAENNIQGTTKLASGEEFCSGSSSNLQAPGGSSERYLKQNEMNGAYFKQSSVFTKDSFSATTTPPPPSQLLLSPPPPLPQVPQLPSEGKSTLNGGVLEEHHHYPNQSNTTLLREVKIEGKPEAPPSQSPNPSTHVCSPSPMLSERPQNNCVNRNDIQTAGTMTVPLCSEKTRPMSEHLKHNPPIFGSSGELQDNCQQLMRNKEQEILKGRDKEQTRDLVPPTQHYLKPGWIELKAPRFHQAESHLKRNEASLPSILQYQPNLSNQMTSKQYTGNSNMPGGLPRQAYTQKTTQLEHKSQMYQVEMNQGQSQGTVDQHLQFQKPSHQVHFSKTDHLPKAHVQSLCGTRFHFQQRADSQTEKLMSPVLKQHLNQQASETEPFSNSHLLQHKPHKQAAQTQPSQSSHLPQNQQQQQKLQIKNKEEILQTFPHPQSNNDQQREGSFFGQTKVEECFHGENQYSKSSEFETHNVQMGLEEVQNINRRNSPYSQTMKSSACKIQVSCSNNTHLVSENKEQTTHPELFAGNKTQNLHHMQYFPNNVIPKQDLLHRCFQEQEQKSQQASVLQGYKNRNQDMSGQQAAQLAQQRYLIHNHANVFPVPDQGGSHTQTPPQKDTQKHAALRWHLLQKQEQQQTQQPQTESCHSQMHRPIKVEPGCKPHACMHTAPPENKTWKKVTKQENPPASCDNVQQKSIIETMEQHLKQFHAKSLFDHKALTLKSQKQVKVEMSGPVTVLTRQTTAAELDSHTPALEQQTTSSEKTPTKRTAASVLNNFIESPSKLLDTPIKNLLDTPVKTQYDFPSCRCVEQIIEKDEGPFYTHLGAGPNVAAIREIMEERFGQKGKAIRIERVIYTGKEGKSSQGCPIAKWVVRRSSSEEKLLCLVRERAGHTCEAAVIVILILVWEGIPLSLADKLYSELTETLRKYGTLTNRRCALNEERTCACQGLDPETCGASFSFGCSWSMYYNGCKFARSKIPRKFKLLGDDPKEEEKLESHLQNLSTLMAPTYKKLAPDAYNNQIEYEHRAPECRLGLKEGRPFSGVTACLDFCAHAHRDLHNMQNGSTLVCTLTREDNREFGGKPEDEQLHVLPLYKVSDVDEFGSVEAQEEKKRSGAIQVLSSFRRKVRMLAEPVKTCRQRKLEAKKAAAEKLSSLENSSNKNEKEKSAPSRTKQTENASQAKQLAELLRLSGPVMQQSQQPQPLQKQPPQPQQQQRPQQQQPHHPQTESVNSYSASGSTNPYMRRPNPVSPYPNSSHTSDIYGSTSPMNFYSTSSQAAGSYLNSSNPMNPYPGLLNQNTQYPSYQCNGNLSVDNCSPYLGSYSPQSQPMDLYRYPSQDPLSKLSLPPIHTLYQPRFGNSQSFTSKYLGYGNQNMQGDGFSSCTIRPNVHHVGKLPPYPTHEMDGHFMGATSRLPPNLSNPNMDYKNGEHHSPSHIIHNYSAAPGMFNSSLHALHLQNKENDMLSHTANGLSKMLPALNHDRTACVQGGLHKLSDANGQEKQPLALVQGVASGAEDNDEVWSDSEQSFLDPDIGGVAVAPTHGSILIECAKRELHATTPLKNPNRNHPTRISLVFYQHKSMNEPKHGLALWEAKMAEKAREKEEECEKYGPDYVPQKSHGKKVKREPAEPHETSEPTYLRFIKSLAERTMSVTTDSTVTTSPYAFTRVTGPYNRYI

SEQ ID NO: 44519 - DNA, 6009 bp, Artificial Sequence
  derived and/or modified sequence
atggagcaggacagaaccaaccacgtggagggcaacagactgagccccttcctgatccccagcccccccatctgccagaccgagcccctggccaccaagctgcagaacggcagccccctgcccgagagagcccaccccgaggtgaacggcgacaccaagtggcacagcttcaagagctactacggcatcccctgcatgaagggcagccagaacagcagagtgagccccgacttcacccaggagagcagaggctacagcaagtgcctgcagaacggcggcatcaagagaaccgtgagcgagcccagcctgagcggcctgctgcagatcaagaagctgaagcaggaccagaaggccaacggcgagagaagaaacttcggcgtgagccaggagagaaaccccggcgagagcagccagcccaacgtgagcgacctgagcgacaagaaggagagcgtgagcagcgtggcccaggagaacgccgtgaaggacttcaccagcttcagcacccacaactgcagcggccccgagaaccccgagctgcagatcctgaacgagcaggagggcaagagcgccaactaccacgacaagaacatcgtgctgctgaagaacaaggccgtgctgatgcccaacggcgccaccgtgagcgccagcagcgtggagcacacccacggcgagctgctggagaagaccctgagccagtactaccccgactgcgtgagcatcgccgtgcagaagaccaccagccacatcaacgccatcaacagccaggccaccaacgagctgagctgcgagatcacccaccccagccacaccagcggccagatcaacagcgcccagaccagcaacagcgagctgccccccaagcccgccgccgtggtgagcgaggcctgcgacgccgacgacgccgacaacgccagcaagctggccgccatgctgaacacctgcagcttccagaagcccgagcagctgcagcagcagaagagcgtgttcgagatctgccccagccccgccgagaacaacatccagggcaccaccaagctggccagcggcgaggagttctgcagcggcagcagcagcaacctgcaggcccccggcggcagcagcgagagatacctgaagcagaacgagatgaacggcgcctacttcaagcagagcagcgtgttcaccaaggacagcttcagcgccaccaccaccccccccccccccagccagctgctgctgagcccccccccccccctgccccaggtgccccagctgcccagcgagggcaagagcaccctgaacggcggcgtgctggaggagcaccaccactaccccaaccagagcaacaccaccctgctgagagaggtgaagatcgagggcaagcccgaggccccccccagccagagccccaaccccagcacccacgtgtgcagccccagccccatgctgagcgagagaccccagaacaactgcgtgaacagaaacgacatccagaccgccggcaccatgaccgtgcccctgtgcagcgagaagaccagacccatgagcgagcacctgaagcacaacccccccatcttcggcagcagcggcgagctgcaggacaactgccagcagctgatgagaaacaaggagcaggagatcctgaagggcagagacaaggagcagaccagagacctggtgccccccacccagcactacctgaagcccggctggatcgagctgaaggcccccagattccaccaggccgagagccacctgaagagaaacgaggccagcctgcccagcatcctgcagtaccagcccaacctgagcaaccagatgaccagcaagcagtacaccggcaacagcaacatgcccggcggcctgcccagacaggcctacacccagaagaccacccagctggagcacaagagccagatgtaccaggtggagatgaaccagggccagagccagggcaccgtggaccagcacctgcagttccagaagcccagccaccaggtgcacttcagcaagaccgaccacctgcccaaggcccacgtgcagagcctgtgcggcaccagattccacttccagcagagagccgacagccagaccgagaagctgatgagccccgtgctgaagcagcacctgaaccagcaggccagcgagaccgagcccttcagcaacagccacctgctgcagcacaagccccacaagcaggccgcccagacccagcccagccagagcagccacctgccccagaaccagcagcagcagcagaagctgcagatcaagaacaaggaggagatcctgcagaccttcccccacccccagagcaacaacgaccagcagagagagggcagcttcttcggccagaccaaggtggaggagtgcttccacggcgagaaccagtacagcaagagcagcgagttcgagacccacaacgtgcagatgggcctggaggaggtgcagaacatcaacagaagaaacagcccctacagccagaccatgaagagcagcgcctgcaagatccaggtgagctgcagcaacaacacccacctggtgagcgagaacaaggagcagaccacccaccccgagctgttcgccggcaacaagacccagaacctgcaccacatgcagtacttccccaacaacgtgatccccaagcaggacctgctgcacagatgcttccaggagcaggagcagaagagccagcaggccagcgtgctgcagggctacaagaacagaaaccaggacatgagcggccagcaggccgcccagctggcccagcagagatacctgatccacaaccacgccaacgtgttccccgtgcccgaccagggcggcagccacacccagacccccccccagaaggacacccagaagcacgccgccctgagatggcacctgctgcagaagcaggagcagcagcagacccagcagccccagaccgagagctgccacagccagatgcacagacccatcaaggtggagcccggctgcaagccccacgcctgcatgcacaccgccccccccgagaacaagacctggaagaaggtgaccaagcaggagaacccccccgccagctgcgacaacgtgcagcagaagagcatcatcgagaccatggagcagcacctgaagcagttccacgccaagagcctgttcgaccacaaggccctgaccctgaagagccagaagcaggtgaaggtggagatgagcggccccgtgaccgtgctgaccagacagaccaccgccgccgagctggacagccacacccccgccctggagcagcagaccaccagcagcgagaagacccccaccaagagaaccgccgccagcgtgctgaacaacttcatcgagagccccagcaagctgctggacacccccatcaagaacctgctggacacccccgtgaagacccagtacgacttccccagctgcagatgcgtggagcagatcatcgagaaggacgagggccccttctacacccacctgggcgccggccccaacgtggccgccatcagagagatcatggaggagagattcggccagaagggcaaggccatcagaatcgagagagtgatctacaccggcaaggagggcaagagcagccagggctgccccatcgccaagtgggtggtgagaagaagcagcagcgaggagaagctgctgtgcctggtgagagagagagccggccacacctgcgaggccgccgtgatcgtgatcctgatcctggtgtgggagggcatccccctgagcctggccgacaagctgtacagcgagctgaccgagaccctgagaaagtacggcaccctgaccaacagaagatgcgccctgaacgaggagagaacctgcgcctgccagggcctggaccccgagacctgcggcgccagcttcagcttcggctgcagctggagcatgtactacaacggctgcaagttcgccagaagcaagatccccagaaagttcaagctgctgggcgacgaccccaaggaggaggagaagctggagagccacctgcagaacctgagcaccctgatggcccccacctacaagaagctggcccccgacgcctacaacaaccagatcgagtacgagcacagagcccccgagtgcagactgggcctgaaggagggcagacccttcagcggcgtgaccgcctgcctggacttctgcgcccacgcccacagagacctgcacaacatgcagaacggcagcaccctggtgtgcaccctgaccagagaggacaacagagagttcggcggcaagcccgaggacgagcagctgcacgtgctgcccctgtacaaggtgagcgacgtggacgagttcggcagcgtggaggcccaggaggagaagaagagaagcggcgccatccaggtgctgagcagcttcagaagaaaggtgagaatgctggccgagcccgtgaagacctgcagacagagaaagctggaggccaagaaggccgccgccgagaagctgagcagcctggagaacagcagcaacaagaacgagaaggagaagagcgcccccagcagaaccaagcagaccgagaacgccagccaggccaagcagctggccgagctgctgagactgagcggccccgtgatgcagcagagccagcagccccagcccctgcagaagcagcccccccagccccagcagcagcagagaccccagcagcagcagccccaccacccccagaccgagagcgtgaacagctacagcgccagcggcagcaccaacccctacatgagaagacccaaccccgtgagcccctaccccaacagcagccacaccagcgacatctacggcagcaccagccccatgaacttctacagcaccagcagccaggccgccggcagctacctgaacagcagcaaccccatgaacccctaccccggcctgctgaaccagaacacccagtaccccagctaccagtgcaacggcaacctgagcgtggacaactgcagcccctacctgggcagctacagcccccagagccagcccatggacctgtacagataccccagccaggaccccctgagcaagctgagcctgccccccatccacaccctgtaccagcccagattcggcaacagccagagcttcaccagcaagtacctgggctacggcaaccagaacatgcagggcgacggcttcagcagctgcaccatcagacccaacgtgcaccacgtgggcaagctgcccccctaccccacccacgagatggacggccacttcatgggcgccaccagcagactgccccccaacctgagcaaccccaacatggactacaagaacggcgagcaccacagccccagccacatcatccacaactacagcgccgcccccggcatgttcaacagcagcctgcacgccctgcacctgcagaacaaggagaacgacatgctgagccacaccgccaacggcctgagcaagatgctgcccgccctgaaccacgacagaaccgcctgcgtgcagggcggcctgcacaagctgagcgacgccaacggccaggagaagcagcccctggccctggtgcagggcgtggccagcggcgccgaggacaacgacgaggtgtggagcgacagcgagcagagcttcctggaccccgacatcggcggcgtggccgtggcccccacccacggcagcatcctgatcgagtgcgccaagagagagctgcacgccaccacccccctgaagaaccccaacagaaaccaccccaccagaatcagcctggtgttctaccagcacaagagcatgaacgagcccaagcacggcctggccctgtgggaggccaagatggccgagaaggccagagagaaggaggaggagtgcgagaagtacggccccgactacgtgccccagaagagccacggcaagaaggtgaagagagagcccgccgagccccacgagaccagcgagcccacctacctgagattcatcaagagcctggccgagagaaccatgagcgtgaccaccgacagcaccgtgaccaccagcccctacgccttcaccagagtgaccggcccctacaacagatacatctag

SEQ ID NO: 44520 - DNA, 1914 bp, Artificial Sequence
  derived and/or modified sequence
atggagcaggacagaaccaaccacgtggagggcaacagactgagccccttcctgatccccagcccccccatctgccagaccgagcccctggccaccaagctgcagaacggcagccccctgcccgagagagcccaccccgaggtgaacggcgacaccaagtggcacagcttcaagagctactacggcatcccctgcatgaagggcagccagaacagcagagtgagccccgacttcacccaggagagcagaggctacagcaagtgcctgcagaacggcggcatcaagagaaccgtgagcgagcccagcctgagcggcctgctgcagatcaagaagctgaagcaggaccagaaggccaacggcgagagaagaaacttcggcgtgagccaggagagaaaccccggcgagagcagccagcccaacgtgagcgacctgagcgacaagaaggagagcgtgagcagcgtggcccaggagaacgccgtgaaggacttcaccagcttcagcacccacaactgcagcggccccgagaaccccgagctgcagatcctgaacgagcaggagggcaagagcgccaactaccacgacaagaacatcgtgctgctgaagaacaaggccgtgctgatgcccaacggcgccaccgtgagcgccagcagcgtggagcacacccacggcgagctgctggagaagaccctgagccagtactaccccgactgcgtgagcatcgccgtgcagaagaccaccagccacatcaacgccatcaacagccaggccaccaacgagctgagctgcgagatcacccaccccagccacaccagcggccagatcaacagcgcccagaccagcaacagcgagctgccccccaagcccgccgccgtggtgagcgaggcctgcgacgccgacgacgccgacaacgccagcaagctggccgccatgctgaacacctgcagcttccagaagcccgagcagctgcagcagcagaagagcgtgttcgagatctgccccagccccgccgagaacaacatccagggcaccaccaagctggccagcggcgaggagttctgcagcggcagcagcagcaacctgcaggcccccggcggcagcagcgagagatacctgaagcagaacgagatgaacggcgcctacttcaagcagagcagcgtgttcaccaaggacagcttcagcgccaccaccaccccccccccccccagccagctgctgctgagcccccccccccccctgccccaggtgccccagctgcccagcgagggcaagagcaccctgaacggcggcgtgctggaggagcaccaccactaccccaaccagagcaacaccaccctgctgagagaggtgaagatcgagggcaagcccgaggccccccccagccagagccccaaccccagcacccacgtgtgcagccccagccccatgctgagcgagagaccccagaacaactgcgtgaacagaaacgacatccagaccgccggcaccatgaccgtgcccctgtgcagcgagaagaccagacccatgagcgagcacctgaagcacaacccccccatcttcggcagcagcggcgagctgcaggacaactgccagcagctgatgagaaacaaggagcaggagatcctgaagggcagagacaaggagcagaccagagacctggtgccccccacccagcactacctgaagcccggctggatcgagctgaaggcccccagattccaccaggccgagagccacctgaagagaaacgaggccagcctgcccagcatcctgcagtaccagcccaacctgagcaaccagatgaccagcaagcagtacaccggcaacagcaacatgcccggcggcctgcccagacaggcctacacccagaagaccacccagctgagcaccagccacaagtgcaccaagctgaagtag

SEQ ID NO: 44521 - DNA, 6072 bp, Artificial Sequence
  derived and/or modified sequence
atgatccaggaggagcagatccagctggagggcagcctggtggacggccccgaggccagcctgatggagcaggacagaaccaaccacgtggagggcaacagactgagccccttcctgatccccagcccccccatctgccagaccgagcccctggccaccaagctgcagaacggcagccccctgcccgagagagcccaccccgaggtgaacggcgacaccaagtggcacagcttcaagagctactacggcatcccctgcatgaagggcagccagaacagcagagtgagccccgacttcacccaggagagcagaggctacagcaagtgcctgcagaacggcggcatcaagagaaccgtgagcgagcccagcctgagcggcctgctgcagatcaagaagctgaagcaggaccagaaggccaacggcgagagaagaaacttcggcgtgagccaggagagaaaccccggcgagagcagccagcccaacgtgagcgacctgagcgacaagaaggagagcgtgagcagcgtggcccaggagaacgccgtgaaggacttcaccagcttcagcacccacaactgcagcggccccgagaaccccgagctgcagatcctgaacgagcaggagggcaagagcgccaactaccacgacaagaacatcgtgctgctgaagaacaaggccgtgctgatgcccaacggcgccaccgtgagcgccagcagcgtggagcacacccacggcgagctgctggagaagaccctgagccagtactaccccgactgcgtgagcatcgccgtgcagaagaccaccagccacatcaacgccatcaacagccaggccaccaacgagctgagctgcgagatcacccaccccagccacaccagcggccagatcaacagcgcccagaccagcaacagcgagctgccccccaagcccgccgccgtggtgagcgaggcctgcgacgccgacgacgccgacaacgccagcaagctggccgccatgctgaacacctgcagcttccagaagcccgagcagctgcagcagcagaagagcgtgttcgagatctgccccagccccgccgagaacaacatccagggcaccaccaagctggccagcggcgaggagttctgcagcggcagcagcagcaacctgcaggcccccggcggcagcagcgagagatacctgaagcagaacgagatgaacggcgcctacttcaagcagagcagcgtgttcaccaaggacagcttcagcgccaccaccaccccccccccccccagccagctgctgctgagcccccccccccccctgccccaggtgccccagctgcccagcgagggcaagagcaccctgaacggcggcgtgctggaggagcaccaccactaccccaaccagagcaacaccaccctgctgagagaggtgaagatcgagggcaagcccgaggccccccccagccagagccccaaccccagcacccacgtgtgcagccccagccccatgctgagcgagagaccccagaacaactgcgtgaacagaaacgacatccagaccgccggcaccatgaccgtgcccctgtgcagcgagaagaccagacccatgagcgagcacctgaagcacaacccccccatcttcggcagcagcggcgagctgcaggacaactgccagcagctgatgagaaacaaggagcaggagatcctgaagggcagagacaaggagcagaccagagacctggtgccccccacccagcactacctgaagcccggctggatcgagctgaaggcccccagattccaccaggccgagagccacctgaagagaaacgaggccagcctgcccagcatcctgcagtaccagcccaacctgagcaaccagatgaccagcaagcagtacaccggcaacagcaacatgcccggcggcctgcccagacaggcctacacccagaagaccacccagctggagcacaagagccagatgtaccaggtggagatgaaccagggccagagccagggcaccgtggaccagcacctgcagttccagaagcccagccaccaggtgcacttcagcaagaccgaccacctgcccaaggcccacgtgcagagcctgtgcggcaccagattccacttccagcagagagccgacagccagaccgagaagctgatgagccccgtgctgaagcagcacctgaaccagcaggccagcgagaccgagcccttcagcaacagccacctgctgcagcacaagccccacaagcaggccgcccagacccagcccagccagagcagccacctgccccagaaccagcagcagcagcagaagctgcagatcaagaacaaggaggagatcctgcagaccttcccccacccccagagcaacaacgaccagcagagagagggcagcttcttcggccagaccaaggtggaggagtgcttccacggcgagaaccagtacagcaagagcagcgagttcgagacccacaacgtgcagatgggcctggaggaggtgcagaacatcaacagaagaaacagcccctacagccagaccatgaagagcagcgcctgcaagatccaggtgagctgcagcaacaacacccacctggtgagcgagaacaaggagcagaccacccaccccgagctgttcgccggcaacaagacccagaacctgcaccacatgcagtacttccccaacaacgtgatccccaagcaggacctgctgcacagatgcttccaggagcaggagcagaagagccagcaggccagcgtgctgcagggctacaagaacagaaaccaggacatgagcggccagcaggccgcccagctggcccagcagagatacctgatccacaaccacgccaacgtgttccccgtgcccgaccagggcggcagccacacccagacccccccccagaaggacacccagaagcacgccgccctgagatggcacctgctgcagaagcaggagcagcagcagacccagcagccccagaccgagagctgccacagccagatgcacagacccatcaaggtggagcccggctgcaagccccacgcctgcatgcacaccgccccccccgagaacaagacctggaagaaggtgaccaagcaggagaacccccccgccagctgcgacaacgtgcagcagaagagcatcatcgagaccatggagcagcacctgaagcagttccacgccaagagcctgttcgaccacaaggccctgaccctgaagagccagaagcaggtgaaggtggagatgagcggccccgtgaccgtgctgaccagacagaccaccgccgccgagctggacagccacacccccgccctggagcagcagaccaccagcagcgagaagacccccaccaagagaaccgccgccagcgtgctgaacaacttcatcgagagccccagcaagctgctggacacccccatcaagaacctgctggacacccccgtgaagacccagtacgacttccccagctgcagatgcgtggagcagatcatcgagaaggacgagggccccttctacacccacctgggcgccggccccaacgtggccgccatcagagagatcatggaggagagattcggccagaagggcaaggccatcagaatcgagagagtgatctacaccggcaaggagggcaagagcagccagggctgccccatcgccaagtgggtggtgagaagaagcagcagcgaggagaagctgctgtgcctggtgagagagagagccggccacacctgcgaggccgccgtgatcgtgatcctgatcctggtgtgggagggcatccccctgagcctggccgacaagctgtacagcgagctgaccgagaccctgagaaagtacggcaccctgaccaacagaagatgcgccctgaacgaggagagaacctgcgcctgccagggcctggaccccgagacctgcggcgccagcttcagcttcggctgcagctggagcatgtactacaacggctgcaagttcgccagaagcaagatccccagaaagttcaagctgctgggcgacgaccccaaggaggaggagaagctggagagccacctgcagaacctgagcaccctgatggcccccacctacaagaagctggcccccgacgcctacaacaaccagatcgagtacgagcacagagcccccgagtgcagactgggcctgaaggagggcagacccttcagcggcgtgaccgcctgcctggacttctgcgcccacgcccacagagacctgcacaacatgcagaacggcagcaccctggtgtgcaccctgaccagagaggacaacagagagttcggcggcaagcccgaggacgagcagctgcacgtgctgcccctgtacaaggtgagcgacgtggacgagttcggcagcgtggaggcccaggaggagaagaagagaagcggcgccatccaggtgctgagcagcttcagaagaaaggtgagaatgctggccgagcccgtgaagacctgcagacagagaaagctggaggccaagaaggccgccgccgagaagctgagcagcctggagaacagcagcaacaagaacgagaaggagaagagcgcccccagcagaaccaagcagaccgagaacgccagccaggccaagcagctggccgagctgctgagactgagcggccccgtgatgcagcagagccagcagccccagcccctgcagaagcagcccccccagccccagcagcagcagagaccccagcagcagcagccccaccacccccagaccgagagcgtgaacagctacagcgccagcggcagcaccaacccctacatgagaagacccaaccccgtgagcccctaccccaacagcagccacaccagcgacatctacggcagcaccagccccatgaacttctacagcaccagcagccaggccgccggcagctacctgaacagcagcaaccccatgaacccctaccccggcctgctgaaccagaacacccagtaccccagctaccagtgcaacggcaacctgagcgtggacaactgcagcccctacctgggcagctacagcccccagagccagcccatggacctgtacagataccccagccaggaccccctgagcaagctgagcctgccccccatccacaccctgtaccagcccagattcggcaacagccagagcttcaccagcaagtacctgggctacggcaaccagaacatgcagggcgacggcttcagcagctgcaccatcagacccaacgtgcaccacgtgggcaagctgcccccctaccccacccacgagatggacggccacttcatgggcgccaccagcagactgccccccaacctgagcaaccccaacatggactacaagaacggcgagcaccacagccccagccacatcatccacaactacagcgccgcccccggcatgttcaacagcagcctgcacgccctgcacctgcagaacaaggagaacgacatgctgagccacaccgccaacggcctgagcaagatgctgcccgccctgaaccacgacagaaccgcctgcgtgcagggcggcctgcacaagctgagcgacgccaacggccaggagaagcagcccctggccctggtgcagggcgtggccagcggcgccgaggacaacgacgaggtgtggagcgacagcgagcagagcttcctggaccccgacatcggcggcgtggccgtggcccccacccacggcagcatcctgatcgagtgcgccaagagagagctgcacgccaccacccccctgaagaaccccaacagaaaccaccccaccagaatcagcctggtgttctaccagcacaagagcatgaacgagcccaagcacggcctggccctgtgggaggccaagatggccgagaaggccagagagaaggaggaggagtgcgagaagtacggccccgactacgtgccccagaagagccacggcaagaaggtgaagagagagcccgccgagccccacgagaccagcgagcccacctacctgagattcatcaagagcctggccgagagaaccatgagcgtgaccaccgacagcaccgtgaccaccagcccctacgccttcaccagagtgaccggcccctacaacagatacatctag

SEQ ID NO: 44522 - DNA, 6009 bp, Artificial Sequence
  derived and/or modified sequence
atggaacaagacagaaccaaccacgtggagggcaacagactcagtccttttctgatcccgagtcctcctatttgccagactgaacctctcgctaccaaactccagaacgggagccctctccctgaaagagcccaccctgaagtgaatggggataccaagtggcattctttcaaatcttattacggcatcccctgcatgaaggggtcacagaattctcgggtgtctccggatttcacgcaggagagtagaggatactcaaagtgcctgcaaaacggaggcattaagcgcacagtgagtgaaccgagtttgtcgggtctcctccagattaagaagctcaaacaggatcagaaggcgaacggagaaagaagaaatttcggtgttagccaggagcgaaatcctggggaaagcagccagccaaatgtctcagacctcagcgacaagaaggaatcagtgagtagcgtggcccaagaaaatgcagtgaaggacttcacaagctttagtacgcacaactgcagcgggccagagaaccctgaactgcaaatcctgaatgagcaggagggaaaatcggcgaattatcatgacaagaacattgtgctgctgaaaaataaggcagttctgatgcctaatggcgccacagttagtgcctcaagcgtggagcacacccatggagagctgctagaaaagactctgtcgcagtactatccggattgcgtgtcaatagctgtacagaaaacgaccagccacataaatgccattaattcgcaagccactaatgaactttcttgtgagatcacccatccctcacatacatcaggccagatcaactccgctcagactagcaattctgaactgcctccaaaaccagcagctgtcgtaagtgaggcatgcgatgcagatgatgcggacaatgcttctaaactcgccgctatgctgaacacttgttcttttcagaaaccagagcaactacagcaacagaagtccgtgttcgaaatttgtccttcccctgcagagaacaacatacagggaaccactaagctggcctctggggaggagttctgttcaggcagcagctcaaatttgcaggccccaggcggttctagcgagcggtaccttaagcaaaatgaaatgaacggggcctacttcaagcagtcctcagtgttcactaaagactcttttagtgccacgacaactccccctcccccgtctcagttgcttctctcccctcctccaccgctcccccaagtgcctcagctcccctctgaggggaagtccacactgaacgggggagtgttggaagagcaccaccactatcccaatcagagcaatactacgctcctacgcgaggtcaagatcgagggtaaacctgaagccccccccagccagtcgcccaacccttccacacatgtgtgtagtcccagccccatgttaagcgaaagacctcagaacaactgtgtgaaccgaaacgacattcaaacggctggaacgatgactgtcccgttgtgttctgagaagacacgaccaatgagcgagcatctgaaacacaaccctccaattttcggaagtagcggcgagctgcaggacaattgccagcaactgatgagaaacaaggaacaagagattctcaagggacgagacaaagagcagaccagggatctggtaccacccacccaacattacctgaagcctgggtggatcgagcttaaagccccgaggtttcaccaagcggaatcccacctgaagaggaacgaagcctcactgccaagcattctgcagtaccaacctaacctgagcaaccagatgacaagtaaacaatataccggaaactcaaacatgccagggggacttcctcgacaggcatacacccagaaaacaacccagctggagcacaaaagccagatgtatcaagtagaaatgaaccaggggcaaagccagggcacagtggatcaacacctacagtttcagaagccatcacaccaggttcactttagcaagaccgaccacctgccgaaggcgcacgttcagtccctgtgcggaactcgatttcatttccagcaacgggcagattcccagacagaaaaactgatgtcacctgtgctgaagcagcatctcaaccagcaggcttccgaaacagagccgttttcgaacagccatctgctgcagcataagccgcacaagcaggctgcccagacgcagccctcccaaagtagtcacttgccgcaaaatcagcagcagcagcagaagctgcaaatcaaaaacaaggaagagattctccaaacctttcctcaccctcagtccaacaatgaccaacaaagggagggctcgttctttggccaaaccaaagtcgaggaatgcttccatggcgagaatcaatactcaaagagttccgagtttgaaacacacaatgtgcaaatgggcctcgaggaggttcagaacataaacagacgaaattcaccttatagccagaccatgaaatcatctgcttgtaagatccaggtgagttgctcaaacaacacacacctcgtgtcagagaataaagagcaaaccacccaccctgagctgtttgctggcaacaagacgcagaatcttcatcatatgcagtattttccgaacaatgtgatcccaaagcaggacttgctacatagatgcttccaggagcaagaacaaaagagccagcaggcgagtgtgcttcaggggtataagaaccgtaaccaggatatgtcaggacagcaggcagcacagctggcccaacagcgttacctgatacataatcacgccaacgtattcccggtccccgaccagggaggcagccacacccagactccaccgcagaaagatacccagaagcatgcagctctgcgttggcacttgctgcagaaacaggaacaacagcagacccagcagccacagaccgagagctgtcactcccagatgcatcgacctattaaagtagaacccggctgcaaacctcatgcctgcatgcatacggcaccacctgaaaataaaacttggaagaaagtgacaaaacaggagaaccccccagcttcctgtgacaatgttcaacaaaaatctatcattgaaaccatggagcagcacttgaaacagttccacgccaagtctcttttcgaccacaaggcgcttacactcaaaagtcaaaaacaggtcaaggtcgagatgtctggtcccgtgaccgtgcttacaaggcagaccacggccgcagagctggattcccatactccagccctggaacagcaaaccacgagctctgagaagaccccgaccaagcgcaccgcagccagcgtcctcaataattttattgagtcaccgtccaagctgcttgatacacctatcaaaaacttgctggatacgccggtaaaaacccaatatgacttcccttcgtgccggtgtgtggaacaaatcatcgagaaagacgagggaccgttctatacccacctcggcgccgggcccaacgtggccgcaattcgtgagattatggaagaacgttttggacagaagggaaaagcaatccgaattgagagggtaatttacacggggaaggaagggaagtcatcacaaggctgtcctatcgctaagtgggtggtccgcaggagtagttctgaagaaaagctgttgtgcctcgtgagggaacgagctggtcacacatgcgaagctgctgtcattgtgattttaatcctcgtatgggagggaataccacttagtttagccgacaagctatattccgagctgactgagactttacgaaaatacggaactctgaccaacaggcgctgcgccctgaacgaggagagaacatgcgcctgccaaggcctcgaccctgagacctgcggagcaagcttcagcttcggttgcagctggtctatgtattacaacggttgtaaatttgccaggtctaagatacccaggaagttcaaactccttggagatgaccccaaagaagaggagaagctggagtcccacctccagaatctgagtactttgatggcccctacttataagaaattggctcccgatgcctacaacaaccagatcgagtacgagcatagggccccagaatgccggctgggactgaaagaagggagaccattctcgggcgtaacagcctgtctcgacttttgcgcccatgcccaccgggacctgcacaacatgcaaaatggcagcacactggtgtgcaccttgaccagggaggacaaccgggagtttggaggtaagccagaagacgagcagttgcacgtcctacctctctataaggtaagtgatgtcgatgagttcggcagcgtggaggcacaagaggagaaaaagcggtccggggccattcaggtcctatcatcttttagacggaaggtgcggatgctggcagaacccgtgaagacgtgtaggcagcggaagctggaggcaaaaaaggccgcggcagagaaactgtcctcattggaaaactctagcaataagaacgaaaaggaaaagagcgcaccttctagaacaaaacaaacggagaatgcctcacaagccaagcagttggccgaattgctgagattgtcaggtcccgtcatgcaacaatctcagcaaccccagccccttcagaaacaacctccccagccacagcagcagcagagacctcagcaacaacaaccccatcatcctcagactgagagcgtaaactcatactctgctagcggaagtaccaacccttacatgcgaagaccgaaccccgtgtccccttatccaaactcttcacacacaagcgatatatacggcagcaccagcccaatgaacttttacagcacaagctcccaggcggccggtagttatctcaattctagcaaccccatgaatccctacccaggcctgctgaaccagaatacacagtacccaagctaccagtgtaatggcaaccttagcgtggacaattgctccccgtatctaggcagttactcgccacagtcacagcccatggatctctaccggtaccccagtcaggacccactgagcaaactctctctgcctcctattcataccttgtaccagccccggtttggcaattcacaatctttcacatctaagtacctggggtatggaaaccagaatatgcagggcgacggttttagctcctgtactatacgccccaacgtccatcatgtgggcaagctgccaccataccctacacatgaaatggatggccacttcatgggcgcaaccagtaggcttcccccgaacctgtcgaaccccaacatggactataagaacggggaacatcactcaccctcacatatcattcacaactacagcgccgcgccaggcatgttcaacagtagcctgcatgcactgcacttgcagaacaaggaaaacgacatgttaagtcacacagcaaacggcctgtcaaagatgctgcccgctctcaatcatgaccgtaccgcgtgcgtccaaggcggacttcacaaattgtccgatgccaacggtcaagaaaaacagcctctcgcccttgtgcagggcgtggcttcaggagcggaagacaatgacgaggtgtggtccgacagtgagcaatcttttcttgatccagacatcggaggggtggctgtagcgccgacccatggctcaatcctgatagagtgcgccaagagggagctgcacgcaactacacccctgaaaaatcctaatcgtaatcaccccacccggatcagccttgtgttctaccagcataagagtatgaacgagcctaagcacggcctcgccctctgggaagcgaaaatggccgagaaggcccgcgagaaagaagaggaatgtgagaagtacgggcctgactatgtgccccaaaagtctcacggcaagaaagttaaacgggagcccgcagagccccatgagacctcggagccaacatatttgcgatttatcaagtccctcgccgaaagaaccatgtcagtcacaaccgattccacagtcacgacaagcccatacgcatttactcgggttaccggaccctacaatcggtatatttag

SEQ ID NO: 44523 - DNA, 1914 bp, Artificial Sequence
  derived and/or modified sequence
atggagcaggatcggacaaaccatgtggaagggaataggctgagcccattcctgatcccaagcccccccatctgccaaacagaacctttggcgacaaagctgcaaaatggctcacccttgcctgagagagctcaccccgaggtcaacggagatactaagtggcactctttcaaaagctactatgggatcccgtgcatgaaaggcagccagaattctagagtctcccccgacttcactcaggagtctcgcggatactcaaaatgtctgcagaatgggggcataaagaggactgtgagcgaaccatcactcagtgggctgctgcagatcaaaaagcttaagcaggaccaaaaggctaatggcgagcgtcgaaatttcggcgtatctcaggagcgcaacccaggcgagtcaagtcagcctaatgtgtcagatttgagtgacaagaaagagtctgtgtcctctgtggcccaggagaacgcagtgaaggacttcaccagtttctcaacacataactgtagcggacccgaaaatccagagctacagatcctgaatgagcaggaaggaaagtcagccaactaccacgacaaaaacatcgtgctgttgaaaaacaaagccgtcttaatgccgaatggcgccaccgtctcagcctcttcagttgaacacactcacggcgagctgctcgaaaaaaccctttcccagtactaccccgattgcgtatccattgcggtgcagaagactacgtctcacatcaatgcaatcaactctcaggctacgaatgagctaagctgtgagatcacccacccttcccacacctcggggcagattaacagcgctcagaccagtaatagtgaactgccacctaaaccggcagctgtcgtaagtgaagcttgtgatgctgacgacgctgacaatgcctctaagctggcagcaatgctgaacacatgcagcttccagaagcccgaacagctgcagcagcagaagagcgtctttgagatctgtccttcccccgccgagaacaacatacagggaacaacgaaactcgcttcaggcgaggagttctgctctggttcaagtagtaatctccaggcgccaggcggaagttccgagcgatacctcaagcagaacgagatgaacggggcatatttcaagcagtcttcagtgttcaccaaggattctttctctgctaccactaccccacctcccccatcacagcttcttttgtccccgccccctccactgccgcaggtgccacagctcccttccgagggcaagtcaacactcaacggcggtgttctcgaagagcatcatcactacccaaaccagtcaaacaccactttactgcgggaggtgaaaatagagggtaagcccgaagccccaccatcccagtcccctaacccctccactcatgtgtgcagcccctcccctatgctgtccgagaggcctcagaacaactgcgtgaacagaaatgacatccagaccgcgggcaccatgacggtgcccctttgttcagagaagacccggcccatgtcagaacaccttaagcacaatcctcctatcttcggctcaagcggggagcttcaggacaattgtcagcaactgatgcgtaacaaagagcaggaaatccttaaaggcagagataaagagcaaacccgagacttggtccctcctacacaacactatctgaaacccgggtggatcgagctaaaggcacccagatttcatcaggccgaatcacatctaaaaaggaacgaggcttctctgccctctatcctgcaatatcagcccaacctctccaaccagatgaccagcaagcagtatacagggaactcaaacatgccggggggcctgccccgacaagcttacactcagaagactactcagctgagcacctcacacaagtgcactaagctgaaatag

SEQ ID NO: 44524 - DNA, 6009 bp, Artificial Sequence
  derived and/or modified sequence
atggagcaggatcgcaccaaccacgtggagggcaaccgcctcagcccttttttgattccgtccccccccatctgtcagaccgagcccctagcaactaaacttcaaaatgggagccctcttcccgagcgagcccaccccgaggtgaatggagatacaaagtggcacagtttcaagagctattacggtatcccctgcatgaaggggagccagaacagtagagttagcccagacttcacccaggagtcacggggttattctaaatgcctgcagaacggcgggataaaacggactgtatccgagccctctttatcaggtctcctccagatcaagaaattgaagcaggaccagaaggccaatggcgaacgcagaaactttggtgtgtctcaggaacgaaacccaggcgaatccagccaacccaatgtgagcgacctttccgataagaaagaaagcgtttcatccgttgcccaggagaacgcagttaaggattttacctcattttctacccacaattgctctggccccgaaaatcccgaactgcagatcctaaatgagcaagaggggaaaagtgccaattaccacgacaagaacatcgtcctcttaaaaaacaaggcagtgctgatgccaaacggtgccacagtgtccgctagctcagtcgaacatacccacggtgagctcttggagaagaccctgagccagtactaccccgattgtgtatcaatcgcagtgcaaaaaactacaagtcatatcaacgctattaactctcaagccacaaacgagctgtcctgcgagatcacgcacccttcacacaccagtggccaaatcaactctgcgcaaacaagcaactcagagctgcctccaaaacctgccgctgtggtaagcgaggcttgcgacgccgacgatgctgacaatgctagtaagttagctgcaatgcttaacacttgtagcttccagaagcccgagcaactgcaacagcagaagagtgtgttcgagatttgtcctagcccagcagagaataacattcaagggaccacgaagttggccagcggtgaggagttttgctccgggtcgagcagtaatctgcaggccccaggaggaagctccgaacgataccttaagcaaaacgagatgaacggtgcgtatttcaagcaatcatctgtctttactaaggattccttctctgcgaccaccactcctccccctccaagccagctcctactctcccccccgccgcctctgccccaggtgcctcagcttccctcagagggcaagtctacgctgaacggaggtgtcctcgaagaacatcaccactatcccaaccagtcaaatactacactgctaagagaagtgaaaatagagggtaaacccgaggccccacctagccagagccccaacccgagtacccatgtgtgctcaccttctcccatgctgtctgaacgcccacagaacaattgtgtgaaccggaatgatatccagacagcaggaacaatgaccgtgcctttatgcagcgagaaaacccgacccatgtctgaacatctgaaacataatcctccaatttttggaagcagtggtgagctccaggacaattgccagcaactgatgagaaataaagaacaggagattctgaaagggcgagataaggagcagacgcgcgacttagttccgccaactcagcactatctgaagcccggctggattgagctcaaagctccccggttccaccaggcagaaagtcacttgaagaggaatgaagcctctcttcccagtatattacagtatcagcctaatttgagtaaccagatgacatccaaacagtatacaggcaattctaatatgccaggcggactcccacgtcaagcctacactcaaaagacaacacagctggagcataagtctcaaatgtaccaggtggaaatgaatcaggggcagtctcagggtacggtcgaccagcatctccaattccaaaagccttctcaccaggtgcatttctctaaaactgatcacctcccgaaggcccacgtccagtctctgtgtgggactcgcttccactttcagcagagggctgattcacagacagagaagctgatgtccccagtcctgaagcaacacttgaatcagcaggcctcagaaacagaacccttcagcaacagccatctgctgcagcacaagcctcacaagcaggcagcacagacccaaccaagccagagctcccatctaccacagaatcagcaacaacaacaaaagctccaaataaagaataaagaggagatcttacagacgttcccccacccccagagcaacaacgaccagcaacgcgagggcagctttttcggtcagaccaaagtggaggaatgcttccacggagagaaccagtactctaaatccagtgaattcgaaacgcacaatgtgcagatggggcttgaggaagttcagaatattaatcggaggaattctccgtatagccagactatgaagagctcagcttgtaagatacaggttagctgctccaataatacccacctggtctccgagaataaggagcaaacgacgcatccggagttgttcgctggcaataaaacgcagaatctccaccacatgcaatacttccctaataatgtaattccaaagcaggatctccttcaccggtgctttcaggagcaggaacaaaagtcgcagcaagcttcggtattgcagggctataaaaataggaaccaggatatgtcagggcagcaggcggctcagctcgcacagcagcgctacctcattcataaccatgcaaacgtgttcccagtgccagatcaagggggaagtcacacgcagaccccccctcagaaagacacgcaaaagcacgccgccttgcggtggcacctgctccagaaacaggagcagcagcagactcagcagccccagaccgagtcctgtcactcccaaatgcaccggcctataaaggtagaacctgggtgcaaacctcacgcttgcatgcacactgccccaccagaaaacaaaacgtggaagaaggttactaaacaggaaaaccctccagcgagttgcgataacgtgcagcagaagagtataatcgagacaatggagcaacacctgaagcaattccacgcgaaatcgttgttcgaccacaaagccctcactctaaagtcacagaagcaggtcaaagtcgagatgtctgggcccgtgacagtgttgaccaggcagactacagcagcagaattagatagccatactcccgcccttgaacaacagaccacctcttcagagaagacccccaccaagcgcactgctgcctcagtgctgaacaattttatagagagccccagcaaattgctcgacacccctatcaagaatctgctagatacgccggtcaaaactcagtatgatttcccatcctgccgatgcgtggaacaaataattgagaaagacgaggggccattttacacccatctgggggctgggcctaatgttgccgctatcagagagatcatggaagagcggtttggtcagaagggaaaagctatcaggatcgagcgcgtcatttatactgggaaggaggggaagagctcacagggatgcccaatcgccaaatgggtggttcgtcgctcatcctccgaagaaaagttactgtgcttagtgcgcgaaagagccggtcacacttgtgaagctgcggtgatagtgatcttaatcctggtttgggagggtatccccttgtcgctggcagataaactgtatagcgagctgaccgagacactgcgcaagtatggaaccctcacaaaccgacgatgtgcgctcaatgaggaaagaacgtgcgcttgccagggcctagatcccgaaacttgcggtgcttctttctccttcggatgcagctggtcaatgtattataatggttgcaagttcgcacggtctaaaatccccaggaagttcaagttgctaggagacgacccaaaagaagaagagaagttggaatctcacctgcagaacctgtccaccctgatggcaccgacatataagaaactggctccagacgcctacaataaccagattgaatacgagcacagagcaccggagtgcagattgggtctcaaagaaggtcgtccattcagcggggtaaccgcgtgcctggacttctgcgctcacgcccatagagatctgcataatatgcagaatgggagcacactggtttgtacccttacgcgagaggataaccgggaatttggcggcaagccagaggacgagcagctccatgtgctccccctgtacaaagtgtcagatgtggatgagttcgggtcagtagaagcccaagaggaaaaaaaaagaagtggcgccatacaagtcctgtcatcctttcgtaggaaggtgcggatgctggccgagccggtcaagacatgtcgtcagcggaaacttgaggctaagaaagccgcagccgaaaagttgtcctccttggaaaatagctctaacaagaacgaaaaagaaaagagcgccccctctcggaccaaacagacagagaatgcctctcaggccaagcagcttgccgagctactgcgccttagcggccccgtcatgcagcagagccagcaaccccagcccctgcagaaacagccgccacagcctcagcagcagcagaggccccagcagcaacaaccccaccacccacaaaccgagagcgttaacagctactcagcgtctggctccaccaatccttacatgcgacgtcctaatccggtctccccatacccgaatagctctcataccagtgacatatatgggtccacatcgcccatgaacttttactcaacctctagccaggcggcgggctcctatctcaactccagcaatccgatgaatccttacccaggtttgctgaatcagaacacccagtacccgtcctaccagtgtaacgggaacttaagcgtagacaactgtagtccctatctcggaagttactccccccagtcccagcccatggacctgtacagatacccaagccaggatcccttatctaaactgagcttgccacctatacatacattgtatcagccccggttcggtaatagccaatccttcactagtaaatacctcggatatggtaaccagaacatgcaaggtgacggcttttcaagttgtacaattcgccccaatgtgcaccacgtgggcaaactccccccttacccgactcatgagatggatggacactttatgggagccacatcgcgtctcccaccaaacctctctaatcctaacatggattacaaaaacggcgagcatcattccccaagccacattatccataactattcggccgctcccggaatgtttaactcctcattgcacgcccttcacttacagaacaaagagaacgacatgctctctcatacagcaaacggactgtctaaaatgttgcccgctttgaaccatgatagaacagcctgcgtccagggaggacttcacaaactgtctgatgctaacggccaggagaaacagccactggccctggtgcaaggcgtcgcatccggtgccgaggacaatgatgaggtgtggtcagatagcgagcagtcgttcctggaccctgacataggcggcgtggcagtggcaccaacacatggcagcatactcatcgagtgcgcaaagcgtgaactccacgcaacaacccccctgaaaaatccaaatcgcaaccatccgactcggatcagcctagtcttctaccaacacaaaagtatgaatgaaccgaagcacggtttggccctgtgggaagcgaagatggccgaaaaggccagagaaaaggaagaggagtgtgagaaatacggcccagattatgtgccacaaaagagtcacggcaaaaaggttaagagagaaccagctgagcctcacgaaacatccgagccaacttatctaagatttatcaagagcctagccgagcgaaccatgagtgtcacaaccgatagtacagtgacgacgtccccgtatgcgtttacccgcgtgactggtccctacaatcgctacatttag

SEQ ID NO: 44525 - DNA, 6072 bp, Artificial Sequence
  derived and/or modified sequence
atgatccaggaggagcagatccagctggagggatcgcttgttgatgggccagaggccagcttgatggagcaagatagaacaaaccatgtcgaagggaatcggttgtccccctttctgatcccttcccctccaatttgccaaactgagccactggccacaaaactgcaaaacggatcaccactgccagagagagcgcacccggaagttaacggggatacgaagtggcatagcttcaagagttactacggcattccgtgcatgaagggcagccagaacagccgagtaagccccgacttcacccaggaaagccgaggttattcgaaatgcctccagaacgggggcatcaaaaggaccgtaagcgaaccttcactgtcaggattactgcagatcaagaagctcaagcaggaccagaaagcaaatggagaacgccggaacttcggggtctctcaagagcgcaatccaggcgaatcttcgcaacctaatgtgagcgatctgagcgacaagaaagaatccgtgtctagtgtggcccaggagaatgctgttaaggatttcactagcttttccacacacaactgttccggacctgagaaccccgagctccaaatattgaacgaacaagagggcaagagcgcaaattatcatgacaagaacatcgtcttgctgaagaacaaagcggtcctgatgccaaatggcgccacagtgagtgcttcctctgtagagcacacccatggtgaactgttggagaagactctgagccagtactaccctgattgtgtgtcgatcgctgttcagaaaacaacatcccacattaacgctatcaacagtcaagcgaccaatgaactgagctgcgagatcacacacccatcacatacaagtggacagattaacagcgcacaaaccagtaactctgaactacctccaaagcctgctgctgtagtgtctgaggcctgcgacgccgacgacgctgataacgcatccaagttagcagctatgctaaatacctgctcgtttcaaaagccagaacaactgcaacaacagaaatctgtctttgaaatctgtcctagtcccgccgaaaacaacatccaaggtactaccaaactcgctagcggcgaggagttctgtagcggctcgtcttctaacttgcaggcccccggcggctcctcagagaggtatttgaaacaaaatgagatgaacggggcatattttaagcaaagttccgtattcaccaaagacagctttagtgctaccactacgccaccccctcctagtcagctgttgcttagtccgcctccacccctgccccaggtgcctcagcttcccagtgagggtaaatctacactgaatgggggagtattagaagaacatcaccactaccctaaccagtccaataccaccctcctgcgggaggtcaaaatcgagggcaagccagaagctcctccaagccaatccccgaatccatccacacacgtgtgctcgccatcaccgatgctttctgagaggcctcagaataactgcgtgaacagaaacgacattcaaaccgcgggaacaatgacagtccctctgtgctccgagaaaacccgccccatgagtgaacatctgaagcacaaccctcccatcttcgggagctctggcgaactgcaggataattgtcaacagctgatgcggaataaggaacaagagatacttaaggggcgggacaaggagcagactagagatttagtccccccaacgcagcactaccttaagcccgggtggattgaattgaaagctccccgtttccatcaggcggagtcacatcttaagagaaatgaagctagcctgccttcaatactgcaatatcaacccaacctgtcaaaccagatgacttcaaagcagtacactggaaactccaacatgcctgggggcctgccgcggcaggcctacacacagaaaacaactcagctggagcataagagtcaaatgtaccaggtggaaatgaatcagggacagtcccaagggacggtggaccagcacctacagttccagaagcctagtcaccaggtacacttctccaaaactgaccatctaccgaaagcccatgtacagtccttatgcggtacaagatttcactttcaacaaagagccgattcccagactgagaaactgatgtctccagtgcttaagcaacacctgaatcagcaggcaagcgagacagaacccttcagtaactcccatctactccagcataaaccgcacaagcaggctgcccaaactcagccgtctcagagcagtcatctgccccagaatcaacagcagcagcagaagctgcagattaagaacaaggaggagattcttcagacgtttccccatccgcagtccaataacgatcagcagcgcgagggtagcttctttggacagaccaaagtggaggaatgctttcatggagagaaccagtacagcaaaagctcggagttcgaaactcacaacgtgcagatgggacttgaagaagtacaaaatattaaccgtcggaatagtccctactcacaaacaatgaaatcatccgcctgcaaaattcaagtttcctgcagcaataatacccacctggtgtctgagaacaaagagcaaacaacccatccagagctgttcgccgggaacaaaacccagaatctgcaccacatgcagtacttccctaacaacgtcattcccaagcaggatctcctgcaccgatgttttcaggagcaggagcagaagtcccaacaggcctcagttttacaagggtataagaaccggaatcaagacatgtctggccagcaagccgcacagttggcacagcaaagatatctcatccataaccacgctaacgtatttcccgtgccagaccaggggggttcacacacacagacaccccctcagaaggatacacagaaacatgcagccctccgctggcaccttctccagaagcaggaacaacaacaaacccagcagccccagacagagagctgccacagtcagatgcacaggcccattaaggtcgagccaggctgcaagccccatgcttgcatgcataccgcgccacccgaaaataaaacttggaagaaagtaaccaaacaagagaatcctccggcctcgtgtgataacgtgcagcaaaaatcgataatagagacgatggaacagcacctgaaacagttccacgctaaatctctgtttgatcacaaggccctcacactcaagtctcagaagcaggtgaaagtggagatgtcggggcccgttaccgtgctcacccggcaaaccacagcagctgagctggatagccacaccccagctctcgagcaacagactaccagcagcgaaaagacacctactaaacgcacagccgcaagcgtcctgaacaacttcatcgagagccccagtaagctgctggatacccccattaaaaacctgcttgatacccccgtgaagacacagtacgattttccaagttgtaggtgcgtggaacagattatcgagaaggacgagggccccttctacacccacctgggtgccggcccaaacgtggcagccatacgtgagataatggaggagcggttcggtcagaaaggaaaggcgatccgcatagagagggtcatttataccggaaaagagggtaaaagttcccaagggtgcccaattgctaagtgggttgtgcggcggagttccagtgaagagaagctcctgtgtctggtgcgtgagcgtgccggccacacctgtgaggcagcggtgatagtgatccttatcctggtatgggaaggaataccactgtctctcgcggacaagctatatagtgaactcactgaaactttgcgaaagtacgggaccctgacaaataggaggtgtgctttaaatgaagagagaacgtgtgcctgtcaaggactcgacccggaaacctgcggagcctcattctccttcggctgctcatggagcatgtattacaatggatgtaaattcgcccgttctaaaatccctaggaagttcaaactcctgggagacgacccgaaagaggaagaaaaactcgagagccacctccagaatctgtccaccctgatggcacccacatacaagaagctggcacctgacgcctataataatcaaatagagtacgagcatcgagctcccgagtgccgtctgggattaaaagagggcagacccttttcgggcgtgacggcgtgtctggatttctgcgcccacgcccacagagaccttcacaacatgcagaacggcagcaccctcgtgtgtaccctcacacgggaggacaatagagaatttggtggcaaacccgaggacgaacagctgcacgtgctgccgctctataaagtctcagacgtagatgaatttgggtcagtagaggcacaggaggagaagaaacgctccggcgctatccaagtactgtcctccttcagaaggaaggttcgtatgctagccgagcctgtgaagacctgtcggcaaagaaaactggaagccaagaaagcagcagcagaaaaactatcatccctcgaaaactcatctaacaagaacgagaaagagaaatccgcccccagtaggaccaagcagaccgaaaacgccagtcaggcaaagcagcttgccgagctgttacggttgtctggccccgtcatgcaacaatctcagcagccacagcccctgcagaagcagccacctcagcctcagcagcagcagcgtccccaacagcagcagccacaccacccccaaaccgaatccgtcaacagctacagcgcttctgggtcgactaacccttatatgagaagacctaatcccgtgtccccgtatccaaactctagccacacctccgatatctacggcagcactagccctatgaacttttacagcacgtccagccaggctgcgggttcatacctgaatagctctaaccccatgaatccttaccccggactgcttaaccagaatacgcagtatccaagctaccagtgcaatgggaatcttagcgtggataattgcagtccatatttgggatcctactctcctcaatcgcagcctatggatctgtacaggtatccgtcccaagacccgctttcgaaactttcgttgccacccatccataccctgtatcagcctcggtttgggaattctcagagctttacgagcaaatacctggggtatgggaatcagaatatgcagggcgatggcttctcaagttgcacaatccgcccaaacgtccatcacgtcggcaaactcccaccgtatcccactcatgagatggacggacactttatgggcgcaacgagccgccttcctcccaacttaagcaaccccaacatggattacaagaacggcgaacaccattccccaagtcatatcatccacaactattcggccgctccggggatgttcaattcaagcctccacgccttacatttgcagaacaaagagaacgatatgctgtcacataccgccaatggccttagcaaaatgctgccagcccttaaccatgatcgcacagcttgcgtccagggcgggctgcacaagcttagtgatgctaacgggcaggagaaacaacccctcgctttggtgcagggcgtagcttccggggcagaagacaacgacgaggtgtggtccgatagtgaacagagttttctagaccccgacatcgggggagtggctgtggcacctacccatgggagcattctcatcgaatgtgcaaagcgagagctgcatgctaccaccccactaaaaaatccaaacaggaatcatcctaccagaattagcctggtgttttaccagcataaaagtatgaatgaacccaagcatggcctggccctgtgggaggcaaaaatggccgagaaagcgcgggaaaaggaggaggagtgtgagaagtatggaccagattatgtccctcagaagagtcacggaaagaaggtcaaacgggaacccgcagaacctcatgaaacctccgaacccacctatctgaggttcatcaaaagcctagcagagagaaccatgtctgtcaccacagattcaacagtgacaacatccccttatgccttcacccgcgtgacgggtccttataaccggtatatttag
